United States Patent Application Publication US 2018/0126003 A1 - sequence listing, part 65

SEQ ID NO: 117319 - DNA, 13233 bp, Artificial Sequence
  derived and/or modified sequence
atgaggctggccgaggagcgggccgccctggccgcagaaaatgctgatggagagcctggagctgaccggcggctgcggctgctgggcacctacgtggccatgagcctgcggcctgctgctggggcctgggagcgctgtgccggcagcgctgaggccgagcagctgctgcaggccttcctgggcagagatgctgctgagggcccccggcccctgctggtggtgcggcccggcccccggggcctggccatccggcccggcctggaggtgggccctgagagcggcctggccggggccaaggccctcttcttcctgaggacaggccctgagcccccaggccctgacagcttcagaggagctgtggtgtgtggggacctgcctgctgcccccctggagcacctggccgccctcttcagcgaggtggtgctgcctgtgctggccaatgagaagaaccggctgaactggccccacatgatctgtgaagatgtgagaagacatgcccacagcctgcagtgtgacctgagcgtcatcctggagcaggtgaagggcaagaccctgctgcccctgcctgctggcagcgagaagatggagtttgctgacagcaagtctgagaccgtgctggacagcattgacaagagcgtcatctatgccattgaatctgctgtgatcaagtggagctaccaggtgcaggtggtgctgaagcgggagagcagccagcccctgctgcagggcgagaaccccacccccaaggtggagctggagttctggaagagccgctatgaggacctgaagtacatctacaaccagctgcggaccatcaccgtgcggggcatggccaagctgctggacaagctgcagagcagctacttccctgccttcaaggccatgtacagagatgtggtggccgccctggccgaggcccaggacatccacgtgcacctgatccccctgcagaggcacctggaggccctggagaatgctgagttccctgaggtgaagccccagctgcggcccctgctgcacgtggtgtgcctgatctgggccacctgcaagagctaccgcagccctggccgcctgactgtgctgctgcaggagatctgcaacctgctgatccagcaggccagcaactacctgagccctgaggacctgctgcggtctgaggtggaggagagccagaggaagctgcaggtggtgtctgacaccctgtccttcttcaagcaggagttccaggacagaagagagaacctgcacacctacttcaaggagaaccaggaggtgaaggagtgggacttccagagcagcctggtgtttgtgcggctggatggcttcctgggccagctgcacgtggtggagggcctgctgaagacagccctggacttccacaagctgggcaaggtggagttcagcggcgtgagaggaaatgccctgagccagcaggtgcagcagatgcatgaggagttccaggagatgtaccgcctgctgagcggcagcagcagtgactgcctgtacctgcagagcacagactttgaaaatgatgtgtctgagttcaaccagaaggtggaggacctggaccggcggctgggcaccatcttcatccaggcctttgatgatgcccctggcctggagcacgccttcaagctgctggacattgctggcaacctgctggagcggcccctggtggcccgggacaccagtgacaagtacctggtgctgatccagatgttcaacaaggacctggatgctgtgaggatgatctacagccagcacgtgcaggaggaggccgagctgggcttcagccctgtgcacaagaacatgcccaccgtggccggcggcctgcgctgggcccaggagctgcggcagaggatccagggccccttcagcaactttggccgcatcacccacccctgcatggagagcgctgagggcaagaggatgcagcagaagtatgaggacatgctgagcctgctggagaagtatgagacccggctgtatgaggactggtgcaggacagtgtctgagaagagccagtacaacctgagccagcccctgctgaagagggaccctgagaccaaggagatcaccatcaacttcaacccccagctgatctctgtgctgaaggagatgagctacctggagccccgggagatgaagcacatgcctgagacagctgctgccatgttcagcagccgggacttctaccggcagctggtggccaacctggagctgatggccaactggtacaacaaggtgatgaagaccctgctggaggtggagttccccctggtggaggaggagctgcagaacatcgacctgcggctgcgggctgctgaggagaccctgaactggaagacagagggcatctgtgactatgtgacagagatcaccagcagcatccatgacctggagcagaggatccagaagaccaaggacaacgtggaggagatccagaacatcatgaagacctgggtgacccccatcttcaagaccaaggatggcaagcgggagagcctgctgagcctggatgacagacatgacaggatggagaagtactacaacctgatcaaggagagcggcctgaagatccacgccctggtgcaggagaacctgggcctcttctctgctgaccccaccagcaacatctggaagacctacgtgaacagcattgacaacctgctgctgaatggcttcttcctggccatcgagtgcagcctgaagtacctgctggagaacacagagtgcaaggccggcctgacccccatctttgaggcccagctgagcctggccatccctgagctggtgttctaccccagcctggagagcggcgtgaagggcggcttctgtgacatcgtggagggcctcatcaccagcatcttccgcatccccagcctggtgccccggctgagcccccagaatggcagcccccactaccaggtggacctggatggcatcccagacctggccaacatgaggaggaccctgatggagcgggtgcagaggatgatgggcctgtgctgcggctaccagagcaccttcagccagtacagctacctgtatgtggaggacaggaaggaggtgctgggccagttcctgctgtatggccacatcctgaccccagaggagattgaagatcatgtggaggatggcatccctgagaacccccccctgctgagccagttcaaggtgcagattgacagctatgagaccctgtatgaggaggtgtgccgcctggagcccatcaaggtgtttgatggctggatgaagattgacatccggcccttcaaggccagcctgctgaacatcatcaagcgctggagcctgctcttcaagcagcacctggtggaccacgtgacccacagcctggccaacctggatgccttcatcaagaagtctgagagcggcctgctgaagaaggtggagaagggggacttccagggcctggtggagatcatgggccacctgatggctgtgaaggagcggcagagcaacacagatgagatgtttgagcccctgaagcagaccatcgagctgctgaagacctatgagcaggagctgcctgagaccgtcttcaagcagctggaggagctgcctgagaagtggaacaacatcaagaaggtggccatcaccgtgaagcagcaggtggcccccctgcaggccaatgaggtgaccctgctgcggcagcgctgcacagcctttgatgctgagcagcagcagttctgggagcagttccacaaggaggcccccttccgctttgacagcatccacccccaccagatgctggatgcccggcacatcgagatccagcagatggagagcaccatggccagcatcagcgagagcgccagcctgtttgaggtgaatgtgcctgactacaagcagctgcggcagtgcaggaaggaggtgtgccagctgaaggagctgtgggacaccatcggcatggtgaccagcagcatccacgcctgggagaccaccccctggaggaacatcaacgtggaggccatggagctggagtgcaagcagtttgcccggcacatccggaacctggacaaggaggtgcgggcctgggatgccttcaccggcctggagagcacagtgtggaacaccctgagcagcctgcgggctgtggccgagctgcagaacccagccatccgggagcggcactggaggcagctgatgcaggccactggagtgtccttcaccatggaccaggacaccaccctggcccacctgctgcagctgcagctgcaccactatgaagatgaggtgcggggcatcgtggacaaggccgccaaggagatgggcatggagaagaccctgaaggagctgcagaccacctgggccggcatggagttccagtatgagccccaccccaggaccaacgtgcccctgctgtgcagtgatgaggacctgattgaggtgctggaggacaaccaggtgcagctgcagaacctggtgatgagcaaatatgtggccttcttcctggaggaggtgtctggctggcagaagaagctgagcacagtggatgctgtgatcagcatctggtttgaggtgcagaggacctggacccacctggagagcatcttcaccggcagcgaggacatccgggcccagctgccccaggacagcaagagatttgagggcatcgacatcgacttcaaggagctggcctatgatgcccagaagatccccaacgtggtgcagaccaccaacaagccaggcctgtatgagaagctggaggacatccagggccgcctgtgcctgtgtgagaaggccctggccgagtacctggacaccaagaggctggccttcccccgcttctacttcctgagcagcagtgacctgctggacatcctgagcaatggaacagccccccagcaggtgcagaggcacctgagcaagctgtttgacaacatggccaagatgaggttccagctggatgccagcggggagcccaccaagaccagcctgggcatgtacagcaaggaggaggagtatgtggccttcagcgagccctgtgactgcagcggccaggtggagatctggctgaaccacgtgctgggccacatgaaggccaccgtgagacatgagatgacagagggcgtgacagcctatgaggagaagccccgggagcagtggctgtttgaccacccagcccaggtggccctgacctgcacccagatctggtggaccacagaggtgggcatggcctttgcccggctggaggagggctatgagagcgccatgaaggactactacaagaagcaggtggcccagctgaagaccctcatcaccatgctgattggccagctgagcaagggggaccggcagaagatcatgaccatctgcaccattgatgtgcacgccagagatgtggtggccaagatgattgcccagaaggtggacaatgcccaggccttcctgtggctgagccagctgcggcaccgctgggatgatgaggtgaagcactgctttgccaacatctgtgatgcccagttcctgtacagctatgagtacctgggcaacaccccccggctggtgatcacccccctgacagaccgctgctacatcaccctgacccagagcctgcacctgaccatgtctggggccccagctggccctgctggcaccgggaagacagagaccaccaaggacctgggccgggccctgggcatcctggtgtatgtgttcaactgcagcgagcagatggactacaagagctgtggcaacatctacaagggcctggcccagacaggagcctggggctgctttgatgagttcaaccgcatctctgtggaggtgctgtctgtggtggccgtgcaggtgaagagcatccaggatgccatccgggacaagaagcagtggttctccttcctgggggaggagatcagcctgaaccccagcgtgggcatcttcatcaccatgaaccctggctacgccggccgcacagagctgcctgagaacctgaagagcctcttccggccctgtgccatggtggtgcctgactttgagctgatctgtgagatcatgctggtggccgagggcttcatcgaggcccagagcctggccaggaagttcatcaccctgtaccagctgtgcaaggagctgctgagcaagcaggaccactatgactggggcctgcgggccatcaagtctgtgctggtggtggccggcagcctgaagagaggagaccctgacaggcctgaggaccaggtgctgatgaggagcctgcgggacttcaacatccccaagatcgtgacagatgacatgcccatcttcatgggcctcatcggggacctcttccctgccctggatgtgccccggcggcgggaccccaactttgaggccctggtgaggaaggccatcgtggacctgaagctgcaggccgaggacaactttgtgctgaaggtggtgcagctggaggagctgctggccgtgcgccacagcgtgtttgtggtgggcggggccggcaccgggaagagccaggtgctgcggagcctgcacaagacctaccagatcatgaagagaagacctgtgtggacagacctgaaccccaaggctgtgaccaatgatgagctgtttggcatcatcaacccagccaccggggagtggaaggatggcctcttcagcagcatcatgagggagctggccaacatcacccatgatggccccaagtggatcctgctggatggagacatcgaccccatgtggattgagagcctgaacacagtgatggatgacaacaaggtgctgaccctggccagcaatgaaagaatccccctgaaccccaccatgaagctgctgtttgagatcagccacctgaggacagccaccccagccaccgtgtcccgggccggcatcctgtacatcaacccagctgacctgggctggaacccccctgtgtcctcctggattgagaagcgggagatccagacagagcgggccaacctgaccatcctgtttgacaagtacctgcccacctgcctggacaccctgcggacccgcttcaagaagatcatccccatccctgagcagagcatggtgcagatggtgtgccacctgctggagtgcctgctgaccacagaggacatcccagctgactgccccaaggagatctatgagcactactttgtgtttgctgccatctgggccttcggcggggccatggtgcaggaccagctggtggactacagagctgagttcagcaagtggtggctgacagagttcaagacagtgaagttccccagccagggcaccatctttgactactacatcgaccctgagaccaagaagtttgagccctggagcaagctggtgccccagtttgaatttgatcctgagatgcccctgcaggcctgcctggtgcacaccagcgagaccatccgggtgtgctacttcatggagcggctgatggcccggcagaggcctgtgatgctggtgggcacagctggcaccgggaagtctgtgctggtgggcgccaagctggccagcctggaccctgaggcctacctggtgaagaatgtgcccttcaactactacaccaccagcgccatgctgcaggccgtgctggagaagcccctggagaagaaggccggcaggaactacggccccccaggcaacaagaagctgatctacttcattgatgacatgaacatgcctgaggtggatgcctatggaacagtgcagccccacaccatcatccggcagcacctggactatggccactggtatgacaggagcaagctgagcctgaaggagatcaccaacgtgcagtatgtgtcctgcatgaaccccacagctggcagcttcaccatcaacccccggctgcagaggcacttctctgtgtttgtgctgtccttccctggagcagatgccctgagcagcatctacagcatcatcctgacccagcacctgaagctgggcaacttccctgccagcctgcagaagagcatcccccccctgattgacctggccctggccttccaccagaagatcgccaccaccttcctgcccaccggcatcaagttccactacatcttcaacctgcgggactttgccaacatcttccagggcatcctcttcagctctgtggagtgtgtgaagagcacctgggacctgatccggctgtacctgcacgagagcaacagagtgtacagagacaagatggtggaggagaaggactttgacctgtttgacaagatccagacagaggtgctgaagaagacctttgatgacatcgaggaccctgtggagcagacccagagccccaacctgtactgccactttgccaatggaattggagagcccaagtacatgcctgtgcagagctgggagctgctgacccagaccctggtggaggccctggagaaccacaatgaggtgaacacagtgatggacctggtgctgtttgaagatgccatgagacatgtgtgccacatcaaccgcatcctggagagccccagaggaaatgccctgctggtgggcgtgggcggcagcggcaagcagagcctgacccggctggccgccttcatcagctccatggatgtgttccagatcaccctgaggaagggctaccagatccaggacttcaagatggacctggccagcctgtgcctgaaggccggcgtgaagaacctgaacacagtgttcctgatgacagatgcccaggtggctgatgagcgcttcctggtgctgatcaatgacctgctggccagcggggagatcccagacctgtacagtgatgatgaggtggagaacatcatcagcaatgtgagaaatgaggtgaagagccagggcctggtggacaaccgggagaactgctggaagttcttcatcgaccgcatccggcggcagctgaaggtgaccctgtgcttcagccctgtgggcaacaagctgcgggtgcgcagcaggaagtttcctgccatcgtgaactgcacagccatccactggttccacgagtggccccagcaggccctggagagcgtgtccctgcgcttcctgcagaacacagagggcatcgagcccaccgtgaagcagagcatcagcaagttcatggcctttgtgcacacctctgtgaaccagaccagccagagctacctgagcaatgagcagcgctacaactacaccacccccaagagcttcctggagttcatccggctgtaccagagcctgctgcaccgccacaggaaggagctgaagtgcaagacagagcggctggagaatggcctgctgaagctgcacagcaccagcgcccaggtggatgacctgaaggccaagctggccgcccaggaggtggagctgaagcagaagaatgaagatgctgacaagctgatccaggtggtgggcgtggagacagacaaggtgtcccgggagaaggccatggctgatgaggaggagcagaaggtggccgtcatcatgctggaggtgaagcagaagcagaaggactgtgaggaggacctggccaaggccgagcccgccctgacagctgcccaggccgccctgaacaccctgaacaagaccaacctgacagagctgaagagctttggcagcccccccctggccgtgtccaatgtgtctgctgctgtgatggtgctgatggccccccggggccgggtgcccaaggaccgctcctggaaggccgccaaggtgaccatggccaaggtggatggcttcctggacagcctcatcaacttcaacaaggagaacatccacgagaactgcctgaaggccatccggccctacctgcaggaccctgagttcaaccctgagtttgtggccaccaagagctatgctgctgctggcctgtgctcctgggtgatcaacatcgtgcgcttctatgaggtgttctgtgatgtggagcccaagaggcaggccctgaacaaggccacagctgacctgacagctgcccaggagaagctggccgccatcaaggccaagatcgcccacctgaatgaaaacctggccaagctgacagccaggtttgagaaggccacagctgacaagctgaagtgccagcaggaggccgaggtgacagctgtgaccatcagcctggccaaccggctggtgggcggcctggcctctgaaaatgtgcgctgggcagatgctgtgcagaacttcaagcagcaggagaggaccctgtgtggggacatcctgctgatcacagccttcatctcctacctgggcttcttcaccaagaagtaccggcagagcctgctggacaggacctggaggccctacctgagccagctgaagacccccatccctgtgaccccagccctggaccccctgaggatgctgatggatgatgctgatgtggccgcctggcagaatgaaggcctgcctgctgacaggatgtctgtggagaatgccaccatcctgatcaactgtgagcgctggcccctgatggtggacccccagctgcagggcatcaagtggatcaagaacaagtacggggaggacctgcgggtgacccagatcggccagaagggctacctgcagatcatcgagcaggccctggaggccggggctgtggtgctgattgagaacctggaggagagcattgatcctgtgctgggccccctgctgggccgggaggtgatcaagaagggccgcttcatcaagatcggggacaaggaatgtgagtacaaccccaagttccgcctcatcctgcacaccaagctggccaacccccactaccagcctgagctgcaggcccaggccaccctcatcaacttcaccgtgaccagagatggcctggaggaccagctgctggccgctgtggtgtccatggagaggccagacctggagcagctgaagagtgacctgaccaagcagcagaatggcttcaagatcaccctgaagaccctggaggacagcctgctgagccggctgagcagcgccagcggcaacttcctgggggagaccgtgctggtggagaacctggagatcaccaagcagacagctgctgaggtggagaagaaggtgcaggaggccaaggtgacagaggtgaagatcaatgaggcccgggagcactacagacctgctgctgcccgggccagcctgctgtacttcatcatgaatgacctgagcaagatccaccccatgtaccagttcagcctgaaggccttcagcatcgtgttccagaaggctgtggagagagctgccccagatgagagcctgcgggagcgggtggccaacctgattgacagcatcaccttctctgtgtaccagtacaccatccggggcctgtttgaatgtgacaagctgacctacctggcccagctgaccttccagatcctgctgatgaaccgggaggtgaatgctgtggagctggacttcctgctgcggagccctgtgcagacaggaacagccagccctgtggagttcctgagccaccaggcctggggcgctgtgaaggtgctgagctccatggaggagttcagcaacctggaccgggacatcgagggcagcgccaagtcctggaagaagtttgtggagagtgaatgtcctgagaaggagaagctgccccaggagtggaagaacaagacagccctgcagaggctgtgcatgctgcgggccatgaggccagacaggatgacctacgccctgcgggactttgtggaggagaagctgggcagcaaatatgtggtgggccgggccctggactttgccaccagctttgaggagagcggccctgccacccccatgttcttcatcctgagccctggggtggaccccctgaaggatgtggagagccagggcaggaagctgggctacaccttcaacaaccagaacttccacaacgtgtccctgggccagggccaggaggtggtggccgaggccgccctggacctggccgccaagaagggccactgggtgatcctgcaggacaccctggagatgtgcagccgggagacagagttcaagagcatcctgtttgccctgtgctacttccacgctgtggtggccgagaggaggaagtttggcccccagggctggaacagaagctaccccttcaacacaggagacctgaccatctctgtgaatgtgctgtacaacttcctggaggccaatgccaaggtgccctatgatgacctgcgctacctgtttggagagatcatgtatggaggccacatcacagatgactgggaccggcggctgtgcaggacctacctgggggagttcatccggcctgagatgctggagggggagctgagcctggcccctggcttccccctgcccggcaacatggactacaacggctaccaccagtacattgatgctgagctgcccccagagagcccctacctgtatggcctgcaccccaatgctgagatcggcttcctgacccagaccagcgagaagctgttcagaacagtgctggagctgcagccccgggacagccaggccagagatggagctggggccacccgggaggagaaggtgaaggccctgctggaggagatcctggagcgggtgacagatgagttcaacatccctgagctgatggccaaggtggaggagaggaccccctacatcgtggtggccttccaggagtgtggccgcatgaacatcctgacccgggagatccagaggagcctgcgggagctggagctgggcctgaagggggagctgaccatgaccagccacatggagaacctgcagaatgccctgtactttgacatggtgcctgagagctgggcccggcgggcctaccccagcacagctggcctggccgcctggttcccagacctgctgaaccgcatcaaggagctggaggcctggacaggagacttcaccatgcccagcacagtgtggctgaccggcttcttcaacccccagagcttcctgacagccatcatgcagagcacagccaggaagaatgagtggcccctggaccagatggccctgcagtgtgacatgaccaagaagaaccgggaggagttccgcagccccccccgggagggcgcctacatccacggcctcttcatggagggcgcctgctgggacacccaggccggcatcatcacagaggccaagctgaaggacctgaccccacccatgcctgtgatgttcatcaaggccatcccagctgacaagcaggactgccgctctgtgtacagctgccctgtgtacaagaccagccagaggggccccacctacgtgtggaccttcaacctgaagaccaaggagaaccccagcaagtgggtgctggccggcgtggccctgctgctgcagatctag

SEQ ID NO: 117320 - DNA, 13461 bp, Artificial Sequence
  derived and/or modified sequence
atgcggctggccgaggagcgggccgccctggccgccgagaacgccgacggggaaccaggggcggacaggcgattgcgcctgttaggtacctatgtggctatgagcctgcgtcccgcggctggcgcgtgggaacggtgcgccggctcagcggaggccgagcagttgttgcaggctttcctggggcgggacgctgctgagggccctcgcccactactcgtggtgcgccctgggcctcgaggactggccatccgcccaggattggaggtcggtcctgaatccggtctggctggcgctaaagccctcttcttcctcagaaccgggcccgaacctcctggaccggattccttcagaggcgcagttgtctgcggtgacctgccagctgcccccctggaacacctcgccgccttattcagtgaagttgtactgcccgttctggccaacgagaagaatcgtctgaattggccccatatgatttgtgaggacgtgaggaggcacgcccacagcttacaatgtgacctctcggtgattctggagcaggttaagggaaagaccctgctgcccctgccagccggcagcgagaagatggaattcgctgacagtaagtctgaaacagtcctggattcaatcgacaaatctgtgatctatgccatcgagtccgctgttataaagtggtcataccaggtgcaggtggtccttaaacgggaaagcagccaacctctgctccagggggaaaatcctacacctaaggtggaactcgagttctggaaaagtagatatgaggacctgaaatacatttataaccaactcagaacaattacagtccgcggaatggccaaacttttagacaagctgcagagctcatactttccagccttcaaggctatgtatagggatgtggtggcagcactggcggaagcgcaagacattcacgttcatttgatccctctacagaggcatctggaggcgcttgagaatgctgaattcccggaggtgaagccacagctacggccgctgctccatgtggtgtgcctaatttgggccacctgcaagtcttaccggtcgccaggacgacttacagtgcttcttcaggagatctgtaatctgcttatacaacaggcatccaactacctttccccagaagacctcctaagaagcgaagtggaggaatcccaacgtaaactacaggtcgtgtccgacacacttagcttttttaagcaagagttccaggacagacgcgagaacttgcatacctattttaaagaaaaccaagaagttaaggaatgggacttccagagctcactcgtctttgtccgccttgacggattcctcggtcagctgcacgtggtggagggcctcctgaagaccgcccttgactttcacaagctggggaaagtcgagttctcaggcgtgcgggggaatgccctgtcgcagcaggtgcagcagatgcacgaagagtttcaggagatgtacagattactgtccggcagttcaagtgactgtctttaccttcaatctaccgattttgaaaacgacgtgtcggagttcaatcagaaggttgaggaccttgaccgaaggctaggaactatttttattcaagcttttgacgatgccccaggcctggagcacgccttcaagcttttagacatcgccggaaacctcctggagcgcccgttagttgcacgcgatacaagtgataagtaccttgttttgattcagatgtttaataaggaccttgacgccgttcgaatgatttactcacagcacgtgcaggaagaggctgagctggggttttctcctgttcacaaaaatatgcccacagtcgcaggaggactgcgatgggcacaggagctccgtcagcgcatccagggacctttttccaacttcggtcgcattactcacccttgcatggagagcgcggaggggaagcgaatgcagcagaaatacgaggacatgctctcacttcttgagaaatacgagaccaggctgtatgaggactggtgtcgaaccgtgagcgagaagtctcagtacaacctgagtcagccattactgaagagggacccagaaactaaggagatcactattaatttcaacccccagctgatatccgtactgaaagaaatgagttacctggagccacgtgaaatgaagcacatgcccgagaccgccgctgccatgtttagttctagagatttttaccgacaattagttgctaatctggagctaatggctaactggtacaacaaggtcatgaaaaccctcctggaggtcgagttcccccttgtggaggaggaattgcagaatatcgacctgcgactgagggctgctgaggaaaccttgaactggaaaacagaaggcatctgcgactacgtcactgaaatcaccagttcgattcacgacctcgaacagagaattcagaagacaaaggacaatgtcgaggagattcagaatataatgaaaacctgggttacaccaatcttcaagacgaaagacggcaagagagagtccttattatccctggacgatcggcatgaccgcatggagaagtattacaaccttatcaaagagagcggcctgaagatccatgcgctcgtgcaggaaaatctgggcctgttctctgctgaccctacaagtaatatatggaaaacatacgtgaacagcattgacaacttattgcttaacggctttttcttagctatcgaatgtagtctgaagtacctgctggagaatacagagtgtaaggctggcctcacgcctatattcgaggcacagttatcgttggccatccccgaactagttttctatccctctctcgaaagcggtgtgaaagggggcttctgcgatatcgtggaaggcctcatcactagtattttcagaatccctagcttggtaccaagactgtccccccaaaatggatctccacactaccaagtcgatctcgatggtatacccgacctggctaacatgagacgtacactcatggagagagttcagcgtatgatgggtttatgctgtggttatcagtccactttttctcaatactcttacctgtacgttgaggaccggaaggaagtcctgggtcagttcctgctgtacggccatattctgactccagaggagattgaagatcatgtagaggatggaatccccgagaatccaccattgcttagtcagttcaaggtgcagatcgactcgtatgagaccctttacgaggaagtttgtaggttggagccgatcaaggtctttgatggatggatgaagatagatatccggcccttcaaggcatccctgctgaacattattaaacgttggtcccttttgtttaagcagcacctggtggatcacgtaacccactccctggctaacctggatgcctttatcaaaaagtccgaatccggtctgctcaagaaggtcgaaaagggcgatttccagggcctggtcgagatcatgggacatctcatggctgtgaaggagaggcagagtaacacagatgaaatgttcgagcccctgaagcagactatcgaattgcttaagacatacgagcaggaactgcccgagacagtgtttaagcaattagaggagctgccggagaagtggaacaacattaagaaggtagctatcactgttaagcagcaggtcgctccattacaggccaacgaggtgactttgctgaggcagaggtgcacggcattcgatgccgaacaacaacagttctgggaacaattccacaaagaagccccgttccgatttgatagtatccatccacatcagatgttggacgccaggcacatcgagatccaacagatggagagtacaatggcgtctatctcagaaagcgcctccctgtttgaggtgaacgtccctgattataaacaacttaggcagtgtaggaaagaggtgtgccagctgaaggagctttgggacaccattggcatggtgaccagcagcatccacgcctgggagacaaccccgtggcggaatattaacgtggaagcaatggagctcgagtgtaagcagttcgctcgtcacataagaaacctcgataaggaggtccgagcatgggacgcattcacgggcctcgagtctactgtgtggaacaccctcagcagtcttagggccgtagctgagctacagaatcctgcgattcgcgagagacattggagacagctaatgcaggctacgggcgtgagttttaccatggatcaagataccacactggcacacctcttacaactgcagctgcaccactacgaggatgaagtgagaggaatcgtcgacaaagcagccaaagagatgggaatggagaagacactcaaagaactccagactacctgggccggcatggagttccagtatgaacctcaccctcgtactaatgtcccactgctttgcagcgacgaggacctgattgaggtgctcgaggataatcaggtgcaactgcaaaatttggtgatgtccaaatacgtcgccttttttcttgaagaagtttcagggtggcagaaaaagttgagcactgtcgacgctgtgatcagcatttggtttgaagttcagcgtacttggacacacctggagtccatcttcacagggtccgaagacatcagggcccaactgccccaggattctaagcgcttcgaagggatagacattgatttcaaagaattagcctatgacgcacagaaaatccccaatgtcgtgcagactactaataaacctggtctgtacgagaagttggaggatatacagggtcggctctgtctgtgcgaaaaggccctggccgagtacctggacacaaagcggcttgccttccccagattctactttctgtcttctagcgacctgcttgacattcttagcaatggtactgcgccgcagcaggttcaacggcacttgtcaaagttgtttgacaacatggctaagatgcggttccagctggatgcctcaggcgagccaaccaaaacgagcttaggaatgtatagcaaggaagaggagtatgtcgcctttagcgaaccctgtgattgcagtggtcaggtcgagatctggctgaaccacgttttgggccatatgaaagcaacagtgcgacacgagatgacggaaggcgtgacagcatatgaggaaaagccgagagagcagtggcttttcgaccacccagctcaggtcgccctcacatgtacccagatttggtggaccactgaggtcggcatggcgtttgccaggctggaagagggctatgaatcagccatgaaggattactataaaaaacaggtcgcccagctgaagactctcattaccatgttaatcggccagctgagcaagggagacaggcaaaagattatgaccatctgcactatcgatgtccacgcgcgggatgttgttgccaaaatgattgctcagaaggtcgataacgcacaggctttcctgtggctgtcccagcttcgccatcgctgggatgacgaagtcaagcactgttttgctaatatttgcgacgcgcagttcctttacagctacgagtatcttgggaacacgcctcggctggttatcactccactaaccgaccggtgctatatcaccctaacccagagcctgcacttgactatgagtggcgctcctgcaggaccagctggaaccgggaaaaccgagacaaccaaggatttgggccgggcgcttggaatcctcgtgtacgtgttcaactgctctgagcagatggactacaagtcctgcggcaacatctacaagggcttggcccagacaggcgcatgggggtgcttcgatgagtttaacaggatttctgtggaagtcctgagtgtggtggctgtgcaggtgaagtcgatccaggatgccatacgggacaaaaaacagtggttcagcttcctcggagaggagatttctctcaatccctcggtgggtatattcatcactatgaatcccggatatgcgggtaggacggaactccctgaaaatctgaagtcactttttcgcccctgtgctatggtggtgcccgattttgaactgatatgcgagattatgcttgtggctgagggctttatcgaagcccaaagtcttgccagaaaatttattacactgtatcaactgtgtaaggagctgctcagtaaacaggaccattacgattgggggctgagagctatcaagtccgtgctagtggtagccgggagcctcaagcggggggatccagatcggccggaggatcaggtcttaatgaggtctctgcgcgatttcaatatccccaaaatcgtgactgacgatatgccaatctttatgggcctgatcggcgacttatttcccgctcttgatgtccccaggaggcgagatccaaatttcgaggcgctggtgcgcaaagcaattgttgacttgaagctgcaggccgaagataatttcgtcctcaaggtggtgcagttagaggaactgctcgccgttcgtcatagcgtatttgtagtgggcggagctgggacgggcaagtcgcaggtcctgagatcactacataagacctatcaaatcatgaagcggaggccagtgtggaccgatctgaatccgaaggctgtaactaacgacgagctgtttgggattattaatcccgccaccggggagtggaaagacggcttgttcagcagcataatgcgcgagctggccaacatcacacacgatggcccaaaatggatcctccttgacggcgatatcgaccctatgtggatagagagtcttaatactgtgatggatgataataaagtccttaccttggcctccaacgaaaggattcccttgaacccaactatgaagctgttgtttgagatctctcatcttaggactgccacccctgctactgtgagcagggccggaattctctatatcaacccagcagatctcgggtggaatcctccagtgtcatcatggatcgaaaaaagagaaatccagaccgagcgggcaaacctcacaattttgtttgacaagtatctgccaacctgcctagataccctaagaactcgatttaaaaagattatacctattcctgaacagtctatggtccagatggtctgccatttgctcgaatgtctcctgaccacagaagatattcctgccgactgcccaaaggaaatatacgagcattacttcgttttcgcggctatatgggcgttcggaggtgccatggtccaggaccagttggttgattatcgggcggaattctctaaatggtggttaaccgaattcaagaccgttaagttcccttcccaaggtaccattttcgactactatatcgaccctgaaaccaagaagttcgagccctggagcaaacttgtgcctcagttcgagttcgaccctgagatgcccctgcaggcgtgcctggtgcacacgagcgaaaccatccgggtttgctatttcatggagaggttgatggcgcggcagagaccagtcatgttggtcggtacagctggcacgggaaagtccgtcctggtgggggctaagttggcctccctggatccagaggcctatttagtgaaaaatgttcccttcaactactacacaacaagcgcaatgctgcaggccgtgctcgagaagccactggaaaagaaggctggccgaaactacggcccgcccggaaacaagaaattgatttatttcatcgacgacatgaacatgcctgaggttgacgcctacggcaccgtgcagccccataccataattcggcagcacttagactacggccactggtatgacaggagcaaactgtctctcaaggagattactaatgtgcagtatgtgagttgtatgaaccccacagcaggttccttcactatcaatccccgcctgcaacgccacttctccgtcttcgtgctgagtttcccaggtgcagacgctctttccagtatttattctataattctcactcagcatctcaagcttggaaactttcctgcttccttgcagaagtccatcccacccctcatcgatttggctcttgcttttcaccagaaaatcgcgaccactttcctgcccaccggaatcaagtttcattatatatttaacttgcgcgactttgcaaacatattccagggcattctgttttccagtgtggagtgcgtcaaatccacttgggatctgatcaggctctatttgcatgagagtaatcgcgtctatagagacaaaatggtggaggaaaaagattttgacctattcgacaagatccagacggaggtactcaagaagaccttcgatgatatagaagaccccgttgaacaaacgcagagccctaatctgtactgtcactttgccaatgggatcggagagccgaaatacatgcccgtccagtcatgggaattgctgacccagaccctagtagaagcactcgagaatcacaatgaggtgaatacggttatggacctcgttctgttcgaggacgctatgcggcacgtttgtcatattaaccggatcctggagagtccccgggggaatgctctcctcgtgggggtgggtggaagcggcaagcagtcactcactcgtttagcagcgtttatatcgagtatggatgtgttccaaattaccctgagaaaggggtatcagatccaagattttaagatggatctggcaagtctgtgcttaaaagcaggcgttaaaaatctgaacacagtgttccttatgaccgatgcccaggtggccgacgagagatttcttgtactcatcaacgacctcctggcctctggagagatccctgatctctatagcgacgacgaagtggagaacataattagcaatgttcggaacgaggtgaagtcccaaggtctggtagataaccgggagaattgctggaagttttttatagatcgcatcaggcgtcaattgaaagtcaccttgtgcttttcacccgtcggaaacaaactgcgggtcaggtctcgcaaattccccgcaattgttaactgtactgctatccattggttccatgagtggcctcagcaagccctcgagtcagtgtcattgcgatttctgcagaacacagagggcattgagcccaccgtgaaacagagtatcagcaagtttatggccttcgtgcacacctccgtaaaccagacatcgcagtcatacctaagcaacgaacagcgttataattataccactcccaagtcgtttcttgaattcatcagactgtatcagtccttactgcaccgccaccggaaggagctgaagtgcaagacagaacgtctggagaacggcctcctcaagctgcacagtacttcagctcaggtcgacgacctgaaggcgaaactagccgcccaggaggttgaactcaagcagaaaaacgaagatgctgacaagctgatacaggtggtgggcgtggagacagataaggtcagcagagaaaaggctatggccgatgaagaagaacagaaggtcgcagtgatcatgctcgaggtcaagcagaagcagaaggactgtgaggaggatctcgcgaaagcagaacctgctctgacagctgcacaggctgctcttaataccctgaataagacaaacttgactgagctgaaatccttcggaagtccccctttggccgtgtctaacgtcagtgcagctgtaatggtgttgatggccccacggggccgtgtgccgaaggacagaagttggaaagcagccaaggttacaatggccaaggtagacggcttccttgattcccttattaatttcaataaggagaacatccatgagaattgtctaaaggccatccggccatatttacaggatcccgaattcaatccggagtttgtggccacaaagtcctacgctgcagcgggcctgtgctcctgggtaattaatatagttagattctacgaagttttttgcgatgtagaacctaaacgccaagccctgaataaggcgaccgccgatctgactgccgcccaggaaaagctggcagcaatcaaagcaaaaattgctcacctaaatgagaacctcgctaagttaaccgcaagatttgaaaaagccaccgctgacaagcttaagtgtcagcaagaggctgaggtgacggctgtaacgatatccttagccaatagattggtcggcggactcgcctcggaaaatgttcgctgggcagacgctgtgcaaaacttcaagcagcaggaaaggaccttgtgcggagacattctgcttatcacagcattcatttcataccttggcttttttacaaagaagtaccgccaaagtctgctggatagaacctggaggccctatctctcccaacttaagaccccaatccctgtgaccccagcactggatcccttgcggatgctgatggacgacgccgacgttgcggcatggcagaacgaggggctgccagccgatcggatgagcgtggagaatgcaacaattcttatcaattgcgagagatggccattgatggtagacccccaattgcagggcataaagtggatcaaaaataaatacggggaggacctcagggtaacgcagattggacagaagggctacctgcaaattatcgagcaggctctagaagccggcgcagtcgtgctgatagagaacttagaggaatcaatcgatcctgtgctgggacccctgttaggtagggaggttatcaagaagggcaggttcataaaaatcggtgacaaggagtgtgagtacaaccccaagttccgcttgatactgcacactaagcttgccaacccccattatcaaccggaactccaagcccaggctacactaatcaatttcaccgtgacacgcgatggtttggaagaccagctgttagctgccgtcgtctctatggaacgacccgacttagaacagctgaagtccgacctgaccaagcaacagaatggcttcaagatcacacttaaaacactcgaagattcattgttgtcccggctttcttcggcttcaggtaattttttaggtgagaccgtactggtggagaacctggagataactaaacagacagctgccgaagtggagaaaaaagtgcaggaggctaaagtcacggaagtgaagatcaatgaagctcgcgagcattaccggccggcagctgcgagggcatcgctcctgtacttcattatgaacgacctctctaagatccaccccatgtatcagttcagcctgaaagcatttagtatcgtattccagaaagcagtcgaacgggctgcacccgacgagtcgctgcgcgagagagtggcgaacctgatcgatagcattaccttcagtgtttaccaatataccattagaggcttattcgaatgtgataagttaacatacctggcccaactgacctttcaaatcctactgatgaatcgggaagtgaacgccgtagagttggattttttactgcggagtcctgttcagaccggcaccgcaagcccagtcgagtttttatctcaccaagcatggggcgcagtcaaggtgctgagctccatggaagagttttcaaatctggacagagatatcgaaggttctgccaagtcctggaagaagtttgttgagtcagagtgccccgagaaggaaaagcttccacaggagtggaaaaacaagaccgctctgcaacgcttgtgtatgctccgcgccatgcgccctgatcgcatgacctatgcactcagagactttgttgaagaaaaattaggtagcaaatatgtggttggccgcgccctggatttcgccacctctttcgaagaaagtggacctgccaccccaatgttttttattctgagtccgggggtggaccccctgaaagacgtggagtctcagggccggaagctcggctacacctttaacaatcagaactttcacaatgtgtcacttggccagggacaggaggtggtggctgaagccgcgctggacctggcagccaagaaagggcactgggtcattttgcagaacattcacttggtcgctaagtggctgtccactctggagaaaaagctggaggagcattcagagaactcccacccagagttccgagttttcatgtctgccgagcctgctcctagccccgagggacacatcatcccgcaaggcatacttgaaaatagcatcaagattactaatgagccgccaacaggcatgcacgccaatttacataaggccctggacaattttacccaggatactttagagatgtgttccagagaaacggagttcaaatcgatcctgtttgccctgtgctatttccacgcggtcgtggccgagaggcgcaaattcggacctcaaggctggaatcgatcgtacccattcaacaccggggatcttaccattagcgtgaacgtgttatacaactttctcgaagccaacgcaaaagtgccatatgacgatctccgctatctgttcggggaaattatgtacggcggtcacatcacagatgattgggaccggcgcctttgccgtacctacttgggggaattcatccgcccagagatgttggagggggagctgagcctcgcaccagggttccccctccccggcaacatggattataatggctaccaccaatacatagatgctgaactccctccagagtctccttacttatacggcttgcaccctaacgccgagatcggatttctgactcaaacatcggaaaagcttttccgaacagtcctggaactgcagccccgggactcccaggcaagggatggagccggggccactcgcgaggaaaaggtgaaggctttactggaggaaattctggaacgggttacagacgagtttaacataccagaacttatggccaaggtagaagagagaacaccctatatcgtcgtggcgttccaggagtgcggtcgcatgaatatcctgaccagagagatccaaaggtcccttcgggaattggagcttggactgaagggggagctgaccatgactagccacatggaaaatctgcagaatgccttgtattttgacatggttcctgagtcttgggcccgccgtgcatacccgtccactgcaggtctggctgcatggtttccggatttgctcaacaggatcaaagaactggaggcatggactggggatttcactatgccctctacagtgtggcttacaggattcttcaatccccagtcctttcttacggctatcatgcaatccacagcccgcaagaatgagtggcccctagaccaaatggccctccagtgtgacatgacaaagaaaaatcgcgaggagtttagatcacctcctcgggaaggggcgtatatccacggcctcttcatggaaggagcgtgctgggatactcaagcaggtatcattaccgaggctaaacttaaagatctgacacctccaatgcccgttatgtttattaaagccattcccgcggataagcaggactgcaggtctgtatactcttgtcccgtttataagacttcccaacgcgggccgacatacgtctggactttcaacctgaaaacaaaagagaacccaagcaaatgggtgctcgctggagtcgctctgctcctacagatttag

SEQ ID NO: 117321 - DNA, 2397 bp, Artificial Sequence
  derived and/or modified sequence
atgaacgacctgagcaagatccaccccatgtaccagttcagcctgaaggctttcagtattgttttccaaaaagccgtggaacgggcagcccccgacgagtctctaagggaaagggtggcaaatctgatagatagtatcaccttctccgtgtatcagtacaccatcagaggcctcttcgaatgtgacaagctgacttatctggcccaacttacattccaaatacttctaatgaacagagaagtgaatgccgttgagctggactttcttctgcgatctccagtacagactggcactgcgagcccggtggaatttttatcacaccaagcatggggagcagtcaaggtattgagtagcatggaagaattctcaaatctggatcgtgatatcgaaggcagtgccaagagctggaaaaaatttgtggaatccgaatgtcctgaaaaggaaaaattaccacaggagtggaagaataagacagcactgcagcgcctgtgcatgctgcgcgctatgagaccagaccggatgacatatgcccttagagattttgttgaagagaagctaggcagtaaatatgtggtgggccgcgcactggacttcgccacctctttcgaagagagtggcccagctacccccatgttctttatactctcgccaggggtggatccactgaaggacgtggagtcccaaggaaggaagctgggatatactttcaacaatcagaactttcataatgtctctctgggacagggccaagaagttgtggccgaggctgcgctcgatctggccgcaaaaaagggacattgggtaatcctgcagaatatccatctggttgccaagtggcttagcacacttgagaagaaactcgaagagcacagcgagaacagtcatcccgagtttcgcgtctttatgtctgcagagcctgcaccaagccccgaagggcatataatccctcaagggatcctggagaacagcataaagattaccaacgagccacctacagggatgcacgccaacctgcataaggcgcttgacaattttactcaggacactttagagatgtgtagcagggagaccgagttcaaatctattcttttcgctctgtgctactttcatgcagtcgtcgccgagcgacgcaagtttgggccgcagggatggaaccgtagctatcccttcaacacgggtgacctgaccattagtgttaatgtgttgtacaattttttggaagctaacgcaaaggtaccatatgacgatttgagatatctctttggggaaatcatgtacggggggcacattacggatgactgggatagaaggctgtgccgcacatatctgggcgagtttatcagaccagagatgctggagggtgaattgtcactggccccagggttcccattacccggcaacatggattataacggataccaccagtacattgacgctgagttacctccggaaagcccatacctctacggcctgcaccctaacgcagagattggctttctcacccaaacaagcgaaaaactgtttagaacagtgctcgaactgcagcccagggattcccaggcgcgcgatggggcaggcgccaccagagaagagaaggtgaaagccctgctagaggagatcttggagagagtgacagacgagtttaacattcctgagctaatggcaaaggttgaggagcggaccccctatatcgtcgtcgcatttcaggaatgcggaaggatgaacattctgaccagagagatacagagatcactgcgggagctggagctgggattaaaaggagagctaacaatgacaagccacatggaaaatcttcagaatgctctgtatttcgatatggttccggagagttgggcaagacgagcctatccaagtacagccggtctagcagcgtggttccctgatctcctcaatcgcattaaggaacttgaggcctggactggcgactttaccatgccgagcacagtctggctgaccggttttttcaacccccaatctttcctgacagccatcatgcagtctacagccaggaagaatgaatggcctttggaccagatggcccttcaatgcgacatgactaagaagaaccgggaagaatttcggtccccccctcgagagggtgcctacattcacggcctgttcatggaaggggcttgttgggacacacaggccggcattattaccgaagccaagctgaaggacctgactccgccaatgcccgtcatgtttatcaaagctatcccggccgataaacaagactgtaggtctgtatacagctgtcccgtatacaagacatctcagcgcgggcccacatacgtgtggacctttaacctaaagaccaaggagaatcccagtaagtgggtgttggctggtgtggcactgctgctgcagatctag

SEQ ID NO: 117322 - DNA, 8979 bp, Artificial Sequence
  derived and/or modified sequence
gaggtgcggggcatcgtggacaaggccgccaaggagatgggcatggagaaaactctcaaggagctacagacaacctgggccggtatggaattccagtacgaacctcatccccgcaccaatgtccctctactctgttctgacgaggacctgatcgaggtcctcgaggacaaccaggttcagttgcagaatttggtgatgtccaagtatgttgcctttttcttagaagaagtttctggctggcaaaaaaagctgagcactgttgacgccgtaatttctatctggttcgaggttcagcgcacctggacccatctagagtctattttcaccggaagtgaggacatcagggctcagctgccccaggattcaaaacgtttcgaagggattgatatcgatttcaaagagcttgcatatgatgcccaaaaaattccaaatgtcgttcagaccacgaacaagcccggtctctatgaaaaactggaggatattcagggtcgtctctgcctgtgcgaaaaagcacttgctgaatatctggatacaaagcgtctggcgtttcctaggttttatttcctctcaagcagtgacttgttggatatcttgagcaacggcaccgctccgcagcaggtccagaggcatttaagcaaactgtttgacaatatggcaaagatgagatttcagcttgatgcatccggcgaacctacgaagaccagcttgggtatgtactcgaaggaggaggagtacgtcgcttttagcgagccctgtgattgttcgggccaggtggagatatggctgaatcacgtgctgggtcacatgaaggccacggttcgtcacgagatgacagaaggtgttactgcttacgaagagaagccgagagaacagtggctctttgatcacccggctcaggtcgccctgacatgtactcagatttggtggaccaccgaggttggcatggcctttgcaaggctcgaagaaggatacgagagtgcaatgaaggattactataaaaagcaggtggcccagttaaagacactgatcaccatgcttattggacagttgagcaagggagaccgacagaagatcatgaccatttgcacaatagacgtccatgcccgggatgtagtagcgaagatgatagcccaaaaggtcgacaacgctcaagccttcttatggctatcccagctcaggcatagatgggatgatgaggtgaaacattgttttgccaatatctgcgacgctcagtttttatacagttacgaataccttggcaacactcctagacttgtgatcactcccctgacagataggtgttacattactctcacacaatcactgcacctaaccatgtcaggcgccccggccgggcccgccgggacgggaaagaccgaaacgaccaaagacctgggacgagctctcgggattctggtatacgttttcaactgttccgagcagatggactataagtcctgcgggaatatttacaaggggttggcccaaaccggggcctgggggtgcttcgacgagtttaatagaatatccgtggaggtcttgtccgtggtggccgtccaggtgaagtcgattcaagacgcaatccgagacaaaaagcaatggttctcctttttgggcgaggaaattagtctcaatccgtccgttggcatcttcatcactatgaatccaggatacgctggccggactgagctgcccgagaatctgaagagtttgtttcgaccatgcgcaatggtcgtccccgactttgagctcatctgtgagattatgttggtggctgagggcttcatcgaagcacagagcttggcccgcaagtttataaccctctatcagctctgcaaagaactgctatcaaagcaggaccactacgactggggcctgagggcaataaagagtgttttggtcgttgctgggtctctgaaaagaggtgatccggataggcctgaggaccaggtcctgatgagaagcctacgcgactttaacataccgaagatcgtaactgacgacatgcccatctttatgggccttatcggcgacctgttcccggccctggacgtgccacgccgcagagacccaaacttcgaggcccttgtccgcaaagcaatcgtggacctaaagcttcaggccgaagacaacttcgtcctgaaggttgtgcagctcgaagagctcttagccgtccgccactcagtgtttgttgtagggggagccggaacgggtaaaagtcaagttctccgcagtctacataaaacgtaccagattatgaagcgccgcccagtgtggacagatctgaatccaaaggctgtgacaaacgacgaactcttcgggatcataaatcccgcgactggtgagtggaaagatggcctcttttcgtcaatcatgcgtgaacttgcaaatatcacgcatgatgggccaaagtggatcctgcttgacggggacattgacccgatgtggatagaatccctaaacactgtgatggacgacaataaggtcttgacgttagctagtaacgaacgcattccactgaatcccactatgaagctcttattcgaaatctcccatcttcgcaccgccacacccgccaccgtgagccgcgccggcatcctgtatattaaccctgctgatctgggttggaacccacctgtgtcatcatggattgaaaagagggagattcagaccgaacgcgcgaatttgaccattctgttcgacaagtatttacccacctgtctggatacactgaggactcggttcaaaaagatcatccctatccccgaacagagcatggtgcagatggtgtgccacctgctggaatgtctcctgacaaccgaagacatcccagcagattgccctaaggagatctacgagcactatttcgtgtttgccgccatctgggctttcggcggcgctatggtgcaagatcaattggtggactatagggccgagttttcgaaatggtggcttacagaattcaagactgtcaagtttccctcgcagggcactatctttgattattatatcgatcccgagacgaagaagttcgagccatggagtaaattagtgcctcaatttgaattcgaccctgagatgcctctccaagcttgtctggtccacacgagcgaaactattagggtatgctactttatggaaaggctcatggcccgtcaacgtcccgtgatgctggtgggcactgccggcacagggaaaagcgttctggttggggctaagttggcctcactcgaccctgaagcttatttggtcaagaacgtacccttcaattactacacaaccagcgcaatgctccaggctgtcctcgaaaaacccttggagaaaaaggccggtcgcaactacggcccccccgggaataaaaagttaatttattttatcgatgacatgaacatgcctgaggttgatgcttacggtacagtccagccccacacaatcatacgccaacatctggattatggacattggtatgacaggtccaaactttctctcaaggagataacaaacgtgcagtatgtgtcctgtatgaaccccacagcagggagtttcactataaatccccgacttcagcgacacttcagcgtgtttgtgctttccttccccggcgccgacgcgctcagctccatctattccatcatattaacccagcatctcaagctgggaaacttccctgcatcactgcagaaaagcattccacctttaatagaccttgccttggcattccatcagaaaattgccacaaccttcttgcccaccgggattaagttccattacatttttaacctgagagattttgcgaacatttttcagggtatactgttttctagcgtggaatgtgtgaagagcacctgggatctcattcggttatatctgcatgaatcaaatcgggtgtatcgggataaaatggtagaggagaaggatttcgacttgttcgacaagatacagactgaggtgctgaagaaaacttttgatgacattgaggacccggtcgagcaaacccaaagtccgaacttatactgccacttcgctaatggcatcggcgaaccaaaatacatgccagtgcagtcctgggagctgctgacccaaacactggtagaagcgttagagaatcataatgaggttaatacggtgatggacttagttctctttgaggatgcaatgaggcatgtgtgtcacatcaacaggatcctggagtctcctcggggcaacgcactattagtgggagtgggaggctcaggaaagcagtcactgacacggctggcagcctttatctcctccatggatgtgttccagataaccctgaggaaaggataccaaattcaggattttaagatggacttagctagcttgtgtctaaaagcgggcgtgaaaaacttgaacactgtcttcctaatgactgatgcccaggtggcagacgaacgctttctggtgttgatcaacgatctgctcgcgagtggagagattccagacctgtattccgacgacgaggtggagaacatcatctctaacgtccgcaacgaggtgaagagtcaaggcctagtcgataaccgcgaaaactgctggaagttttttattgatcggatacgacgccagcttaaggttactctgtgcttctctcctgtgggaaacaaactcagagtgcggagtagaaagttcccagcaatcgtgaactgtactgccattcactggtttcacgaatggcctcaacaggccttggagtctgtcagtctgcgatttcttcaaaataccgagggaatagaaccgaccgtgaagcaatctattagcaagttcatggcctttgtccacaccagtgtgaatcagacctcgcagtcatatttaagcaatgaacaaagatacaattacacaaccccgaagtcttttctcgaattcatccggctgtatcaaagtcttctccacaggcaccgtaaagagctgaaatgtaaaacagagaggctagagaacggcctcttgaaactccattccacaagcgcccaggtggatgacttgaaagccaaactggccgcccaggaagtcgagttgaaacagaaaaatgaagatgctgacaaactgatccaggttgtgggtgtggagaccgataaggtgagccgggaaaaggccatggcagatgaggaggagcaaaaagtggcagttataatgttagaggtgaaacagaagcagaaggattgtgaggaagatctggccaaagctgaacctgctttgactgccgcccaggccgctcttaatacactcaacaagactaatctaaccgagctcaaatcatttggatctcctccactggcagtcagtaacgtatctgccgccgttatggtgctgatggccccccgcgggagggttcccaaagaccgcagttggaaagcggccaaggttactatggctaaggtggatgggttccttgattcattaattaatttcaataaagagaatatacacgagaactgccttaaggcgataagaccttacctgcaggaccctgaattcaaccctgaatttgtagccaccaagtcctatgctgctgccggactgtgcagctgggttataaatattgtgaggttttacgaagttttctgcgatgtggagccaaaacgacaagccttgaacaaggccacagctgacctgaccgcagcccaagaaaaactggctgctattaaagctaagattgcgcatttaaacgaaaacttagctaagctgacagcgcgcttcgaaaaagcaacagccgacaaactgaaatgccaacaggaggctgaagttacggccgtcaccatcagtctggcaaatcgccttgttggcgggttggcgagtgagaacgtgaggtgggccgatgccgtgcagaatttcaagcagcaggaaaggactctctgtggagacattcttctgatcactgctttcatctcctacctgggattcttcacaaagaagtacagacaatccctgctggacagaacatggaggccatatctgagccagcttaaaactccaatccccgtgactcctgccttagacccacttcgcatgctcatggacgatgctgacgtggccgcatggcagaatgaaggtctgcccgctgaccggatgtctgtcgagaatgcaaccatcctgatcaactgcgagcgctggccactcatggtggatccacagctgcaggggatcaaatggattaagaacaaatacggtgaggatctccgggtcacccaaatcgggcagaagggttatctacagatcatcgagcaggctctggaggcaggggctgtcgtgctgatagagaacctcgaggagtccattgacccagttctgggacccctgctgggccgagaggtcataaaaaaagggcgatttataaagatcggcgataaggaatgcgagtataacccaaagttcagactcatcctgcacaccaagcttgctaacccccactatcagcccgaactgcaggctcaggcaacactcatcaacttcaccgtaacccgtgacggactggaggaccaactgctggcagcggtggttagtatggaaagaccagacttggagcaacttaagagtgacctgacaaagcagcagaatggctttaaaataactttaaaaaccctggaggattcactgcttagcaggttaagctctgcttcagggaattttttaggggagaccgtgctggtcgagaatctggagattactaagcaaacagctgcagaggtggagaagaaggtgcaggaagccaaagtgactgaagtgaagattaatgaagccagggagcattatcgtccagctgctgccagggcttccttgttgtacttcattatgaatgatctctccaaaattcaccccatgtaccagttcagtctgaaagcgttttctatcgtctttcagaaagcggtggaacgcgctgcccccgacgaaagcttgcgtgaacgggttgccaacctcatagacagcatcacattcagtgtctaccagtataccattcggggattattcgaatgtgacaaactgacatatctagcccagttaacatttcagattcttctgatgaatcgggaagtgaatgctgtggagctggatttcttgctgaggtcaccagtgcagaccggtactgccagccctgtagagttcctcagccaccaggcttggggcgccgtgaaagtcctctccagtatggaggagttcagcaacctagatcgggatatcgaaggatcggctaagagttggaaaaagttcgtcgagagcgagtgtcctgagaaggagaaactcccccaggaatggaaaaataaaaccgctttacaacggttgtgcatgctgcgcgccatgcgccctgatcgcatgacgtacgccctaagggacttcgtggaagaaaaattaggctccaagtatgtcgtgggtcgagccttggattttgccaccagctttgaagagtccgggcctgcgactccaatgttctttatcctatctcccggcgtagatccgctcaaggacgtcgaatcgcagggccggaaacttgggtacaccttcaacaatcaaaacttccacaacgtctctctggggcagggccaggaagtcgtagcagaggccgcgttagacttggctgccaagaaaggacattgggtcattttgcaggatacactagaaatgtgtagccgcgagacggagtttaagagtatcctcttcgcgctgtgctattttcatgcagtagtagctgagaggcggaagttcggcccacagggatggaaccgctcttatcccttcaacaccggggaccttactattagtgtcaatgtgttatataattttctggaggctaacgcgaaggtgccctacgatgacctaagatacctgttcggggaaatcatgtacggggggcacataactgacgactgggaccggcgtctatgccgcacctatttgggcgagtttatcaggcccgaaatgcttgagggcgaactgagcttggccccgggcttcccgctgcctgggaacatggattataatggttatcaccagtacattgacgcagaactgcctcccgagagtccatacctgtacggcctccatcctaacgccgaaatcggtttccttacccagacatcagagaagttgttcaggacagtcctggaactgcagcccagggactcccaggctagggacggagctggggccacacgcgaggagaaagtcaaggccttgctggaagagatcctcgaacgtgtgacggatgaatttaacattcccgagctgatggcaaaagtcgaggagagaactccttatatagttgtcgcgtttcaagagtgtggtagaatgaatattctgacccgggagattcagagatcactccgcgaattggagctgggcctcaagggagagctgacaatgacatcacatatggaaaatcttcagaacgccctgtattttgacatggtgcctgaatcatgggcgagacgtgcttatccaagcacagcaggactcgcagcgtggttcccggatctgttaaatcggatcaaagaactggaagcctggacgggcgattttaccatgccctccaccgtatggttaactgggtttttcaatcctcagtctttcctgacagcaatcatgcagagtactgccaggaaaaatgaatggccactggatcagatggccctgcaatgcgacatgaccaaaaaaaaccgcgaagagtttcgctctccccctagggaaggagcgtacattcatggtctcttcatggaaggggcctgctgggacacacaggcaggaattataacagaagccaagctgaaagatctcaccccgccgatgcctgtgatgtttattaaagctataccagcggacaaacaagactgcaggtccgtctacagctgtcctgtttataaaacttcacaacggggacccacgtacgtttggaccttcaatttaaagaccaaagagaatccctccaaatgggtactggcaggagtggcactcttgttacagatttag

SEQ ID NO: 117323 - DNA, 13233 bp, Artificial Sequence
  derived and/or modified sequence
atgcggctggccgaggagcgggccgccctggccgccgagaacgccgatggggagcccggagctgacaggaggctgagactgctcggtacctacgttgccatgagtctgcgccctgctgcaggggcttgggagagatgtgccggaagtgctgaggcagaacagctgctgcaggcgtttctgggcagagatgccgccgagggacctcggccccttcttgtggtgcggcctgggccaagaggtctggcaattcgccccgggctcgaagtcggtcctgagtcaggcctggcgggcgctaaagctctgttctttctgcgaactgggccagagccgcccggacccgactctttccgaggcgccgtggtctgtggagacctccctgcagccccattagaacaccttgcggctcttttctcagaggtggtacttcctgttctggccaacgagaagaatcggttgaattggccccacatgatttgcgaggatgtgagaaggcacgcacattcactgcaatgcgacttgtcagtcatcctcgagcaggtgaaaggaaaaactctgctcccactgcccgctggatctgagaaaatggagttcgccgattctaagtctgagaccgtgctcgactctatagacaagtcagttatatatgccatcgagagcgctgtgataaagtggtcctaccaagttcaagtcgtactgaaacgtgagagttctcaaccattgctgcagggcgaaaatccaacgcccaaagtggaactggaattctggaaatctcggtacgaagatttgaagtacatctacaaccagctccgcacgatcaccgtccgcggaatggctaagttgctcgataagttgcaaagcagttattttcctgccttcaaggccatgtatcgcgatgttgtcgccgcactggccgaggcacaggatattcatgtgcacctcatcccccttcagaggcacctagaggcacttgagaatgccgagtttccagaggtaaagccacaactgcggcctcttcttcatgttgtttgcctgatttgggccacatgcaagagctaccggtcaccaggtaggctcacagtcttgctccaggagatttgtaatctgctgattcagcaggcgagcaattatctgtcacccgaagatctgctgcgttctgaagtcgaggaaagtcaacgcaagcttcaagttgtttctgacacactatccttttttaagcaggaatttcaagaccggagagaaaatctgcatacctacttcaaagaaaatcaggaagtgaaagagtgggactttcagtcctctctcgtctttgtgcgcttagatggcttcctgggccagcttcacgtggtggaagggctgctgaagactgcgttagatttccataaacttggtaaggtggagttttcaggggtgcgtggcaatgcactgtcacagcaggtccaacagatgcacgaggagttccaggagatgtatcggctgcttagcggctctagcagtgactgtctctacttgcaatctaccgacttcgagaacgacgtcagcgagttcaaccagaaagttgaagacctggacaggagactcgggacgatcttcattcaggcctttgatgatgcccctgggttggaacatgccttcaagctcctcgacattgctggcaacctgctcgagagacctttagtggcaagagacacctctgataagtaccttgtcttgatccagatgttcaataaagacctggatgctgtcagaatgatttactcccagcacgtgcaggaggaagctgagttagggttcagcccggtgcacaagaacatgccaacagtcgcaggggggctcaggtgggctcaggaacttcgccaacgcatccagggccctttctcaaactttggacgaattacacatccttgtatggagtcagccgagggaaagcgcatgcagcaaaagtatgaagatatgctcagtcttctggagaagtatgagacccgcctttacgaggactggtgtcggactgtttcagaaaaatctcaatataacctttctcagcctctgcttaagcgcgatccagagactaaggagataactattaatttcaatccgcagcttatttctgttctgaaggagatgtcctacctggaacctcgggagatgaagcatatgcccgagaccgctgccgctatgttcagctctagagacttttatcggcagcttgtggctaacctggagctgatggctaactggtataataaagtcatgaaaacgctgttagaagtggagttccctctggttgaggaggagcttcagaacattgacttgagactgagggcggccgaggagacactgaattggaagacagagggaatctgtgattatgtcacggaaatcaccagcagcatccatgaccttgaacaaagaattcagaagaccaaggataatgtcgaagaaatacagaacatcatgaaaacatgggtcacacccatttttaaaaccaaggatggcaaacgagaatccctgctgagcctggatgatcgccatgataggatggagaagtactacaacctgatcaaggaaagcggattgaaaatccatgccctggttcaggagaatctagggctgtttagcgcagacccgacctctaatatttggaaaacctacgtgaactcgattgataatttactgttgaatggcttcttcctcgcgatcgaatgcagtctcaaatacttgctggagaacactgaatgcaaagccggcctgactcccattttcgaagcacagcttagcctggccatccctgagctcgtattttatcccagtctcgagagcggcgttaaagggggattttgcgatatagtggagggcttaatcacttctatcttccggatcccctctctggttccaagactctccccacagaatggttccccccattaccaggtggacctggatgggatcccagatctcgctaacatgcgtcgtactttgatggagagggtccagcgcatgatgggcctatgctgtggctaccagtctactttcagtcaatacagctacctctacgtggaagatagaaaggaggtactggggcaatttttgttatacggccacattctgaccccagaagaaatcgaggaccacgtggaggatgggattcccgagaatcctcctctgctgagccagttcaaggtgcagatcgacagttacgagaccctgtacgaagaagtctgcagattagagccgattaaagtgttcgatggatggatgaagatcgacattcgccctttcaaggccagtctcctcaatatcatcaagcgctggtctttgctgttcaagcagcatttggtggaccatgtgactcacagtctcgccaacctggatgccttcattaagaagtctgagtctggattgcttaaaaaggtggagaaaggcgactttcaagggctcgtcgagatcatgggccatctgatggctgtgaaggaacgtcaaagtaatacagatgagatgttcgagcccttgaagcagacaatagaactgctgaagacttatgagcaggagttaccggaaacagtctttaagcagctggaagagctgccggagaaatggaataatatcaagaaggtagccattaccgttaagcagcaagtcgctcctttacaggcgaacgaagtgacgctgctcaggcaacggtgcaccgccttcgacgccgagcagcaacagttttgggaacaattccataaggaagctccattcagatttgactcaatccaccctcaccaaatgctggacgcccgccatattgagatccagcagatggagtccacaatggcctcgatctctgagtccgctagtttattcgaggttaatgtgcccgattacaaacagttgagacagtgccgcaaagaggtttgtcaactgaaggagctatgggacacgattgggatggttacttccagtatccacgcgtgggaaaccaccccatggagaaatataaacgttgaagccatggagctggaatgcaaacagtttgccaggcatattaggaacctggataaggaggtccgggcctgggacgccttcacaggcctagaaagcactgtgtggaatacgctttcatctctcagggctgtggcagaattgcagaatcctgcaatcagggaacggcactggcggcaactcatgcaggcaacaggagtgagcttcacaatggaccaggataccaccctcgcccatctgctgcagctgcagctacaccactatgaggatgaagtgcggggcatcgttgacaaagccgccaaggaaatgggaatggaaaaaaccctgaaagaactgcaaaccacatgggccggaatggaatttcaatatgagcctcacccaagaacaaacgtgccactgctgtgtagcgacgaggacctgatagaagtcttggaagataaccaggtgcagttacagaatctggtgatgtccaagtacgtggcatttttcctagaggaggtgtccggctggcagaagaaactgtcaactgtggatgctgtaatctcgatctggttcgaagttcagcggacttggacccacttagagtcaatcttcacaggctcagaagacattagagctcagcttcctcaggattcgaagcgcttcgaagggattgatattgattttaaggaactggcatacgatgcacagaaaataccgaacgtggtccagaccaccaataagccaggcctttacgaaaagttggaggatattcaggggaggctgtgtttgtgtgaaaaagccctggctgaatacttagataccaagagactggctttccctcgattctactttctgagctcaagtgacctccttgatatccttagtaacggaacggccccgcaacaagtgcaacggcatctgtcaaagctttttgacaacatggcaaagatgcgctttcagctcgatgcttccggggaacccacaaagacaagcctgggtatgtatagcaaggaggaagagtatgtggcatttagcgaaccctgcgactgttctggacaggtggaaatctggttaaatcatgttctgggtcacatgaaggccacggtgcgacacgaaatgactgagggggtcactgcttacgaagagaagccgcgtgagcagtggttatttgatcaccccgcacaggtggcccttacctgcacacaaatctggtggactaccgaggtggggatggcctttgcgaggctcgaggaggggtatgagagcgccatgaaagattattacaagaaacaagtggcgcaactgaaaactcttatcaccatgcttatcggacaactgagcaaaggcgacagacagaagatcatgaccatttgcaccatcgacgttcacgcacgcgatgtcgttgccaaaatgattgcacagaaggtcgacaatgcccaggctttcctgtggctctcacagctccgtcatagatgggacgacgaagtgaagcattgtttcgccaacatttgtgatgcccagtttctatatagctacgagtaccttggtaacaccccccgattggttatcactcctttgactgaccgctgctatatcaccttgacacagtcattacaccttactatgagcggtgccccggcgggcccggctggcacaggcaaaactgagactacgaaagatctgggacgcgccttaggtatccttgtgtatgtgtttaactgttctgagcaaatggattataagagctgcgggaatatctacaaaggtttagcacagaccggtgcctggggctgtttcgacgagtttaaccggatcagtgtggaagttcttagcgtcgtggctgttcaagtcaagtccatccaggacgctatacgggataagaagcagtggttctccttcctgggagaggaaatctcactgaacccgtccgtggggatctttatcactatgaaccctggctacgccggccgaactgagctgcccgaaaacctcaagagtctgtttagaccctgcgcaatggtggtacccgactttgaactgatctgcgagattatgctggtcgctgaggggttcatagaggcacagtcactggccagaaaatttataacgctttatcagctttgcaaggagctgttgagcaagcaggatcactacgactggggccttcgcgctattaagagcgtgcttgtcgttgccggctccctgaaacggggggatcccgacagacccgaagatcaggtgttgatgcgcagtttaagagatttcaacattccgaagatcgtgacagatgacatgcctattttcatgggtttgattggcgatctcttccccgcactcgacgttccaagaagacgcgaccctaactttgaggccctcgttagaaaggcaatcgtcgacttgaaacttcaggctgaagataacttcgtgctgaaggtcgttcagctagaggagcttctcgctgttcgacattctgtgttcgtggtgggcggagctggcacaggcaaaagtcaggtgcttagatccctgcataagacgtaccaaattatgaagagacgcccagtttggacagatctaaacccgaaagccgtcaccaatgacgagctgttcgggattatcaatccagccacaggggaatggaaggacggactgttctcatctatcatgagagaactggctaatatcactcacgatgggccgaagtggatcttgcttgacggtgacattgaccctatgtggatcgaatctctaaacaccgttatggacgataacaaggttctgaccttagcctctaacgaaaggatacctctgaacccgactatgaagctgctgtttgaaatctctcatctgagaactgccactccggcaacagtgagcagggcaggaatcctgtatattaatcccgccgacttagggtggaaccctcccgttagttcttggatcgaaaaacgagaaatccagactgagcgagcaaatttgaccatcctgttcgacaagtacctgccgacttgccttgatacgcttcggacaagatttaagaagattatacccattcccgaacagagcatggtgcagatggtgtgtcatttgcttgaatgcctgctgacaaccgaagatattccagccgactgtccgaaagagatctatgagcattactttgtctttgcagcgatctgggcatttggaggagctatggtgcaggaccagctcgtcgattacagggcagaattcagcaaatggtggttgaccgaattcaagaccgtgaagttccctagccaaggtacgatctttgactattacattgatccagagaccaaaaagtttgagccctggtctaaactcgtcccacagtttgagttcgaccctgaaatgccgctgcaagcttgcctcgtgcacacttctgagaccatccgagtgtgttactttatggagaggctcatggccaggcagcgacccgtgatgctggtcggaacggccgggaccggaaaaagcgttctggtcggggccaaactggcatcacttgatcccgaggcgtacttggtgaagaatgtgccgtttaattactacaccactagcgcgatgcttcaggcggttttggagaaacctctcgagaagaaggcgggcaggaactatggccccccaggaaataagaagctgatttatttcattgacgacatgaacatgcctgaggtggacgcctacggtacggtacagccacatactataatcagacaacatttggactacggccattggtacgacaggtctaagctgagcctgaaggagatcacaaatgtgcagtatgtttcctgtatgaaccctaccgccggctctttcactatcaaccccagactacaaagacacttttcagtcttcgttctgagcttccccggcgcagatgctctatctagcatatactctataatcctgactcagcacctgaaactgggcaacttcccggcctcacttcaaaaatccattccacctctgattgaccttgccctcgcatttcatcagaagatcgcgacaacattcctcccaaccgggatcaagttccattatatctttaatctgagggacttcgcaaatatctttcagggaatcctgttcagcagtgtggagtgtgtgaaaagtacttgggaccttatccgcctctacttgcatgagtccaaccgggtttaccgtgacaagatggtggaagaaaaagacttcgacttgttcgacaaaatccagaccgaagtcctcaaaaaaacgtttgatgacattgaagaccccgtagagcaaacccagtcacccaacctgtactgccactttgcaaatgggatcggtgaacctaaatatatgccagtccagtcctgggaattattaacacaaacactggtggaagcactggagaaccataacgaggtaaacacagtgatggacctggtcttattcgaagacgccatgaggcatgtatgccacatcaatcggattctggaaagccctcgcgggaacgcattgctggtgggagttggtggttcaggtaaacagtctctcactcgcctggctgcgttcattagcagcatggatgtttttcaaattaccctgaggaaaggctatcagatccaggattttaagatggacctcgcctcactctgtctgaaggctggcgtgaagaatcttaacacggtgttcctcatgacggatgctcaagtggccgacgaaaggtttttggtgctgattaatgatttgctagcctcaggagaaatacctgatttgtattctgatgacgaagtggagaacatcattagcaacgtgaggaacgaagtgaagtctcagggcctcgtggataatagggaaaattgctggaaattcttcatcgacaggatccggcggcagcttaaagttaccttatgtttcagcccagtcggaaacaagctgagggtgcgctcgcgaaaatttcctgccattgtaaactgtaccgcaatccattggtttcacgaatggccacagcaagccttggagagcgtgtcgttacgcttcctgcagaatacagagggcatcgagcctacagtgaagcagagtatctccaaattcatggccttcgtgcatacgtccgtcaatcaaactagccagtcgtaccttagcaacgaacaacgatataactatactacccctaaatctttcctggaattcatccgtctgtatcagtccctgcttcaccgacacagaaaagagttgaagtgtaagacagaacgtctagaaaatgggttactgaagctgcactctacatcagcacaagtcgacgatctgaaggcaaagctggctgctcaagaagtggaactgaagcagaaaaatgaggacgctgacaagctgatacaggtggttggagttgaaacagataaggttagtcgcgaaaaagctatggcggacgaggaggaacagaaggtggcagtgatcatgctcgaggtgaaacagaagcagaaggactgcgaagaagatctcgctaaggcagagccagcactaaccgccgcacaggctgccttaaatactctgaataaaaccaatttaacagagctaaaatcctttgggtcacctcccctggcagtgtcaaacgtctccgcagccgtgatggttttaatggcacccagaggacgagttccaaaggaccgttcttggaaggccgccaaggtcacgatggcaaaggtagatggtttcctggattcactgattaactttaataaggagaacatccatgaaaactgtttgaaggcaatccgcccctatctccaagatccagaattcaaccctgagtttgtcgcgaccaagagctatgcagccgctgggctgtgtagctgggtaattaatattgtccggttttatgaggtcttttgtgatgtggagcctaaacggcaggcgctcaataaagcaaccgccgaccttaccgctgcgcaggagaaactggccgccatcaaggctaagatagcgcatttaaacgagaatttagccaagctgaccgcccgattcgagaaggctacagctgacaaactgaagtgccagcaggaggcggaggtcacggctgtgactatctcacttgctaataggcttgtgggcggactcgcaagtgaaaacgtgcggtgggcagatgccgtccagaattttaagcagcaggaacgcacactgtgcggggacatacttttaatcacagcattcatatcttacctgggcttttttactaagaagtaccgccagtcgttactggatagaacatggcgcccatatttatctcagcttaagacacccatccctgttacgccagctctggatccccttaggatgctgatggatgatgccgacgtagctgcctggcaaaacgaggggttgcctgctgacaggatgagtgtcgaaaatgctacgatccttattaattgtgagaggtggcccttgatggtcgatccccagctgcaaggcattaagtggatcaaaaataaatatggtgaagacctgcgagtaacacagatcggccagaaggggtatttacaaatcatcgagcaggccctggaagctggcgccgtggtgctgattgagaatctagaagaatctattgaccccgtgctggggccgctgttaggtcgggaggtgatcaagaagggacggtttatcaaaattggcgacaaggagtgcgaatacaacccaaaattccggttgatacttcatacaaaactggctaaccctcactaccagcccgagctgcaggcccaagccactctgatcaatttcaccgtcacccgagatgggctggaggaccagttgctcgcagccgtcgtgagtatggagaggcctgaccttgaacagttaaagtcagatctcactaaacagcaaaacggctttaagatcacactgaagactctggaggactccctgctgtcccgtctgagctccgccagcgggaacttcctgggcgagacagtactggtcgaaaacctggaaatcacgaaacagactgcggccgaggtcgagaagaaggttcaggaggcaaaggtaacagaggtcaagatcaacgaagcgcgcgagcattatcgtcctgctgctgcacgagcctcgttgttgtatttcattatgaacgatctcagcaagatccatcccatgtatcaattctctctgaaagctttttctattgtttttcagaaggcagtagagcgggctgctcccgacgaatctttacgagagcgcgtggccaacctcatcgacagcattaccttctctgtgtatcagtataccattcgtggactgttcgagtgtgataaactcacctacctggctcaactcacttttcagattctgctgatgaatcgggaggttaacgccgtcgagctcgactttctcttgcggtctccagtccagacaggaacggcctctcctgtggaatttctttcacaccaagcctggggggctgtgaaggtcctgtcaagcatggaggaattctctaatcttgacagagacatcgagggctccgccaaaagctggaaaaagtttgttgagtctgagtgccctgagaaagagaaattgccacaggaatggaagaataaaactgccttgcaacgcctttgcatgctgcgggctatgaggcccgatcggatgacatatgccctccgcgactttgtcgaggaaaagctgggctccaagtatgtggtgggaagagcacttgactttgctacctccttcgaagagtcgggaccggcaactccaatgttctttatcttatcccccggagtagacccacttaaggatgtagagtctcagggaagaaagctgggctacactttcaataatcagaacttccataacgtatctctgggccaggggcaggaggtagtcgccgaggctgcactagacctggctgctaagaaggggcattgggtgatccttcaagacacgctggagatgtgcagtcgggaaactgagttcaagtcgatccttttcgctttgtgttattttcacgcggttgtcgctgaacggcggaagttcggacctcaaggatggaatcgctcataccccttcaacacaggggacctgactatctcagtgaatgtgttgtacaactttctcgaagccaacgctaaggtgccttatgatgatctccgttatctgtttggggagataatgtacggaggacatattactgacgactgggaccggcgtctgtgccgcacttacctgggggaatttattagacctgaaatgctggaaggcgaacttagcctggcgcccgggttcccacttcccggtaatatggattacaatgggtatcaccaatacattgacgcagaactccctccggaatccccttacctatatgggctgcatccaaacgcagagatcggttttctgacacagaccagcgagaagctgttcagaacggtgttggaactgcagccccgagactcccaggcccgggacggcgccggcgccacgagagaagaaaaggtgaaggccctcttggaggaaattttagagcgggttaccgacgagttcaatataccagaactcatggcaaaggttgaggagaggaccccttatatcgtcgtggcttttcaggaatgtggccgcatgaacatcttaacccgtgagatacagaggtccctgcgagagctggaactgggcctaaaaggagagttaaccatgacttctcacatggaaaatctgcagaatgccttgtattttgatatggtgcccgaatcgtgggctcgtagggcctatccgtccacagccggccttgctgcttggttccctgatcttctgaatcggattaaagaactggaagcctggaccggagatttcacaatgcccagtaccgtctggctgaccggcttcttcaacccccagtcattcttaacggccattatgcaatcaaccgcaaggaagaatgagtggcctctggaccagatggcacttcagtgcgatatgacaaaaaagaatagggaagagtttcggtcccccccccgcgagggggcgtatatccacgggctgttcatggaaggggcttgttgggatactcaggccggcattatcactgaggctaagctgaaggacttaacgccccctatgccagtgatgtttattaaagcgattcccgccgacaaacaggattgccgcagcgtatactcttgtcccgtgtataaaacatcacagcgaggtccaacttacgtgtggacatttaacttgaagacaaaagagaacccttccaaatgggtgctcgccggggtcgccctcctgctccagatctag

SEQ ID NO: 117324 - DNA, 13461 bp, Artificial Sequence
  derived and/or modified sequence
atgcgtcttgccgaagaaagagcagcactggcggctgaaaacgctgacggggaaccgggagccgaccgacgactgcgattgctaggcacgtacgtcgcgatgtctctccggcctgcggcaggagcctgggagcgttgcgccggatccgccgaggcagaacagctgctccaggcttttctgggccgagacgctgcagagggcccacgcccactactggttgtaaggcccggaccacgcggtcttgcaattagaccaggcttggaagtcggacccgagtctggactggccggagctaaggccctatttttcttaagaaccggccctgaaccgccaggtcctgattcgtttagaggtgcggtggtttgtggggacttacctgcagcacctctggaacacttggctgctttattttctgaagtcgtactccctgttctggcaaatgagaaaaatcgcctgaactggcctcatatgatctgtgaggacgtgcgccgacatgcacacagtctgcaatgtgacctatcagtgattctggaacaggtgaaggggaaaacactgctccctctgcctgccggttctgagaaaatggagttcgcggattccaagtctgagactgttttagactcaatcgacaaatcagtaatctacgccatcgagtccgccgtgatcaagtggtcctaccaagtgcaagtggtgctcaaaagggagtctagccagcccctgttgcagggggaaaatcctacaccaaaagtggagcttgaattttggaagtccaggtacgaagacttgaaatacatctacaaccagctccgcactattacagtgcgcggaatggccaaactcctggacaagctgcagagttcttacttccctgcatttaaggctatgtacagggatgtcgttgctgccctggcggaagcacaggatattcacgtgcatctgatccctctacaacgacatctggaggcactggagaatgctgagttccccgaggtgaagccacagcttaggcccctgctacacgttgtgtgcctgatctgggcaacctgtaaaagttaccgttctccaggaaggctcaccgtgcttctgcaggagatctgcaatctgctgatacaacaggctagcaattacctgtctcccgaggatctcctgaggagcgaggtagaggaatctcaaaggaagctgcaggtcgtgtccgatacactgagtttcttcaagcaagaattccaggatcgccgagaaaatttgcatacctacttcaaagagaaccaagaggtgaaggagtgggactttcaatctagcctggtcttcgtacggttagatggatttctgggacagttacatgtggtggagggcctactcaagaccgcacttgacttccacaaactggggaaggtggaattctccggtgtgcgagggaacgcacttagccagcaggtccagcaaatgcacgaggaattccaggagatgtatcgcctcttatccgggagttccagcgattgcctgtacctccagtctactgacttcgagaatgatgtctctgagtttaatcagaaagtggaagatctcgacagaagactcggcactatcttcatccaagccttcgacgatgcccctggtcttgagcatgctttcaaactactggacattgccggaaacctcttagagcggccactggtcgccagggacacttctgataagtacctcgtgttgatccagatgttcaataaggatctggatgccgtgcgcatgatttattcacagcacgtgcaagaggaagctgagctgggtttctctccagttcataagaacatgcctaccgtggctggaggcttgcgctgggcccaagaactccggcaaagaattcagggcccattctctaacttcgggaggattacccacccttgcatggaatccgcggaggggaaaaggatgcaacagaaatacgaagacatgctgtctcttcttgagaagtacgagactagactctatgaggactggtgtagaactgtgtctgagaaaagtcaatacaatctttcccagcccctcctgaaaagagaccctgaaactaaggaaattacgattaacttcaacccacagctgattagcgtgttgaaggaaatgtcctacctggagcctcgggagatgaagcacatgcctgaaacagcagcggcaatgtttagctctagggacttctaccgacagctggttgctaatctagagctcatggcaaactggtacaacaaagtgatgaagaccctgctggaggttgagtttcctttggtagaagaggaactgcagaatattgatctgcgactaagagcggcagaagagactttgaactggaagacagagggcatatgtgattatgtgactgagataacctcctctatacacgacctggagcagcggatccaaaagacaaaggataacgtggaagaaattcagaacattatgaagacttgggtgaccccaattttcaagactaaggacggcaagagggagtcactgctgagcctcgacgaccgccacgataggatggaaaaatattataatctgatcaaggaatcagggcttaagattcacgcacttgtccaggagaatctgggcctgttttccgccgatcccacaagtaatatctggaaaacatacgtgaattctatagacaacttgctgctgaacggatttttcctagccattgaatgctccctcaagtacttattggagaacactgagtgtaaagctggccttacccccatctttgaggcccagctttcccttgccattccagagctagtgttctatccaagtctcgagagtggcgtcaaagggggattctgtgacattgtcgagggccttattacatccatcttcaggatccctagtctggtcccccgactgtcaccacagaatggatccccccactaccaagttgatctcgacggcattcctgatctggccaacatgagacgaaccctgatggaacgcgtgcaaagaatgatgggactttgctgtgggtatcaatccacatttagtcagtattcatacttatatgtggaggaccggaaagaagtactgggccaatttcttctctatggtcacattctgaccccggaggagatcgaggatcacgtagaagatggaatccctgaaaatccgccactcctgtcacagttcaaggtgcagatcgattcatacgagaccctctatgaggaagtgtgcaggctggagccaattaaagtctttgatggttggatgaaaattgacatcagaccattcaaggcctccctcttaaatattattaagagatggtcactgctgtttaagcagcacctggtcgaccatgtgactcactctttggctaatctcgacgctttcataaaaaaatccgaatccggactgctgaaaaaagtcgaaaagggggatttccaggggctggtggaaatcatgggccacctaatggcagtgaaagaaaggcagtccaacacagacgaaatgtttgaacctttgaagcaaacaatagagttactgaaaacatatgagcaagagctccctgagaccgtatttaagcagctcgaagagctacccgagaaatggaataatatcaaaaaagtcgccattacagtgaagcagcaagttgctccccttcaggctaacgaggtaaccctgcttcggcaacgttgcaccgcattcgatgctgaacagcagcagttctgggagcagttccacaaagaagctccttttagatttgatagtatccatccacatcaaatgctcgacgccaggcatattgagatccagcagatggagagtaccatggcttccataagtgagtccgccagcctgttcgaagtgaatgtgcccgattacaagcagctgaggcaatgtcgcaaagaagtgtgtcagttgaaggaactttgggacactatcgggatggtaacctcgtctatccatgcttgggaaaccactccttggagaaatattaacgtagaggctatggagctggagtgcaagcaatttgcgcgacacatcagaaaccttgataaggaggttcgcgcatgggacgctttcaccggattggagagtacagtgtggaacactttgagctctcttcgtgccgtggctgagttacaaaaccccgcaataagggagagacattggagacagcttatgcaggccaccggcgtctctttcactatggaccaggataccaccctcgcccacctactgcagctgcagctgcatcactacgaggatgaggtgagggggattgtcgataaagctgccaaagagatggggatggagaaaactcttaaagagctgcagactacctgggctggcatggagttccaatacgagccccaccccaggactaacgtgccgctgttgtgttctgatgaagatctgattgaggtcctcgaagacaaccaggtgcaacttcaaaatctcgtcatgtctaaatacgtggccttcttcttagaagaagtatctgggtggcagaaaaagctcagcacagtagatgccgtaatcagtatttggtttgaggttcaaagaacatggactcacctggagagcatcttcacgggatccgaggacattagggcccagctacctcaagatagcaagcgattcgagggaattgatattgactttaaagaactcgcctacgatgctcagaaaattccaaacgtggttcaaactaccaacaagcccggactttatgaaaaacttgaggacatccaaggcagactgtgtctgtgcgagaaagcactggctgaataccttgatacaaaaaggctggccttcccccgtttctatttcctgagcagtagtgatctcctggacatcctctcaaatgggactgcgcctcagcaggtgcagaggcatctgtcgaagctttttgataatatggccaagatgaggttccagctggatgccagcggagagcctaccaaaacatcccttgggatgtacagcaaagaggaggaatacgtcgctttcagcgagccgtgcgactgttcaggacaggtcgagatttggctaaatcatgtgttaggccatatgaaggcaactgtccgccacgagatgactgagggagtgacagcctacgaggaaaaaccgcgagagcagtggttgtttgatcatcccgctcaggtggccctcacatgtacccagatctggtggaccaccgaggtggggatggcttttgccaggctggaggaaggatatgagagcgcaatgaaagattattataagaagcaggtggcacagttgaagactttaataacaatgctcatcggccagctgtctaaaggagaccggcagaaaatcatgacaatctgcactatcgatgtgcacgcacgagacgtcgtagccaagatgatagcccagaaagtagataatgcacaagcctttctatggcttagtcagctccgccatagatgggacgacgaagtgaagcactgtttcgccaatatttgcgatgcacaattcctttattcttacgaatatttgggaaacaccccaaggctcgtaattactccactgacggacaggtgctacatcactttgacacagagcttgcacctcaccatgtcaggtgcccctgccggtccggcaggtacaggaaagactgaaacgacgaaagatctgggcagggcattaggtatcctggtttacgtgtttaattgctccgagcaaatggattataagagttgtggaaacatctacaaaggcctggcccaaaccggagcgtggggatgctttgacgaattcaacagaataagtgtggaagtactttcagtcgttgctgtccaggtcaaatctatacaagacgccatacgcgacaaaaaacagtggttttctttcctgggcgaggagatcagcctgaatcccagtgtgggcatttttattaccatgaaccccggatacgccggacgcaccgagctgcccgagaatctaaagtcgctgtttcgcccttgcgccatggtggtccccgacttcgaactcatttgtgagattatgctcgtcgccgagggcttcattgaagctcagtccctggcccgaaagttcattacgctgtatcaactgtgtaaggagctgctgtctaagcaggaccattatgactgggggctgcgtgccataaagagcgttctcgtggtggcgggtagcttgaaacggggagatccagacagacccgaggaccaagtgctgatgaggtcacttagagacttcaacattcccaaaatcgtgactgacgacatgccaatctttatgggattgatcggggaccttttcccggctctggacgtacctcgacgccgagatcctaatttcgaggcactggtgcgtaaagcaatcgtcgacctgaaactccaagcagaggataacttcgtcttgaaagtggttcaactcgaggaattgctggccgttcggcacagcgtattcgtcgtaggaggagccggaactgggaaatctcaggtcctgaggagtctgcacaagacatatcaaataatgaagcgaagacccgtgtggacggacctgaatcccaaggcagttactaatgatgagctgtttgggatcattaaccccgctacaggcgagtggaaggatggactgttttcaagcatcatgcgagagctagccaacatcactcacgacgggccaaaatggattttgctcgacggcgacatagatcccatgtggattgagtcactcaacacggtgatggatgataacaaggttttgacactggcttccaatgagaggattccattgaatcctactatgaaactgctgtttgaaatctcgcatctgagaacagctaccccagctacggtgtcacgcgctggtatcctgtacatcaaccctgccgacctggggtggaaccctccagtctctagttggatcgaaaaaagagagatccagacagagcgcgctaacctgacaatactattcgataagtatctccccacatgcctcgatacactgagaaccagattcaaaaaaatcatccccattcctgagcagagcatggtacagatggtctgtcatctcctagaatgcttactcacaacggaagatatccctgctgactgtccaaaggaaatctatgagcactacttcgtattcgctgcaatctgggcatttggcggagcgatggtgcaggaccagctggtcgactacagagcagaattctctaaatggtggcttaccgaattcaagactgttaagtttccttcacaggggacaatcttcgattattacattgatcccgaaaccaagaagttcgagccctggagcaaactcgttccacagttcgaattcgatcctgagatgccccttcaggcctgtctggtgcacacaagtgaaaccattcgcgtctgctacttcatggaaaggttgatggccagacagagaccagttatgctggtgggaacagccggtacggggaagagcgtgctcgtgggtgccaagcttgcttctcttgatcctgaagcctatcttgtaaagaacgttccctttaattactacacaaccagcgccatgcttcaggccgtgcttgagaagcctctggaaaaaaaagccggacggaactacggccctcctggaaataaaaagctgatctatttcatagatgacatgaacatgccagaggttgacgcctatgggacagtgcaaccccacaccatcattcggcagcatctggactacggtcattggtatgacaggagcaagctgagtctgaaggaaattaccaatgtccagtacgtgagctgcatgaatcccacggccggaagctttacgatcaacccacgcctgcagcgacacttctccgtattcgttctgagtttcccaggcgcagacgctcttagttctatttatagcataatattgacacagcatcttaagttgggaaatttccccgcttcactccagaaatcaataccacctctgatcgatttggcgctggcctttcaccagaaaatcgccacaacattcctgccaactggcattaaatttcactatatctttaatctgagggattttgccaatatattccagggcatcctgttcagtagcgtcgaatgtgtgaagagcacctgggatcttataaggctctatctgcacgagtcaaatcgggtgtatagagataagatggtggaagaaaaggatttcgatctgttcgacaaaatacagaccgaggttttgaagaaaaccttcgatgatattgaggatccagtagagcagacacagtcacctaatctgtactgccactttgctaacggaatcggagagccaaagtacatgcctgtgcagagttgggagctgctgacacagacactggtcgaagccctcgaaaaccacaacgaagtgaatacagtcatggatttggtgctgttcgaggacgcgatgcgtcacgtgtgtcatatcaatcgtatcctggagagtcctcgtgggaacgccctgctcgtgggagttggaggctctggcaaacagagtttaaccaggcttgctgccttcatcagctccatggacgttttccagattaccctgcggaaagggtaccagatccaggatttcaagatggatctcgcatcactctgtctcaaagccggagtgaagaatctcaacacagtctttctgatgactgatgctcaggtcgctgatgaaagatttctggtcctgatcaatgatctgctggcctccggcgagatcccagatctttattctgatgacgaggtggaaaacattattagtaacgtacggaacgaagtgaaatcccaggggctcgtggacaatcgggaaaactgttggaaattctttatcgataggattaggcgccagctaaaggtgacactgtgttttagtcccgtgggcaataagctgcgtgttcgttctcgcaagttccccgctatagtgaactgcacggcgattcactggtttcacgaatggccacagcaggcccttgagtcagtgtccttgaggttcctgcagaacaccgaggggatcgagcctaccgtgaagcaaagcatctccaaatttatggccttcgttcatacgtccgtgaaccagaccagccagagctatctgtctaatgagcagaggtacaattatacaactcctaagagtttcttagagttcattagactgtaccagagcttactacatcggcatcggaaagaactgaagtgcaaaaccgaaagactcgagaatgggctgttaaagttgcatagcacctccgctcaagtcgatgacctgaaggccaaactggctgcccaggaggtggagctgaagcagaagaacgaggacgcagataagctgatccaggtggtgggtgtggagaccgataaagtcagccgggaaaaggctatggcagatgaggaagaacagaaggttgccgtgatcatgctcgaggttaagcagaagcagaaggactgcgaggaagatctcgccaaggccgagcctgcattaacagccgctcaggcagctctcaatacccttaataaaaccaacctgactgagttaaagtcatttggatctccgcctcttgccgtcagtaatgtctccgctgcggtcatggtcctgatggctcccagaggcagagtgcctaaagatagatcgtggaaagccgctaaagtaacaatggcaaaggtcgacggatttctggattcacttattaactttaataaagagaatatccacgaaaattgtctgaaagcaatccgaccttaccttcaggacccagaattcaaccctgaattcgtcgcaaccaaatcatacgccgcagccggattgtgcagttgggtcatcaacattgtgcgattttatgaagttttctgtgatgttgaacctaagcgtcaggcactgaataaagcaaccgcagatttaactgccgcacaggaaaagctggcagctatcaaagctaagatcgcccatctgaatgagaatcttgctaagctgacagctcggttcgaaaaggccacagccgataaacttaagtgccagcaagaagcagaggtgacggcagtgactatctccttagcgaaccgactcgtcggcggactcgccagcgaaaacgtgcggtgggccgacgccgttcaaaacttcaagcagcaagaaaggactctttgcggggatatccttctgatcactgcatttatctcatacctaggattttttaccaagaagtatagacagtcacttctggaccgaacatggcgtccataccttagccaattaaaaacgcctattccagtcacaccggcactcgacccacttcggatgcttatggacgacgccgatgtggccgcatggcagaacgaaggcctgcccgcagataggatgtctgtcgagaacgctacgatcttgatcaattgtgaaagatggcctctgatggtagatccacagctccaaggtataaaatggatcaagaacaagtatggagaagatctgagggtcacacaaattggacagaaaggctatctacagatcattgagcaagccctcgaagcaggtgccgtggtcttaattgagaacttggaggaatccattgatcctgtgcttgggcctctgctcggcagagaggtcataaaaaaaggaagattcattaaaatcggagataaggagtgcgagtacaatcccaagttcagactgatcctccacaccaagctggcgaacccccattatcaaccagagttacaagctcaggccaccttaataaacttcactgtgacgcgcgacgggcttgaagaccagctgctggccgcagtcgtgtcaatggagcggcctgatctggaacaactgaaatccgacctgactaagcagcagaatgggttcaaaattactttaaagaccctcgaagattctctgctttcgcggctgtcctcggctagtggaaattttctcggagagacggttctcgtcgagaacctcgaaatcacaaagcagacggccgctgaggtggagaaaaaagtacaggaggccaaggtgaccgaggtcaagataaacgaagcccgagaacactacaggcccgctgcagctagggcttccttgctgtacttcataatgaatgacctttcaaaaattcatccgatgtaccagttctctctcaaagccttttcaatagtctttcagaaagccgtggaaagggctgcccctgatgaatctttgagagaaagagttgcaaaccttatagactctattaccttcagcgtctaccagtatacaatcagaggtctgttcgagtgtgacaagttgacctatctcgcccaactgacctttcagatactgttgatgaatcgggaggtgaatgccgtcgagctagactttcttctcagaagtcctgtgcagactgggaccgctagccccgtggaatttctgagtcatcaggcctggggtgccgttaaagtactctctagcatggaggaatttagcaatctagatcgcgacatcgagggatccgccaaatcgtggaaaaagttcgtcgagtccgagtgccctgaaaaagaaaaactcccacaggaatggaagaataaaacagcccttcagcgactgtgcatgttgcgggctatgcgtcctgacagaatgacttacgccctgcgtgacttcgttgaggagaagcttggctcaaagtatgtcgtaggacgcgctcttgatttcgccaccagctttgaagagagcggacctgcaactccaatgttcttcatactgtcacctggagtggaccctctgaaggatgtggagagccagggacgcaagctcggctacaccttcaataaccagaatttccataacgtttcgttgggacagggacaggaagtggtggccgaggcggcactcgatctcgctgcaaaaaaggggcattgggtcattctgcaaaacattcacctggttgcaaaatggctgagtacccttgaaaaaaagctggaggaacacagtgagaattcccatcccgagtttagggtgtttatgtccgctgaaccggctccctcccccgaagggcacatcatccctcaggggatcctggagaacagcatcaaaatcaccaatgaacccccaacaggtatgcacgccaatctccacaaggcactcgacaacttcactcaggatactttagagatgtgctccagagaaactgaattcaagagcatcctatttgccctgtgctactttcacgcagtggttgccgaacggaggaagtttggtcctcaggggtggaatcgatcttatcctttcaacaccggggatctgactatctcagtcaacgtgctttacaacttccttgaagctaatgccaaggtgccgtacgacgatttaaggtacttattcggcgaaattatgtacggcggacacattactgatgattgggacagaaggctgtgtcgcacctacttaggggagtttataagaccagagatgttggagggcgaactgtcactagctccaggctttcccctaccagggaatatggattataacggctaccaccagtacattgacgctgagttgccacccgagtctccatatctctatggactccaccccaacgctgagattggattcctgacccagacatccgaaaagctgttcaggacagtgcttgagctgcagcctcgggacagccaggcccgtgacggtgcaggtgccacacgggaggagaaggtgaaggccctcctggaagagatcctcgagagagtcacagatgagtttaacattccagagcttatggccaaagttgaagagcgtaccccttacattgtggtggcattccaagagtgcggaaggatgaacattcttacacgcgaaatccagaggtcccttcgagaactcgagcttggtctcaaaggcgagttgaccatgaccagtcacatggagaaccttcagaacgcactctattttgacatggttcctgaatcatgggcgcgaagagcctacccgagcaccgctggactggccgcatggttcccagatttactgaatcggattaaggagctggaagcctggacgggggacttcactatgccgtctacagtctggctgactggattttttaaccctcagagctttctaacagctatcatgcagagcacagccagaaagaacgagtggcctctggaccagatggctctgcagtgcgatatgacgaagaagaatagggaagagtttcggagcccaccacgggaaggcgcatatatccacgggctttttatggagggagcctgttgggacacccaggcgggaatcattaccgaggccaaactgaaagatctcaccccaccaatgccagttatgttcatcaaagctattcccgcagacaagcaggattgccgctccgtgtactcatgccctgtatacaaaaccagccagagaggtccgacatacgtctggactttcaatctaaagacaaaggagaacccttcaaaatgggtgctggccggagtggccttactgcttcagatttag

SEQ ID NO: 117325 - DNA, 2397 bp, Artificial Sequence
  derived and/or modified sequence
atgaacgatctcagcaaaatccaccccatgtaccagtttagtctgaaagccttttctatagtcttccagaaagccgtggagcgggctgcacccgatgaatctctcagagaacgcgtggctaatctaatcgacagcatcacgttttcagtgtaccagtatactatccgaggtctgtttgagtgcgataagctcacttatctagcccagctgacttttcagatattgttgatgaacagagaggtgaacgctgtagagctggatttcctgctccggtcgccagtgcagacgggtaccgcgtcccccgtcgaatttctgtcacatcaggcgtggggggcagttaaggttttgtcgagcatggaagaattctcgaatctagaccgggatattgagggctctgccaaatcttggaaaaaatttgtcgagagcgaatgtcctgaaaaagagaagctccctcaggagtggaagaacaagaccgccctgcaacgcctgtgtatgcttagggctatgaggccagatagaatgacatacgctttgagggactttgtggaggaaaagttgggatcaaagtacgtggtggggcgagcgttggactttgccacatcttttgaggagagcggccctgctactcctatgttctttatcctgagtcccggtgtggatccattgaaggacgttgagtctcagggccgaaaacttggatacacttttaacaatcaaaacttccataatgtgtctttagggcagggccaggaggtggtggccgaagcagctctcgatttggccgcaaaaaaaggacattgggtgatccttcagaatattcacctggtcgccaagtggttgagtaccctggaaaaaaagttagaggaacactccgagaactcacatcccgagtttagggtcttcatgtcagcagagcctgctccttcaccagaaggccacatcatcccccagggaatcctggaaaactctattaagattacgaatgagccacctacgggaatgcatgctaatcttcacaaggccctggacaactttacccaagacactctggaaatgtgcagtagggaaaccgaattcaaatccatcctgttcgcactgtgctatttccatgccgtcgtcgccgagaggcgcaaatttggccctcagggttggaatcgttcctacccattcaacacaggcgacctgacaattagcgttaatgttttgtacaacttcctagaggcgaacgcaaaggtcccttacgacgacctgagatacctcttcggggaaataatgtacgggggtcatattaccgacgattgggaccgtaggctgtgtagaacctacctcggtgaattcattcgccctgaaatgctggaaggagaactgtcgctggcgccaggattccccctgccagggaatatggactacaacgggtatcatcagtatattgatgccgaactgccacccgagagcccctatctttacggtttgcatccgaatgcagagattggattcctgactcagaccagcgaaaagttattccgcacagtactggagctccaacctcgggacagccaagcgagggatggggcaggtgccactagggaggaaaaagtaaaggccttgctagaagagattttagaaagagtgactgatgagtttaatatccccgagcttatggccaaggtggaggagcggactccctacatcgtggtggctttccaggagtgtggccgaatgaacattctcacacgcgaaattcaacgatccctgcgagagctcgagctcggtttaaagggtgaactaacaatgacctcacacatggaaaatctgcagaacgcgctgtacttcgatatggtacccgagtcatgggcacggagggcctaccccagtacagcgggtctcgctgcatggtttccggatttgcttaatagaattaaggaattagaggcatggaccggagattttaccatgcctagcacagtatggctaaccggattctttaacccccaaagctttctcacagccatcatgcagtcaacagcaagaaagaacgagtggcccctcgaccagatggcactccagtgtgacatgacaaagaagaatcgtgaagagtttcgttctcctccacgggagggcgcttacattcacggactttttatggaaggcgcatgttgggacacacaggccggtattatcaccgaggctaagttgaaagacctcacccctcccatgcccgtgatgtttattaaggctatacccgcagataagcaggactgtagatccgtctattcatgccccgtgtataagacatctcagcggggacccacgtacgtgtggacttttaacctcaagacaaaagaaaatccctctaagtgggtcctggcaggcgtagccctgcttctgcaaatttag

SEQ ID NO: 117326 - DNA, 8978 bp, Artificial Sequence
  derived and/or modified sequence
gaggtccgcggaatcgtcgataaggctgctaaagagatgggaatggagaagacgctgaaggagctgcagactacatgggctggcatggagtttcagtacgagccccacccccgaaccaacgtcccacttttgtgctcagacgaagaccttatcgaggtgctggaagataatcaggttcagttgcagaatctcgtcatgagtaagtacgtggctttctttctggaagaagtgagtggttggcaaaagaagctgagcacagtggacgctgtaatctctatttggtttgaggtgcaacgaacttggacccatctcgagagcattttcaccggatcggaggacatccgcgcacagttgccacaggacagcaagagatttgaaggcatcgacatcgactttaaagaacttgcctacgacgcgcaaaaaatcccgaatgttgtacagacaaccaataagcccggtctgtatgaaaaactggaagacatccaggggcgtttgtgtctgtgtgagaaggcactggccgagtacctggacacaaaacggctggcgttccctcgattttacttcctgtcctcttcggatctgttggacattctctctaatggcaccgctccacagcaagttcagagacatctctccaagctgttcgacaatatggccaaaatgaggtttcagctcgacgcatctggagaaccgacaaaaacttccttggggatgtactcgaaggaggaagaatacgtcgcgttctctgagccttgcgactgctctggtcaggtcgagatttggttgaaccacgtcctgggtcatatgaaggctaccgtcaggcatgaaatgactgagggcgtgacggcttatgaggaaaagccccgagaacagtggctgtttgatcacccggcacaagtggccttaacctgtactcagatctggtggaccaccgaggtgggtatggcgtttgcacggctggaggagggttatgagagcgctatgaaggactattataagaagcaggtggcccagttgaaaacactgatcactatgctcattggacagttgtcaaagggagaccgacagaagattatgacgatctgtacgattgatgtccacgccagagatgtcgtcgcgaagatgatcgcccagaaggtcgacaacgcccaagccttcctctggctgtctcaactaagacaccggtgggatgacgaggtgaaacactgcttcgccaacatctgtgatgctcagtttctttacagctatgagtatttgggcaacacccccaggctagtgatcactcccctaacagatcgctgctatatcaccctcacccagtccctacatcttaccatgagcggcgctcccgcagggccagcaggtacgggaaaaaccgaaaccacaaaggacctgggcagggctctcggtattcttgtgtatgtcttcaattgtagcgaacaaatggactacaagagttgtgggaatatatacaaaggactggctcagactggggcatgggggtgttttgatgaattcaatcggatttctgtggaagtgctcagtgttgtcgcagtacaggttaagtcaatccaagatgccataagggataaaaagcagtggtttagctttctgggcgaagagatttcccttaacccttccgtggggatatttattacaatgaatcccggttacgcaggaagaaccgaactgccagaaaacctgaaatccctgttccggccatgtgccatggtggtgccggattttgagttaatctgcgagatcatgctggtagctgagggattcattgaggcccagtctctcgcaaggaaatttattacactataccagctatgtaaggagctgttgtcaaaacaggaccactatgattggggtctgcgagccattaagtccgtgttagtagtcgcgggatccttaaaacgaggcgatccagatcgcccagaagaccaggtgctaatgaggtccctccgggactttaatattcccaagattgtgacagatgacatgcccattttcatgggcctaattggagatctgttccctgctctagatgtcccacgaaggagagatccgaatttcgaagcactcgtccgcaaagctattgtggacctgaaactgcaggcagaggacaattttgtgctgaaagtcgtgcagctggaagaactgctcgccgtacgacattccgtgttcgtagttggaggagcagggactgggaaatctcaggtgttaagaagcttgcacaagacttaccagattatgaagaggaggcccgtttggaccgatcttaatcctaaggccgtcaccaatgacgagctgttcggcattataaacccggcaacaggcgagtggaaggatggcctttttagctctattatgcgagagttagccaacattacgcacgatgggccaaaatggatactgctggacggggatatcgacccaatgtggattgagagcctcaatacggtgatggatgataataaagtgctgactctcgcctcaaatgaacgtataccattaaaccctacaatgaagttgctgttcgagatttcccatctacgtacggccactcctgctacagtctcgcgcgctggcattttgtatatcaacccagcagatctaggatggaaccctcccgtgagcagctggattgaaaagcgagagatccaaacagagagggccaatctgactatcctgtttgacaaatatctgccgacctgccttgacacccttcggacaaggtttaaaaaaatcatccctataccagagcagagcatggtccaaatggtgtgccatctgttggagtgtttgctgaccactgaagacattcctgccgactgtccgaaagagatatatgaacactattttgtgttcgcagcaatttgggcctttggaggggctatggtgcaagaccagttggtggactatcgcgctgagttttcaaagtggtggctcaccgagtttaaaaccgtcaagttccctagccaggggacaatcttcgactattacatcgaccccgaaacaaagaaatttgagccttggtctaagctggtaccccagtttgagttcgatcctgagatgcctttacaagcctgtcttgttcatacctctgaaaccatccgggtgtgctattttatggagcgcttgatggctcgtcagcgaccagtgatgttggtggggacggccggaaccgggaaatccgttctcgtgggagcaaaactcgcctctctggacccagaggcatacctggtcaaaaacgtgccgttcaattattacaccacctctgccatgcttcaggccgtcttggagaagcctctggaaaagaaggccggacgcaactatggccctccaggaaataagaaactgatttacttcattgatgatatgaacatgcccgaagtggacgcctacgggaccgtgcagccccacaccattatcaggcaacacttagattatggccattggtatgatagaagcaaactgagtctgaaagagatcactaatgtccagtacgttagctgtatgaacccaaccgccggatcattcacgataaatccacgattacaacgacatttctctgtgtttgtgctgtccttccccggagcggacgcgctgtccagcatctactccattatacttacccagcaccttaagctgggtaattttccagcatcacttcagaaatcaatcccacctctgatagacctagctctcgccttccaccaaaagatagccacaacattcttgccaaccggcattaagtttcactatatcttcaacctgcgggattttgcaaacattttccaaggcatcctcttcagctcggtggaatgcgtcaagtccacgtgggatctgattcggctgtatctacatgagtctaaccgtgtttatagggacaagatggttgaggaaaaggatttcgacctgtttgacaaaatccagacagaggtgctgaagaaaacatttgacgatatcgaggacccagtggagcagacgcagtcacccaacctctattgtcactttgctaacgggattggtgaacctaagtacatgcccgtccagtcttgggaattgctgacacagactctggtcgaggccctcgagaatcacaacgaagtgaacacagtgatggaccttgtgctgttcgaggatgcgatgaggcatgtatgccatattaatcggatcctggaaagtccgagaggcaatgcgctcttagtgggggtgggaggatcagggaagcagagcctgacccgcctggccgctttcattagttcaatggacgtgttccagatcacactcaggaagggctaccaaatccaagactttaaaatggatttggccagcttgtgcttgaaagctggcgtgaagaatctaaataccgttttccttatgaccgatgctcaggtggcagatgaacgatttctcgtgctcataaatgatttactagcgagcggcgaaatccccgatctgtactccgacgacgaggtggagaatattatttctaatgtccggaacgaagtcaagagtcagggccttgtggacaacagggaaaattgctggaaattcttcatcgaccggattcgaaggcagctgaaggtgacgctctgtttctcgcctgttggcaataagctgcgcgtgagaagtcgaaaatttcctgcgattgtaaactgtaccgccatccattggtttcatgagtggcctcagcaggcacttgagagtgtgagtctccggtttcttcaaaacactgaagggattgaaccgacagtcaaacagtccatatcaaagttcatggcctttgtgcacaccagcgtgaaccagaccagtcagtcctacctttccaatgagcagcgatacaattacactactccaaagagctttcttgagttcattaggttgtatcagagtctactccaccgccatagaaaggagttaaagtgtaagacagagcgtctggagaatggcctcctcaaactacatagcactagcgcgcaagtcgacgacctgaaggccaagttggccgctcaggaagtggagctcaagcagaaaaacgaggatgctgataagctgattcaggtggttggtgtggaaaccgataaggtatcccgcgagaaagcaatggcggacgaggaagaacagaaagtggcagttattatgttggaagtgaagcagaaacagaaagattgcgaagaggatctggccaaggccgaacccgcactgacagccgctcaggcggcactcaacacactgaacaagaccaacctgactgagcttaagagttttggctctccacctcttgcggtgtcaaatgtgtcggcagctgtgatggtgcttatggcgcctcgaggtagggtgccaaaggacagaagctggaaggccgcaaaggtgaccatggcaaaggtggacggcttcttggacagccttatcaatttcaataaagagaacattcatgaaaattgcctcaaggccatacggccatacctccaggatcccgagttcaaccctgagttcgtcgcaaccaagtcctacgccgctgcaggtctttgcagttgggtcataaatatcgtgcgcttctatgaggttttctgcgacgtggagcctaaaagacaggccctgaataaggccacagccgacctcacagctgcgcaggagaagctggctgccatcaaagcaaaaattgcacacctgaatgaaaatctcgctaaattaaccgctaggttcgaaaaagccacggcagacaaactgaaatgtcagcaagaggcagaagtaaccgccgtgaccatctccttggccaatcggctggttggtggcctcgctagtgaaaatgtacggtgggcagatgccgtccagaactttaaacagcaggaacgaaccctgtgtggagatatcctgctcattaccgccttcatttcttacctgggttttttcaccaagaaatatcggcagtccctcctggatcgaacctggcgcccatacctgtctcaacttaagacccctattccagtaacacctgccctggacccactgagaatgttaatggatgatgccgacgtagctgcatggcaaaacgagggcctccccgcagatcggatgtcagtcgaaaacgccactatcctgatcaactgcgagagatggcccttgatggttgatccacaactgcagggcattaagtggatcaagaataaatacggcgaagaccttagagtgacccagatcggacagaaagggtatctgcagattatcgagcaggcattggaggctggcgctgtggttctcatcgagaatctcgaggaatccatcgatccagtactggggcctctcctcggcagagaggtcatcaagaaaggcagatttatcaaaattggagataaggaatgcgagtacaatccaaagtttcgcttgatccttcacacaaagcttgcaaaccctcattatcagccagaattacaggctcaggcaacccttatcaacttcactgtaaccagagatggcctcgaggaccaattgctcgccgctgtggtgtcaatggaacggcctgatctggagcagttaaagagtgacctgaccaaacagcagaatggcttcaaaatcacactgaaaacattagaggattcactgctttccaggctgagtagtgcttctggaaattttctgggcgaaaccgtcttggtggagaatctcgaaatcacaaagcagacggctgctgaagtcgagaagaaggtgcaggaagccaaggtgactgaggtgaaaattaatgaagccagagaacactaccgaccggcagccgctagggccagtctgttgtactttatcatgaatgacctcagtaagattcacccaatgtatcaattttcgttaaaggcgttctccatcgtgttccagaaggcagtcgagagggccgctccagatgagagcttgcgggagagggttgctaacttgattgatagcatcaccttttccgtttaccagtacactattcgtggactcttcgagtgcgataaactcacttacttagcccagctcactttccaaatactgttgatgaaccgagaagtgaacgctgtcgagctggacttcttactacgcagccctgttcagactggcaccgcgtcgcccgtggaattcttaagtcatcaagcctggggggcagtcaaagtgctctcgtctatggaagagttttcaaaccttgaccgggatatagagggttcagccaagagttggaaaaagttcgtggagtcagagtgccctgaaaaagagaagctgccccaggagtggaagaataaaaccgctctgcaaagactgtgtatgctgcgggctatgcgcccagatcggatgacatacgcactgagagatttcgtggaagagaaattagggagtaaatacgtagtgggaagggctctggattttgccaccagctttgaggagtccggtcccgcaactcccatgttctttatcctgagccccggagtggaccctctgaaggacgtagagagtcaggggaggaaactcggatataccttcaacaatcagaacttccacaacgtgtctttaggccagggccaggaggtagtggcagaagcagctcttgacctggcagcaaaaaaaggccattgggtaatcctccaggatacactcgagatgtgctcacgagagactgaatttaaatccattcttttcgccctgtgttattttcatgccgtggtcgcagaacgtaggaaattcggaccccaaggttggaatagaagctacccatttaacacaggcgaccttaccatttctgttaacgtgctgtataactttctagaagcaaacgcaaaggtgccctacgatgacctccggtaccttttcggggaaattatgtatgggggtcacataacggatgactgggaccgacgcttgtgccgaacctatctgggggaattcatcaggcccgagatgctggagggcgagctcagcctggcacctgggttccccctgcctggtaatatggactacaatgggtaccaccagtatatcgatgctgagttgccaccagagtccccatacctgtacggtctgcatccgaacgccgaaatcggcttcctgacacagaccagcgagaaattgttcagaaccgttttagagctgcaacctcgggacagccaggctcgtgatggggctggagctacacgggaggagaaggttaaagctttattagaggagatcctggaaagagtcaccgatgagttcaacattcccgagctgatggcaaaagtggaagagcggacaccttacatcgttgtagcctttcaagagtgtggcaggatgaatatcctaactagagagatacagagaagtttaagggaacttgagttggggctgaagggagaactcaccatgacctcccatatggagaatctgcagaatgcgttatatttcgacatggttcctgagtcctgggccagacgggcatatccctccacagcaggcctagcagcctggttccctgatctgctaaaccggattaaggaacttgaagcctggaccggtgacttcactatgcccagcactgtgtggcttactggcttctttaacccccaatccttccttacagctataatgcagagtaccgctagaaagaacgaatggcccctggatcagatggcgctgcagtgcgacatgactaaaaaaaatagggaggaattccgatcgccacccagagaaggagcgtacatacacggcctatttatggaaggcgcatgctgggacacgcaggctggaatcatcactgaagctaaactcaaagaccttaccccccctatgccggttatgttcatcaaggccatacccgctgataaacaagactgccgcagcgtgtattcctgccccgtatataagacttcacagcgtggtccaacttacgtatggacattcaatcttaaaacaaaggaaaacccaagcaaatgggttctggcaggtgtcgcactgctcttacagattta

SEQ ID NO: 117327 - DNA, 13233 bp, Artificial Sequence
  derived and/or modified sequence
atgaggctagcagaggaaagggcggcattggctgcagagaacgccgacggcgagcccggagccgaccggagactgaggttgctgggcacctacgtcgctatgagcttgaggccagctgcgggtgcatgggagagatgtgctggaagcgccgaggctgagcaattgttacaggcctttcttggcagagatgccgctgagggccctcgacccctgctggtcgtccgccctggccctagggggctggccataaggccagggttggaagtcgggcctgaatccggtttggcaggagccaaggcgctgtttttccttagaaccgggcctgagcccccaggacctgacagctttaggggcgctgtggtctgcggtgatttacccgctgcacctcttgagcatcttgccgctctgttctccgaagtggtacttccagtcctggctaatgagaagaataggctgaactggccacatatgatttgtgaggacgtgaggaggcacgcccacagcttgcagtgcgacctgagcgtgatcttggaacaggtgaagggcaagaccctgttacctttacccgctggatccgagaaaatggaatttgctgacagtaagagtgagacagtgctggactcaatcgacaagagtgtgatatacgctatcgaatctgccgtcattaagtggagttatcaggtgcaggttgtcttaaaaagggagagctctcagccactgcttcagggcgaaaatcctaccccgaaagtggagctcgagttttggaagtcgcggtacgaagatctgaagtatatctataaccagctgcggaccatcaccgtgcgcggtatggccaaactgctggataaacttcagtcatcatatttccccgctttcaaggcaatgtaccgcgatgtcgtggcggctctcgccgaggcccaggatattcatgtccatctcataccactccagcgccacttagaggcgctggaaaacgcagagttccctgaggtaaagccccagctgaggccattacttcatgtcgtgtgcctcatttgggccacttgcaagtcataccgctcacctggcaggctaaccgtcctgctgcaggagatctgcaacctgttgatacaacaggcctccaattatctctcgccagaggacctgcttagaagcgaagtggaggaaagtcagcggaagctgcaggttgtgtctgacacactgtcttttttcaaacaagagttccaagacaggagagaaaaccttcatacctacttcaaggagaaccaggaggttaaggagtgggatttccaaagtagtttggtttttgtaaggctcgacggctttctgggacagcttcatgtggtggaagggctgctcaagaccgctctggacttccacaagctgggcaaggtggaattctcgggagttaggggtaatgctctcagccagcaggttcagcagatgcacgaggaatttcaggagatgtatagattattgtctggctctagcagcgattgcctttatctccagtcaacagatttcgaaaacgacgtgagcgagttcaatcaaaaggtggaagacttggatcggagactgggtaccattttcattcaggcattcgacgacgctcctgggctggagcacgcgtttaagctcctggacatcgccggtaaccttttggaaaggcccctcgtcgcgcgagacacctctgataagtacttggtgctcatccagatgttcaacaaggacctggacgccgtgcgtatgatttactcacagcacgtgcaggaagaggcagagctagggttttcaccagtgcacaaaaatatgcccaccgtcgccggtggcttgcgttgggcccaggaattacgtcaacggattcagggtccattctccaactttgggcgaattacgcacccatgcatggaatccgccgagggcaagagaatgcaacagaagtatgaggatatgctatcgttgcttgagaagtatgagactcgactgtatgaagattggtgtagaactgtctccgagaagtcgcagtacaatttgagccagcctctactcaagcgtgatcccgagaccaaagaaattactatcaatttcaatcctcagctcatttcggttctcaaggagatgagttatttggagccgagggagatgaagcacatgcctgaaactgccgctgctatgttcagctctagagacttttataggcagttggtagccaatttggagctgatggctaactggtacaacaaagtgatgaagaccctgctggaggtggagtttccgctggtagaagaagaactccagaatattgatcttaggcttagggccgcagaagagactctcaattggaagacagagggaatctgtgattacgtcaccgagatcacatctagcattcatgacctagagcagcgcattcaaaagacaaaagataatgtggaggaaattcagaacattatgaaaacatgggttaccccaatattcaagacaaaagacggcaagcgcgaaagcttgctctcattggatgatcgccacgaccggatggaaaaatattataaccttattaaggaaagtggcttaaagatacacgctctggtccaagagaacctggggctcttttctgcagacccaacctccaatatttggaagacctatgttaacagcatagataatcttctgctcaacgggttcttcctggctatcgagtgttccctgaagtacctcctggagaataccgagtgtaaggctggtttaacgcccatctttgaggctcagctctccctggcaattcctgagttggtcttctaccctagtcttgagtctggcgtgaagggtgggttctgcgatatcgtcgaagggctcatcacttctatttttagaatcccctcattggtgccgagactcagcccccagaatggctccccacactaccaggtggatctcgatggcatcccagacctggccaatatgcggagaactctgatggagcgagtccagcgcatgatggggctgtgctgcggttaccaatcaacattcagccagtattcttatctctatgtggaggaccggaaagaagtactggggcagtttttgctctacggccacatcctgacccccgaagaaatcgaggatcacgttgaggacggcattcctgagaatccacccttactttcccagtttaaggtgcaaatcgactcctatgaaactttgtacgaggaggtgtgccgcctggagcctattaaggtgttcgacggttggatgaaaatcgacatcaggcccttcaaagcctctctcctgaacattattaaacgctggtctctgttgttcaaacagcatctcgtcgaccacgtaacacacagcctcgccaaccttgacgctttcattaagaaaagcgagagcgggttgctgaagaaggtggagaaaggcgactttcagggattggtggagatcatgggtcacctgatggcagtgaaggagcgtcagtccaatacggatgagatgtttgaacccctcaaacagacaatcgagctcctgaaaacatacgaacaagagttgccggaaaccgtgttcaagcagttggaagagctgccagagaaatggaataacatcaagaaggtagccattactgtgaaacagcaggttgcaccgctgcaagctaacgaggtcacactgctgcgtcagaggtgtactgcctttgacgctgaacagcagcaattttgggagcaattccacaaggaggcacctttcaggtttgacagcatacaccctcatcaaatgctggatgcacggcatattgaaattcagcagatggagagcactatggcctcaataagcgaaagtgcatctctgtttgaagtaaacgtccccgattataagcagctgcgacagtgccggaaagaagtgtgtcagctgaaggagttgtgggacaccattggcatggtgacttcaagcatccacgcgtgggaaaccacgccttggcgcaacattaacgtggaagctatggagctcgaatgtaagcagtttgctagacatatccgcaacctggacaaagaggtgcgggcttgggacgcattcaccggcctcgagtctaccgtgtggaacacattatcaagcttaagggccgttgccgagctacaaaaccccgcaatccgggaaaggcactggagacaattgatgcaagctactggggtgagcttcaccatggaccaagacacaaccctggcgcatttactccagcttcagctgcatcactacgaggatgaagtaaggggaatcgtggataaagccgctaaagagatggggatggagaagactcttaaggagctgcagactacttgggcagggatggaattccaatatgaacctcacccacgcacgaatgtgcctctgttgtgttcagacgaggatctgatcgaagttctggaggacaatcaagtccagcttcaaaatctagtaatgagtaagtacgtggcctttttccttgaggaagtcagtgggtggcagaagaagctgagtactgtggacgccgttatctctatctggtttgaggtccagagaacgtggacccatctcgagtcaatttttaccgggagtgaggatattcgagcacagttaccacaagacagcaagcgattcgaagggatagacatagacttcaaggagctggcctatgatgcacaaaaaattccaaacgtggtgcagacaactaataagcccggactctatgaaaaactggaggatattcaaggtcgcttatgtttgtgtgaaaaagctctcgccgaatatttggatactaaaagattagcctttccccgattttacttcctctcctctagcgacctgctggacattctgagcaatgggactgctccccagcaagtacagaggcatctgtcaaagctgttcgacaacatggctaagatgaggtttcagctagatgctagcggcgagcccactaaaacctcactgggtatgtacagcaaggaggaggagtacgtggctttctcagagccctgtgactgttccggacaagtggagatctggcttaaccacgtgcttggtcacatgaaggccaccgtccgtcacgagatgaccgagggtgtgacagcctacgaggaaaaaccaagggagcagtggctatttgatcatcccgctcaagtggccttgacctgtactcagatctggtggacaacagaagtgggaatggcatttgccaggctcgaagagggctacgagtcagctatgaaagattattacaaaaaacaggtggcccaactgaaaactctcattactatgctcattggacagctctccaaaggcgatcgccagaaaatcatgacaatctgtacaatagatgtccatgcacgcgacgtggtggccaaaatgatcgcacaaaaagtagacaacgcccaagcttttctttggctgagccagctgcgacatcgatgggatgacgaggtaaaacactgttttgccaatatttgtgatgcccagttcctttattcgtacgagtatctcggtaacactcccagactagtgataacaccactgaccgatcggtgctatattactctgacacagtctttgcacctgactatgtcgggcgctccagccggaccagcagggaccggtaaaacggagactaccaaagatcttgggcgagcccttggaatcctggtctacgtattcaactgcagcgaacagatggattataagagctgcggaaacatctacaagggcctggcccaaaccggggcttggggttgttttgacgagttcaaccggatatcggtcgaggtattgagcgttgttgctgtgcaggtcaaatcgatccaagatgcaattagggataaaaagcagtggttttctttcctgggggaggagatttccttgaacccatcagtgggcatatttataaccatgaatcctggatacgccggtcggaccgaactcccagaaaatcttaagagcctgttcagaccctgcgccatggtggtccctgattttgagcttatctgtgaaatcatgctagttgcagagggattcatcgaggcccaaagcttggcccgaaagttcatcacactgtaccagctgtgtaaagaactcctatccaagcaggatcattacgattggggccttcgcgcaataaaaagcgtcctagtggttgccggaagcctgaaaagaggagaccctgatagacccgaagatcaggtcttgatgagatctttacgcgattttaatatccccaagatcgtaacagatgatatgcctatttttatggggctgatcggcgacctgtttccagccctggatgtgcctcgccgacgcgatcccaactttgaggccctggtcaggaaagcaattgtcgatttgaaactgcaagctgaagacaattttgtgctaaaagttgttcagcttgaggagctgctggccgtccgccactccgtattcgtcgtggggggagccggaaccggcaaatcgcaagtgctacgtagcctgcataaaacttaccagattatgaagcgacggccagtgtggaccgacctaaatccaaaagcagttacaaatgacgaactattcgggatcataaatcccgctactggagaatggaaggatgggttattttccagcattatgcgcgagctggctaatattactcatgacgggcctaagtggattctgctcgatggggatatagaccctatgtggatcgaaagcttaaatacagtcatggatgataacaaggtgctcactctcgcaagcaacgagcgcattccccttaatccaactatgaaactcctgttcgagatttcccatctccggacggctaccccagctactgtttccagagccggtattctgtacataaatccggctgaccttgggtggaacccccctgtctcatcttggattgaaaagcgagaaattcagacagaacgggcaaatctcaccatcctgttcgataaatatcttccgacgtgtctggatacgctccgaacacgatttaagaagatcatccctatccccgagcaaagcatggtgcaaatggtatgccacctgctggagtgtctgctcaccaccgaggatatccctgctgactgtccaaaggaaatatacgagcactacttcgtgtttgccgctatttgggccttcggtggtgctatggtccaggaccaattagtcgactatagagcagagttttcaaagtggtggctgacggaatttaagacggtgaagtttccttcccaaggcaccattttcgactactacatagatccagagacaaagaaatttgagccatggagtaaactagtgccacagttcgaatttgatccagagatgcccctccaagcttgcttggtacacacttcagagaccatcagggtgtgctatttcatggaacggctcatggctcgccagagacccgtaatgcttgtggggacggcaggaactggtaaaagtgtgctcgtcggcgctaagctggcgagtctggatcctgaggcttatcttgtcaaaaatgtgccatttaactactacacaacatctgccatgttacaagcagtgctagaaaagccactggaaaaaaaagcgggaagaaattatggccctccaggaaataagaagctgatctacttcattgacgatatgaacatgccagaggtcgacgcttacggcaccgtacagcctcacaccattatccggcagcatctggattatggacactggtacgatcgctcgaagttaagcctcaaggagatcactaacgtccaatacgtgtcctgcatgaatcctacagctgggagcttcactattaaccccagactgcaaaggcacttttcagtgttcgtactctctttccctggcgctgatgcgctttcctcgatttactcaataattctgacccagcacctgaagttggggaacttccccgcatcgttacagaagtctattcctcccttaatcgatcttgccctggcgtttcaccagaagattgccaccactttcttgccgacaggaatcaaattccactatatctttaacctcagagattttgctaacatttttcaaggaatcttgttctcttccgtcgagtgtgttaagtcgacctgggacttaatccggttgtatcttcatgagtccaaccgggtgtaccgggacaaaatggttgaggagaaggattttgacctgttcgacaagattcagaccgaggtactgaagaagaccttcgatgacattgaggatcctgtggaacagacacagagccctaatctgtactgccattttgctaacggaatcggtgagcccaagtacatgcccgtgcagtcctgggaactgcttacccagactctcgtggaagctttggaaaatcacaacgaggtgaacacagtcatggatttagtattgtttgaggacgccatgaggcacgtgtgccacatcaatcgaatcctcgagagtccgagaggcaatgcactgttagtgggggttggcggttctgggaaacagagcctgacccgactagccgcttttatttcttcaatggatgtcttccagattacattacgaaaaggttatcagatccaggatttcaagatggacctcgcctctttgtgtctgaaagccggagtgaagaatctgaataccgtctttttaatgactgatgcacaggttgctgacgaaagatttctggtcttaatcaacgatctgttagcaagcggagaaatcccagacctgtatagcgacgatgaagtagagaatataatctccaatgtgaggaacgaggtcaagagtcaggggctggtggataaccgggaaaactgctggaagtttttcatagatagaatccgtagacagctaaaggtgaccctttgttttagccctgtaggaaacaagctccgagtgcgaagccggaagttccctgccatcgtgaattgtaccgcaatccattggtttcacgagtggccccagcaggcccttgagagtgtatcactcagattccttcagaatacagagggaatcgaacccacagtgaagcagagtatcagcaagttcatggccttcgtccacacttccgtgaaccagacttcccagtcgtacctgtctaatgagcagcgctataattatacaactcctaagtcctttttagaattcatccggctttatcagtctctgctgcacagacatcggaaagaattgaagtgcaaaaccgagcggttagagaatggtttgttgaaactgcacagtaccagcgcccaggtcgatgacctcaaagcgaagttagctgcgcaggaagtcgagcttaaacaaaagaacgaggacgccgataagctcatccaggtagtcggcgttgagacagacaaagtcagtcgggaaaaggcaatggcagacgaggaagaacaaaaagtggcagtgattatgctcgaggttaagcagaagcaaaaggactgcgaagaggacctagcgaaagccgaacctgccctcaccgcggcacaggctgcgttgaataccctgaacaaaaccaacctcaccgagcttaaatcctttgggagtcccccattagctgtttccaacgtcagtgccgcagtgatggtactcatggccccaaggggtcgcgtccctaaggacagaagctggaaagcagccaaggttactatggccaaagtcgacggcttcctggattctctgatcaacttcaacaaggaaaacattcatgaaaattgcctgaaggcgatcagaccctatctccaagatcctgagtttaatccagaattcgtggccacaaaatcctacgcagctgctgggttgtgttcctgggtgattaatatcgttaggttttatgaggtgttctgtgacgtggaacctaaacggcaggccttgaataaggcaaccgctgacttgacagctgcccaggagaaactggcagccattaaggccaaaatagcacatctgaacgagaatttagctaaattgaccgctagatttgaaaaagcaacggcagacaaactgaaatgtcagcaggaggccgaggtcactgccgtcacgattagcttggcaaatagactcgtaggcggactcgctagtgaaaatgtaaggtgggccgatgctgtgcagaatttcaagcaacaagaacgcactctgtgcggagacatcctgctgatcaccgcctttataagctatctggggttctttacaaagaagtacaggcagtccctgctggataggacttggcggccttatctgtctcagctgaaaacccccatcccagtgacccctgctttggacccactgagaatgctcatggacgacgctgacgtcgccgcatggcagaatgaaggacttcctgcagatagaatgtcggtcgaaaacgcaacgatcctgatcaattgcgaaaggtggcctctcatggtcgatccccagttacagggcatcaaatggataaagaacaagtatggagaggatttaagggttacgcaaatcgggcagaaaggatacttacagattatagaacaggcccttgaggcaggggctgtggtgcttatcgagaacctggaagagagcatcgaccccgtgctgggtccactgttgggtcgggaggtgatcaaaaaggggagatttattaagatcggcgacaaggagtgcgaatacaacccaaagtttcgactgatcttacacactaagctggccaacccccattatcagccagagcttcaggctcaagctaccctgatcaattttaccgtaacgcgtgacgggctggaggatcagttactagctgccgttgtgagcatggaacggcctgatctggagcagctgaagtccgatctcactaagcagcaaaacggcttcaaaatcacactcaagaccctggaggattcactcctttcacgtctcagtagcgccagtggcaatttccttggagagactgtgctggtcgagaaccttgagatcaccaaacagacagctgcagaggtcgaaaaaaaggtgcaagaggccaaagttaccgaggtgaaaatcaatgaagctcgggagcattatcggccagctgctgctcgcgctagcttgttgtacttcattatgaacgacctgtctaaaatccacccaatgtatcaattcagcctcaaggctttcagcatcgtgtttcagaaggcagtcgagcgagctgccccagatgaatcattgcgagagagagtcgccaatctcatagacagcattacatttagtgtgtatcagtatacgatcagagggctgttcgagtgcgacaaactgacttaccttgcccagctcacattccagatcttactcatgaatagggaggtgaacgcagtcgaactcgatttcttgctgagatcgcctgtgcagaccgggacggcttcacctgtggagttcctaagccaccaggcctggggagcggttaaggtgctatcgtccatggaggaattttcgaacttagatagggatatcgaaggctctgccaaatcatggaaaaagttcgttgagagcgagtgccccgagaaagagaaattgccacaagagtggaagaacaaaacagctctccagcgattgtgcatgctgagggccatgaggcccgacagaatgacctacgcgctcagagactttgtcgaggaaaagctgggaagcaagtacgtggtaggacgcgcactggattttgctacttcttttgaggagagtggccctgcaacacctatgttttttatattgtctccaggtgttgacccattaaaagacgtggagtctcaaggaagaaaactgggatacactttcaacaatcagaatttccacaacgtgagcctggggcaaggacaggaagtggtggctgaggccgctctggatctggccgcaaagaaaggacattgggtgatcctgcaggatactctggagatgtgcagccgtgagacggaattcaaaagtatccttttcgcattatgctatttccatgcagtggtcgcagagcgtaggaaattcggccctcaagggtggaacagatcctatcccttcaacacgggggaccttacaattagtgtgaatgtgctgtacaactttctggaggcaaacgctaaggtcccctatgatgatctgcgttacctctttggagagattatgtacggagggcacattaccgatgattgggacagaagactgtgtcgcacatatctgggcgaatttattaggcccgaaatgctggagggggaactatccttggctccagggttcccattgcccggaaacatggattacaatgggtatcaccagtatattgacgccgaactgcctcccgagagcccctatctatacgggctgcacccaaatgctgaaattgggttcctcacccagacctccgagaaacttttccgcactgtactggaacttcagccacgggattcccaggctagggatggtgcaggggctactagagaggagaaggtgaaggcattattagaggagatccttgagagagtgacagatgaattcaatatcccagagctgatggctaaagtggaagaacggaccccgtatatagtggtcgccttccaagaatgcggacgaatgaacattctcaccagagagatccaacgtagtctgagagaacttgagctaggacttaagggcgaattgacgatgacatcgcacatggaaaatctccagaacgctttgtatttcgatatggtgcccgaaagttgggcaagaagagcatacccttccactgccggtcttgccgcatggtttcctgacctcctgaacaggattaaggagcttgaggcctggactggtgactttactatgccaagcacggtatggttgactggcttttttaacccgcaaagctttctgacggccattatgcaatccactgcccgaaaaaacgagtggcccctcgaccagatggcactgcagtgtgatatgacaaagaaaaatagggaagagttcaggtcaccacctcgggagggcgcatatatacacggccttttcatggaaggtgcttgctgggatacacaagccggtattatcaccgaggcaaagcttaaggatctgacccccccaatgcccgttatgttcataaaagctattccagctgataaacaggactgcagatctgtgtatagctgtccggtctacaagacatctcaacgcggaccaacctacgtctggacttttaaccttaaaaccaaggagaatccctccaagtgggtcctggccggagttgctctcctgcttcagatttaa

SEQ ID NO: 117328 - DNA, 13461 bp, Artificial Sequence
  derived and/or modified sequence
atgagactggccgaggagagagccgccctggccgccgagaacgccgacggcgagcccggcgccgacagaagactgagactgctgggcacctacgtggccatgagcctgagacccgccgccggcgcctgggagagatgcgccggcagcgccgaggccgagcagctgctgcaggccttcctgggcagagacgccgccgagggccccagacccctgctggtggtgagacccggccccagaggcctggccatcagacccggcctggaggtgggccccgagagcggcctggccggcgccaaggccctgttcttcctgagaaccggccccgagccccccggccccgacagcttcagaggcgccgtggtgtgcggcgacctgcccgccgcccccctggagcacctggccgccctgttcagcgaggtggtgctgcccgtgctggccaacgagaagaacagactgaactggccccacatgatctgcgaggacgtgagaagacacgcccacagcctgcagtgcgacctgagcgtgatcctggagcaggtgaagggcaagaccctgctgcccctgcccgccggcagcgagaagatggagttcgccgacagcaagagcgagaccgtgctggacagcatcgacaagagcgtgatctacgccatcgagagcgccgtgatcaagtggagctaccaggtgcaggtggtgctgaagagagagagcagccagcccctgctgcagggcgagaaccccacccccaaggtggagctggagttctggaagagcagatacgaggacctgaagtacatctacaaccagctgagaaccatcaccgtgagaggcatggccaagctgctggacaagctgcagagcagctacttccccgccttcaaggccatgtacagagacgtggtggccgccctggccgaggcccaggacatccacgtgcacctgatccccctgcagagacacctggaggccctggagaacgccgagttccccgaggtgaagccccagctgagacccctgctgcacgtggtgtgcctgatctgggccacctgcaagagctacagaagccccggcagactgaccgtgctgctgcaggagatctgcaacctgctgatccagcaggccagcaactacctgagccccgaggacctgctgagaagcgaggtggaggagagccagagaaagctgcaggtggtgagcgacaccctgagcttcttcaagcaggagttccaggacagaagagagaacctgcacacctacttcaaggagaaccaggaggtgaaggagtgggacttccagagcagcctggtgttcgtgagactggacggcttcctgggccagctgcacgtggtggagggcctgctgaagaccgccctggacttccacaagctgggcaaggtggagttcagcggcgtgagaggcaacgccctgagccagcaggtgcagcagatgcacgaggagttccaggagatgtacagactgctgagcggcagcagcagcgactgcctgtacctgcagagcaccgacttcgagaacgacgtgagcgagttcaaccagaaggtggaggacctggacagaagactgggcaccatcttcatccaggccttcgacgacgcccccggcctggagcacgccttcaagctgctggacatcgccggcaacctgctggagagacccctggtggccagagacaccagcgacaagtacctggtgctgatccagatgttcaacaaggacctggacgccgtgagaatgatctacagccagcacgtgcaggaggaggccgagctgggcttcagccccgtgcacaagaacatgcccaccgtggccggcggcctgagatgggcccaggagctgagacagagaatccagggccccttcagcaacttcggcagaatcacccacccctgcatggagagcgccgagggcaagagaatgcagcagaagtacgaggacatgctgagcctgctggagaagtacgagaccagactgtacgaggactggtgcagaaccgtgagcgagaagagccagtacaacctgagccagcccctgctgaagagagaccccgagaccaaggagatcaccatcaacttcaacccccagctgatcagcgtgctgaaggagatgagctacctggagcccagagagatgaagcacatgcccgagaccgccgccgccatgttcagcagcagagacttctacagacagctggtggccaacctggagctgatggccaactggtacaacaaggtgatgaagaccctgctggaggtggagttccccctggtggaggaggagctgcagaacatcgacctgagactgagagccgccgaggagaccctgaactggaagaccgagggcatctgcgactacgtgaccgagatcaccagcagcatccacgacctggagcagagaatccagaagaccaaggacaacgtggaggagatccagaacatcatgaagacctgggtgacccccatcttcaagaccaaggacggcaagagagagagcctgctgagcctggacgacagacacgacagaatggagaagtactacaacctgatcaaggagagcggcctgaagatccacgccctggtgcaggagaacctgggcctgttcagcgccgaccccaccagcaacatctggaagacctacgtgaacagcatcgacaacctgctgctgaacggcttcttcctggccatcgagtgcagcctgaagtacctgctggagaacaccgagtgcaaggccggcctgacccccatcttcgaggcccagctgagcctggccatccccgagctggtgttctaccccagcctggagagcggcgtgaagggcggcttctgcgacatcgtggagggcctgatcaccagcatcttcagaatccccagcctggtgcccagactgagcccccagaacggcagcccccactaccaggtggacctggacggcatccccgacctggccaacatgagaagaaccctgatggagagagtgcagagaatgatgggcctgtgctgcggctaccagagcaccttcagccagtacagctacctgtacgtggaggacagaaaggaggtgctgggccagttcctgctgtacggccacatcctgacccccgaggagatcgaggaccacgtggaggacggcatccccgagaacccccccctgctgagccagttcaaggtgcagatcgacagctacgagaccctgtacgaggaggtgtgcagactggagcccatcaaggtgttcgacggctggatgaagatcgacatcagacccttcaaggccagcctgctgaacatcatcaagagatggagcctgctgttcaagcagcacctggtggaccacgtgacccacagcctggccaacctggacgccttcatcaagaagagcgagagcggcctgctgaagaaggtggagaagggcgacttccagggcctggtggagatcatgggccacctgatggccgtgaaggagagacagagcaacaccgacgagatgttcgagcccctgaagcagaccatcgagctgctgaagacctacgagcaggagctgcccgagaccgtgttcaagcagctggaggagctgcccgagaagtggaacaacatcaagaaggtggccatcaccgtgaagcagcaggtggcccccctgcaggccaacgaggtgaccctgctgagacagagatgcaccgccttcgacgccgagcagcagcagttctgggagcagttccacaaggaggcccccttcagattcgacagcatccacccccaccagatgctggacgccagacacatcgagatccagcagatggagagcaccatggccagcatcagcgagagcgccagcctgttcgaggtgaacgtgcccgactacaagcagctgagacagtgcagaaaggaggtgtgccagctgaaggagctgtgggacaccatcggcatggtgaccagcagcatccacgcctgggagaccaccccctggagaaacatcaacgtggaggccatggagctggagtgcaagcagttcgccagacacatcagaaacctggacaaggaggtgagagcctgggacgccttcaccggcctggagagcaccgtgtggaacaccctgagcagcctgagagccgtggccgagctgcagaaccccgccatcagagagagacactggagacagctgatgcaggccaccggcgtgagcttcaccatggaccaggacaccaccctggcccacctgctgcagctgcagctgcaccactacgaggacgaggtgagaggcatcgtggacaaggccgccaaggagatgggcatggagaagaccctgaaggagctgcagaccacctgggccggcatggagttccagtacgagccccaccccagaaccaacgtgcccctgctgtgcagcgacgaggacctgatcgaggtgctggaggacaaccaggtgcagctgcagaacctggtgatgagcaagtacgtggccttcttcctggaggaggtgagcggctggcagaagaagctgagcaccgtggacgccgtgatcagcatctggttcgaggtgcagagaacctggacccacctggagagcatcttcaccggcagcgaggacatcagagcccagctgccccaggacagcaagagattcgagggcatcgacatcgacttcaaggagctggcctacgacgcccagaagatccccaacgtggtgcagaccaccaacaagcccggcctgtacgagaagctggaggacatccagggcagactgtgcctgtgcgagaaggccctggccgagtacctggacaccaagagactggccttccccagattctacttcctgagcagcagcgacctgctggacatcctgagcaacggcaccgccccccagcaggtgcagagacacctgagcaagctgttcgacaacatggccaagatgagattccagctggacgccagcggcgagcccaccaagaccagcctgggcatgtacagcaaggaggaggagtacgtggccttcagcgagccctgcgactgcagcggccaggtggagatctggctgaaccacgtgctgggccacatgaaggccaccgtgagacacgagatgaccgagggcgtgaccgcctacgaggagaagcccagagagcagtggctgttcgaccaccccgcccaggtggccctgacctgcacccagatctggtggaccaccgaggtgggcatggccttcgccagactggaggagggctacgagagcgccatgaaggactactacaagaagcaggtggcccagctgaagaccctgatcaccatgctgatcggccagctgagcaagggcgacagacagaagatcatgaccatctgcaccatcgacgtgcacgccagagacgtggtggccaagatgatcgcccagaaggtggacaacgcccaggccttcctgtggctgagccagctgagacacagatgggacgacgaggtgaagcactgcttcgccaacatctgcgacgcccagttcctgtacagctacgagtacctgggcaacacccccagactggtgatcacccccctgaccgacagatgctacatcaccctgacccagagcctgcacctgaccatgagcggcgcccccgccggccccgccggcaccggcaagaccgagaccaccaaggacctgggcagagccctgggcatcctggtgtacgtgttcaactgcagcgagcagatggactacaagagctgcggcaacatctacaagggcctggcccagaccggcgcctggggctgcttcgacgagttcaacagaatcagcgtggaggtgctgagcgtggtggccgtgcaggtgaagagcatccaggacgccatcagagacaagaagcagtggttcagcttcctgggcgaggagatcagcctgaaccccagcgtgggcatcttcatcaccatgaaccccggctacgccggcagaaccgagctgcccgagaacctgaagagcctgttcagaccctgcgccatggtggtgcccgacttcgagctgatctgcgagatcatgctggtggccgagggcttcatcgaggcccagagcctggccagaaagttcatcaccctgtaccagctgtgcaaggagctgctgagcaagcaggaccactacgactggggcctgagagccatcaagagcgtgctggtggtggccggcagcctgaagagaggcgaccccgacagacccgaggaccaggtgctgatgagaagcctgagagacttcaacatccccaagatcgtgaccgacgacatgcccatcttcatgggcctgatcggcgacctgttccccgccctggacgtgcccagaagaagagaccccaacttcgaggccctggtgagaaaggccatcgtggacctgaagctgcaggccgaggacaacttcgtgctgaaggtggtgcagctggaggagctgctggccgtgagacacagcgtgttcgtggtgggcggcgccggcaccggcaagagccaggtgctgagaagcctgcacaagacctaccagatcatgaagagaagacccgtgtggaccgacctgaaccccaaggccgtgaccaacgacgagctgttcggcatcatcaaccccgccaccggcgagtggaaggacggcctgttcagcagcatcatgagagagctggccaacatcacccacgacggccccaagtggatcctgctggacggcgacatcgaccccatgtggatcgagagcctgaacaccgtgatggacgacaacaaggtgctgaccctggccagcaacgagagaatccccctgaaccccaccatgaagctgctgttcgagatcagccacctgagaaccgccacccccgccaccgtgagcagagccggcatcctgtacatcaaccccgccgacctgggctggaacccccccgtgagcagctggatcgagaagagagagatccagaccgagagagccaacctgaccatcctgttcgacaagtacctgcccacctgcctggacaccctgagaaccagattcaagaagatcatccccatccccgagcagagcatggtgcagatggtgtgccacctgctggagtgcctgctgaccaccgaggacatccccgccgactgccccaaggagatctacgagcactacttcgtgttcgccgccatctgggccttcggcggcgccatggtgcaggaccagctggtggactacagagccgagttcagcaagtggtggctgaccgagttcaagaccgtgaagttccccagccagggcaccatcttcgactactacatcgaccccgagaccaagaagttcgagccctggagcaagctggtgccccagttcgagttcgaccccgagatgcccctgcaggcctgcctggtgcacaccagcgagaccatcagagtgtgctacttcatggagagactgatggccagacagagacccgtgatgctggtgggcaccgccggcaccggcaagagcgtgctggtgggcgccaagctggccagcctggaccccgaggcctacctggtgaagaacgtgcccttcaactactacaccaccagcgccatgctgcaggccgtgctggagaagcccctggagaagaaggccggcagaaactacggcccccccggcaacaagaagctgatctacttcatcgacgacatgaacatgcccgaggtggacgcctacggcaccgtgcagccccacaccatcatcagacagcacctggactacggccactggtacgacagaagcaagctgagcctgaaggagatcaccaacgtgcagtacgtgagctgcatgaaccccaccgccggcagcttcaccatcaaccccagactgcagagacacttcagcgtgttcgtgctgagcttccccggcgccgacgccctgagcagcatctacagcatcatcctgacccagcacctgaagctgggcaacttccccgccagcctgcagaagagcatcccccccctgatcgacctggccctggccttccaccagaagatcgccaccaccttcctgcccaccggcatcaagttccactacatcttcaacctgagagacttcgccaacatcttccagggcatcctgttcagcagcgtggagtgcgtgaagagcacctgggacctgatcagactgtacctgcacgagagcaacagagtgtacagagacaagatggtggaggagaaggacttcgacctgttcgacaagatccagaccgaggtgctgaagaagaccttcgacgacatcgaggaccccgtggagcagacccagagccccaacctgtactgccacttcgccaacggcatcggcgagcccaagtacatgcccgtgcagagctgggagctgctgacccagaccctggtggaggccctggagaaccacaacgaggtgaacaccgtgatggacctggtgctgttcgaggacgccatgagacacgtgtgccacatcaacagaatcctggagagccccagaggcaacgccctgctggtgggcgtgggcggcagcggcaagcagagcctgaccagactggccgccttcatcagcagcatggacgtgttccagatcaccctgagaaagggctaccagatccaggacttcaagatggacctggccagcctgtgcctgaaggccggcgtgaagaacctgaacaccgtgttcctgatgaccgacgcccaggtggccgacgagagattcctggtgctgatcaacgacctgctggccagcggcgagatccccgacctgtacagcgacgacgaggtggagaacatcatcagcaacgtgagaaacgaggtgaagagccagggcctggtggacaacagagagaactgctggaagttcttcatcgacagaatcagaagacagctgaaggtgaccctgtgcttcagccccgtgggcaacaagctgagagtgagaagcagaaagttccccgccatcgtgaactgcaccgccatccactggttccacgagtggccccagcaggccctggagagcgtgagcctgagattcctgcagaacaccgagggcatcgagcccaccgtgaagcagagcatcagcaagttcatggccttcgtgcacaccagcgtgaaccagaccagccagagctacctgagcaacgagcagagatacaactacaccacccccaagagcttcctggagttcatcagactgtaccagagcctgctgcacagacacagaaaggagctgaagtgcaagaccgagagactggagaacggcctgctgaagctgcacagcaccagcgcccaggtggacgacctgaaggccaagctggccgcccaggaggtggagctgaagcagaagaacgaggacgccgacaagctgatccaggtggtgggcgtggagaccgacaaggtgagcagagagaaggccatggccgacgaggaggagcagaaggtggccgtgatcatgctggaggtgaagcagaagcagaaggactgcgaggaggacctggccaaggccgagcccgccctgaccgccgcccaggccgccctgaacaccctgaacaagaccaacctgaccgagctgaagagcttcggcagcccccccctggccgtgagcaacgtgagcgccgccgtgatggtgctgatggcccccagaggcagagtgcccaaggacagaagctggaaggccgccaaggtgaccatggccaaggtggacggcttcctggacagcctgatcaacttcaacaaggagaacatccacgagaactgcctgaaggccatcagaccctacctgcaggaccccgagttcaaccccgagttcgtggccaccaagagctacgccgccgccggcctgtgcagctgggtgatcaacatcgtgagattctacgaggtgttctgcgacgtggagcccaagagacaggccctgaacaaggccaccgccgacctgaccgccgcccaggagaagctggccgccatcaaggccaagatcgcccacctgaacgagaacctggccaagctgaccgccagattcgagaaggccaccgccgacaagctgaagtgccagcaggaggccgaggtgaccgccgtgaccatcagcctggccaacagactggtgggcggcctggccagcgagaacgtgagatgggccgacgccgtgcagaacttcaagcagcaggagagaaccctgtgcggcgacatcctgctgatcaccgccttcatcagctacctgggcttcttcaccaagaagtacagacagagcctgctggacagaacctggagaccctacctgagccagctgaagacccccatccccgtgacccccgccctggaccccctgagaatgctgatggacgacgccgacgtggccgcctggcagaacgagggcctgcccgccgacagaatgagcgtggagaacgccaccatcctgatcaactgcgagagatggcccctgatggtggacccccagctgcagggcatcaagtggatcaagaacaagtacggcgaggacctgagagtgacccagatcggccagaagggctacctgcagatcatcgagcaggccctggaggccggcgccgtggtgctgatcgagaacctggaggagagcatcgaccccgtgctgggccccctgctgggcagagaggtgatcaagaagggcagattcatcaagatcggcgacaaggagtgcgagtacaaccccaagttcagactgatcctgcacaccaagctggccaacccccactaccagcccgagctgcaggcccaggccaccctgatcaacttcaccgtgaccagagacggcctggaggaccagctgctggccgccgtggtgagcatggagagacccgacctggagcagctgaagagcgacctgaccaagcagcagaacggcttcaagatcaccctgaagaccctggaggacagcctgctgagcagactgagcagcgccagcggcaacttcctgggcgagaccgtgctggtggagaacctggagatcaccaagcagaccgccgccgaggtggagaagaaggtgcaggaggccaaggtgaccgaggtgaagatcaacgaggccagagagcactacagacccgccgccgccagagccagcctgctgtacttcatcatgaacgacctgagcaagatccaccccatgtaccagttcagcctgaaggccttcagcatcgtgttccagaaggccgtggagagagccgcccccgacgagagcctgagagagagagtggccaacctgatcgacagcatcaccttcagcgtgtaccagtacaccatcagaggcctgttcgagtgcgacaagctgacctacctggcccagctgaccttccagatcctgctgatgaacagagaggtgaacgccgtggagctggacttcctgctgagaagccccgtgcagaccggcaccgccagccccgtggagttcctgagccaccaggcctggggcgccgtgaaggtgctgagcagcatggaggagttcagcaacctggacagagacatcgagggcagcgccaagagctggaagaagttcgtggagagcgagtgccccgagaaggagaagctgccccaggagtggaagaacaagaccgccctgcagagactgtgcatgctgagagccatgagacccgacagaatgacctacgccctgagagacttcgtggaggagaagctgggcagcaagtacgtggtgggcagagccctggacttcgccaccagcttcgaggagagcggccccgccacccccatgttcttcatcctgagccccggcgtggaccccctgaaggacgtggagagccagggcagaaagctgggctacaccttcaacaaccagaacttccacaacgtgagcctgggccagggccaggaggtggtggccgaggccgccctggacctggccgccaagaagggccactgggtgatcctgcagaacatccacctggtggccaagtggctgagcaccctggagaagaagctggaggagcacagcgagaacagccaccccgagttcagagtgttcatgagcgccgagcccgcccccagccccgagggccacatcatcccccagggcatcctggagaacagcatcaagatcaccaacgagccccccaccggcatgcacgccaacctgcacaaggccctggacaacttcacccaggacaccctggagatgtgcagcagagagaccgagttcaagagcatcctgttcgccctgtgctacttccacgccgtggtggccgagagaagaaagttcggcccccagggctggaacagaagctaccccttcaacaccggcgacctgaccatcagcgtgaacgtgctgtacaacttcctggaggccaacgccaaggtgccctacgacgacctgagatacctgttcggcgagatcatgtacggcggccacatcaccgacgactgggacagaagactgtgcagaacctacctgggcgagttcatcagacccgagatgctggagggcgagctgagcctggcccccggcttccccctgcccggcaacatggactacaacggctaccaccagtacatcgacgccgagctgccccccgagagcccctacctgtacggcctgcaccccaacgccgagatcggcttcctgacccagaccagcgagaagctgttcagaaccgtgctggagctgcagcccagagacagccaggccagagacggcgccggcgccaccagagaggagaaggtgaaggccctgctggaggagatcctggagagagtgaccgacgagttcaacatccccgagctgatggccaaggtggaggagagaaccccctacatcgtggtggccttccaggagtgcggcagaatgaacatcctgaccagagagatccagagaagcctgagagagctggagctgggcctgaagggcgagctgaccatgaccagccacatggagaacctgcagaacgccctgtacttcgacatggtgcccgagagctgggccagaagagcctaccccagcaccgccggcctggccgcctggttccccgacctgctgaacagaatcaaggagctggaggcctggaccggcgacttcaccatgcccagcaccgtgtggctgaccggcttcttcaacccccagagcttcctgaccgccatcatgcagagcaccgccagaaagaacgagtggcccctggaccagatggccctgcagtgcgacatgaccaagaagaacagagaggagttcagaagcccccccagagagggcgcctacatccacggcctgttcatggagggcgcctgctgggacacccaggccggcatcatcaccgaggccaagctgaaggacctgaccccccccatgcccgtgatgttcatcaaggccatccccgccgacaagcaggactgcagaagcgtgtacagctgccccgtgtacaagaccagccagagaggccccacctacgtgtggaccttcaacctgaagaccaaggagaaccccagcaagtgggtgctggccggcgtggccctgctgctgcagatctag

SEQ ID NO: 117329 - DNA, 2397 bp, Artificial Sequence
  derived and/or modified sequence
atgaacgacctgagcaagatccaccccatgtaccagttcagcctgaaggccttcagcatcgtgttccagaaggccgtggagagagccgcccccgacgagagcctgagagagagagtggccaacctgatcgacagcatcaccttcagcgtgtaccagtacaccatcagaggcctgttcgagtgcgacaagctgacctacctggcccagctgaccttccagatcctgctgatgaacagagaggtgaacgccgtggagctggacttcctgctgagaagccccgtgcagaccggcaccgccagccccgtggagttcctgagccaccaggcctggggcgccgtgaaggtgctgagcagcatggaggagttcagcaacctggacagagacatcgagggcagcgccaagagctggaagaagttcgtggagagcgagtgccccgagaaggagaagctgccccaggagtggaagaacaagaccgccctgcagagactgtgcatgctgagagccatgagacccgacagaatgacctacgccctgagagacttcgtggaggagaagctgggcagcaagtacgtggtgggcagagccctggacttcgccaccagcttcgaggagagcggccccgccacccccatgttcttcatcctgagccccggcgtggaccccctgaaggacgtggagagccagggcagaaagctgggctacaccttcaacaaccagaacttccacaacgtgagcctgggccagggccaggaggtggtggccgaggccgccctggacctggccgccaagaagggccactgggtgatcctgcagaacatccacctggtggccaagtggctgagcaccctggagaagaagctggaggagcacagcgagaacagccaccccgagttcagagtgttcatgagcgccgagcccgcccccagccccgagggccacatcatcccccagggcatcctggagaacagcatcaagatcaccaacgagccccccaccggcatgcacgccaacctgcacaaggccctggacaacttcacccaggacaccctggagatgtgcagcagagagaccgagttcaagagcatcctgttcgccctgtgctacttccacgccgtggtggccgagagaagaaagttcggcccccagggctggaacagaagctaccccttcaacaccggcgacctgaccatcagcgtgaacgtgctgtacaacttcctggaggccaacgccaaggtgccctacgacgacctgagatacctgttcggcgagatcatgtacggcggccacatcaccgacgactgggacagaagactgtgcagaacctacctgggcgagttcatcagacccgagatgctggagggcgagctgagcctggcccccggcttccccctgcccggcaacatggactacaacggctaccaccagtacatcgacgccgagctgccccccgagagcccctacctgtacggcctgcaccccaacgccgagatcggcttcctgacccagaccagcgagaagctgttcagaaccgtgctggagctgcagcccagagacagccaggccagagacggcgccggcgccaccagagaggagaaggtgaaggccctgctggaggagatcctggagagagtgaccgacgagttcaacatccccgagctgatggccaaggtggaggagagaaccccctacatcgtggtggccttccaggagtgcggcagaatgaacatcctgaccagagagatccagagaagcctgagagagctggagctgggcctgaagggcgagctgaccatgaccagccacatggagaacctgcagaacgccctgtacttcgacatggtgcccgagagctgggccagaagagcctaccccagcaccgccggcctggccgcctggttccccgacctgctgaacagaatcaaggagctggaggcctggaccggcgacttcaccatgcccagcaccgtgtggctgaccggcttcttcaacccccagagcttcctgaccgccatcatgcagagcaccgccagaaagaacgagtggcccctggaccagatggccctgcagtgcgacatgaccaagaagaacagagaggagttcagaagcccccccagagagggcgcctacatccacggcctgttcatggagggcgcctgctgggacacccaggccggcatcatcaccgaggccaagctgaaggacctgaccccccccatgcccgtgatgttcatcaaggccatccccgccgacaagcaggactgcagaagcgtgtacagctgccccgtgtacaagaccagccagagaggccccacctacgtgtggaccttcaacctgaagaccaaggagaaccccagcaagtgggtgctggccggcgtggccctgctgctgcagatctag

SEQ ID NO: 117330 - DNA, 8979 bp, Artificial Sequence
  derived and/or modified sequence
gaggtgagaggcatcgtggacaaggccgccaaggagatgggcatggagaagaccctgaaggagctgcagaccacctgggccggcatggagttccagtacgagccccaccccagaaccaacgtgcccctgctgtgcagcgacgaggacctgatcgaggtgctggaggacaaccaggtgcagctgcagaacctggtgatgagcaagtacgtggccttcttcctggaggaggtgagcggctggcagaagaagctgagcaccgtggacgccgtgatcagcatctggttcgaggtgcagagaacctggacccacctggagagcatcttcaccggcagcgaggacatcagagcccagctgccccaggacagcaagagattcgagggcatcgacatcgacttcaaggagctggcctacgacgcccagaagatccccaacgtggtgcagaccaccaacaagcccggcctgtacgagaagctggaggacatccagggcagactgtgcctgtgcgagaaggccctggccgagtacctggacaccaagagactggccttccccagattctacttcctgagcagcagcgacctgctggacatcctgagcaacggcaccgccccccagcaggtgcagagacacctgagcaagctgttcgacaacatggccaagatgagattccagctggacgccagcggcgagcccaccaagaccagcctgggcatgtacagcaaggaggaggagtacgtggccttcagcgagccctgcgactgcagcggccaggtggagatctggctgaaccacgtgctgggccacatgaaggccaccgtgagacacgagatgaccgagggcgtgaccgcctacgaggagaagcccagagagcagtggctgttcgaccaccccgcccaggtggccctgacctgcacccagatctggtggaccaccgaggtgggcatggccttcgccagactggaggagggctacgagagcgccatgaaggactactacaagaagcaggtggcccagctgaagaccctgatcaccatgctgatcggccagctgagcaagggcgacagacagaagatcatgaccatctgcaccatcgacgtgcacgccagagacgtggtggccaagatgatcgcccagaaggtggacaacgcccaggccttcctgtggctgagccagctgagacacagatgggacgacgaggtgaagcactgcttcgccaacatctgcgacgcccagttcctgtacagctacgagtacctgggcaacacccccagactggtgatcacccccctgaccgacagatgctacatcaccctgacccagagcctgcacctgaccatgagcggcgcccccgccggccccgccggcaccggcaagaccgagaccaccaaggacctgggcagagccctgggcatcctggtgtacgtgttcaactgcagcgagcagatggactacaagagctgcggcaacatctacaagggcctggcccagaccggcgcctggggctgcttcgacgagttcaacagaatcagcgtggaggtgctgagcgtggtggccgtgcaggtgaagagcatccaggacgccatcagagacaagaagcagtggttcagcttcctgggcgaggagatcagcctgaaccccagcgtgggcatcttcatcaccatgaaccccggctacgccggcagaaccgagctgcccgagaacctgaagagcctgttcagaccctgcgccatggtggtgcccgacttcgagctgatctgcgagatcatgctggtggccgagggcttcatcgaggcccagagcctggccagaaagttcatcaccctgtaccagctgtgcaaggagctgctgagcaagcaggaccactacgactggggcctgagagccatcaagagcgtgctggtggtggccggcagcctgaagagaggcgaccccgacagacccgaggaccaggtgctgatgagaagcctgagagacttcaacatccccaagatcgtgaccgacgacatgcccatcttcatgggcctgatcggcgacctgttccccgccctggacgtgcccagaagaagagaccccaacttcgaggccctggtgagaaaggccatcgtggacctgaagctgcaggccgaggacaacttcgtgctgaaggtggtgcagctggaggagctgctggccgtgagacacagcgtgttcgtggtgggcggcgccggcaccggcaagagccaggtgctgagaagcctgcacaagacctaccagatcatgaagagaagacccgtgtggaccgacctgaaccccaaggccgtgaccaacgacgagctgttcggcatcatcaaccccgccaccggcgagtggaaggacggcctgttcagcagcatcatgagagagctggccaacatcacccacgacggccccaagtggatcctgctggacggcgacatcgaccccatgtggatcgagagcctgaacaccgtgatggacgacaacaaggtgctgaccctggccagcaacgagagaatccccctgaaccccaccatgaagctgctgttcgagatcagccacctgagaaccgccacccccgccaccgtgagcagagccggcatcctgtacatcaaccccgccgacctgggctggaacccccccgtgagcagctggatcgagaagagagagatccagaccgagagagccaacctgaccatcctgttcgacaagtacctgcccacctgcctggacaccctgagaaccagattcaagaagatcatccccatccccgagcagagcatggtgcagatggtgtgccacctgctggagtgcctgctgaccaccgaggacatccccgccgactgccccaaggagatctacgagcactacttcgtgttcgccgccatctgggccttcggcggcgccatggtgcaggaccagctggtggactacagagccgagttcagcaagtggtggctgaccgagttcaagaccgtgaagttccccagccagggcaccatcttcgactactacatcgaccccgagaccaagaagttcgagccctggagcaagctggtgccccagttcgagttcgaccccgagatgcccctgcaggcctgcctggtgcacaccagcgagaccatcagagtgtgctacttcatggagagactgatggccagacagagacccgtgatgctggtgggcaccgccggcaccggcaagagcgtgctggtgggcgccaagctggccagcctggaccccgaggcctacctggtgaagaacgtgcccttcaactactacaccaccagcgccatgctgcaggccgtgctggagaagcccctggagaagaaggccggcagaaactacggcccccccggcaacaagaagctgatctacttcatcgacgacatgaacatgcccgaggtggacgcctacggcaccgtgcagccccacaccatcatcagacagcacctggactacggccactggtacgacagaagcaagctgagcctgaaggagatcaccaacgtgcagtacgtgagctgcatgaaccccaccgccggcagcttcaccatcaaccccagactgcagagacacttcagcgtgttcgtgctgagcttccccggcgccgacgccctgagcagcatctacagcatcatcctgacccagcacctgaagctgggcaacttccccgccagcctgcagaagagcatcccccccctgatcgacctggccctggccttccaccagaagatcgccaccaccttcctgcccaccggcatcaagttccactacatcttcaacctgagagacttcgccaacatcttccagggcatcctgttcagcagcgtggagtgcgtgaagagcacctgggacctgatcagactgtacctgcacgagagcaacagagtgtacagagacaagatggtggaggagaaggacttcgacctgttcgacaagatccagaccgaggtgctgaagaagaccttcgacgacatcgaggaccccgtggagcagacccagagccccaacctgtactgccacttcgccaacggcatcggcgagcccaagtacatgcccgtgcagagctgggagctgctgacccagaccctggtggaggccctggagaaccacaacgaggtgaacaccgtgatggacctggtgctgttcgaggacgccatgagacacgtgtgccacatcaacagaatcctggagagccccagaggcaacgccctgctggtgggcgtgggcggcagcggcaagcagagcctgaccagactggccgccttcatcagcagcatggacgtgttccagatcaccctgagaaagggctaccagatccaggacttcaagatggacctggccagcctgtgcctgaaggccggcgtgaagaacctgaacaccgtgttcctgatgaccgacgcccaggtggccgacgagagattcctggtgctgatcaacgacctgctggccagcggcgagatccccgacctgtacagcgacgacgaggtggagaacatcatcagcaacgtgagaaacgaggtgaagagccagggcctggtggacaacagagagaactgctggaagttcttcatcgacagaatcagaagacagctgaaggtgaccctgtgcttcagccccgtgggcaacaagctgagagtgagaagcagaaagttccccgccatcgtgaactgcaccgccatccactggttccacgagtggccccagcaggccctggagagcgtgagcctgagattcctgcagaacaccgagggcatcgagcccaccgtgaagcagagcatcagcaagttcatggccttcgtgcacaccagcgtgaaccagaccagccagagctacctgagcaacgagcagagatacaactacaccacccccaagagcttcctggagttcatcagactgtaccagagcctgctgcacagacacagaaaggagctgaagtgcaagaccgagagactggagaacggcctgctgaagctgcacagcaccagcgcccaggtggacgacctgaaggccaagctggccgcccaggaggtggagctgaagcagaagaacgaggacgccgacaagctgatccaggtggtgggcgtggagaccgacaaggtgagcagagagaaggccatggccgacgaggaggagcagaaggtggccgtgatcatgctggaggtgaagcagaagcagaaggactgcgaggaggacctggccaaggccgagcccgccctgaccgccgcccaggccgccctgaacaccctgaacaagaccaacctgaccgagctgaagagcttcggcagcccccccctggccgtgagcaacgtgagcgccgccgtgatggtgctgatggcccccagaggcagagtgcccaaggacagaagctggaaggccgccaaggtgaccatggccaaggtggacggcttcctggacagcctgatcaacttcaacaaggagaacatccacgagaactgcctgaaggccatcagaccctacctgcaggaccccgagttcaaccccgagttcgtggccaccaagagctacgccgccgccggcctgtgcagctgggtgatcaacatcgtgagattctacgaggtgttctgcgacgtggagcccaagagacaggccctgaacaaggccaccgccgacctgaccgccgcccaggagaagctggccgccatcaaggccaagatcgcccacctgaacgagaacctggccaagctgaccgccagattcgagaaggccaccgccgacaagctgaagtgccagcaggaggccgaggtgaccgccgtgaccatcagcctggccaacagactggtgggcggcctggccagcgagaacgtgagatgggccgacgccgtgcagaacttcaagcagcaggagagaaccctgtgcggcgacatcctgctgatcaccgccttcatcagctacctgggcttcttcaccaagaagtacagacagagcctgctggacagaacctggagaccctacctgagccagctgaagacccccatccccgtgacccccgccctggaccccctgagaatgctgatggacgacgccgacgtggccgcctggcagaacgagggcctgcccgccgacagaatgagcgtggagaacgccaccatcctgatcaactgcgagagatggcccctgatggtggacccccagctgcagggcatcaagtggatcaagaacaagtacggcgaggacctgagagtgacccagatcggccagaagggctacctgcagatcatcgagcaggccctggaggccggcgccgtggtgctgatcgagaacctggaggagagcatcgaccccgtgctgggccccctgctgggcagagaggtgatcaagaagggcagattcatcaagatcggcgacaaggagtgcgagtacaaccccaagttcagactgatcctgcacaccaagctggccaacccccactaccagcccgagctgcaggcccaggccaccctgatcaacttcaccgtgaccagagacggcctggaggaccagctgctggccgccgtggtgagcatggagagacccgacctggagcagctgaagagcgacctgaccaagcagcagaacggcttcaagatcaccctgaagaccctggaggacagcctgctgagcagactgagcagcgccagcggcaacttcctgggcgagaccgtgctggtggagaacctggagatcaccaagcagaccgccgccgaggtggagaagaaggtgcaggaggccaaggtgaccgaggtgaagatcaacgaggccagagagcactacagacccgccgccgccagagccagcctgctgtacttcatcatgaacgacctgagcaagatccaccccatgtaccagttcagcctgaaggccttcagcatcgtgttccagaaggccgtggagagagccgcccccgacgagagcctgagagagagagtggccaacctgatcgacagcatcaccttcagcgtgtaccagtacaccatcagaggcctgttcgagtgcgacaagctgacctacctggcccagctgaccttccagatcctgctgatgaacagagaggtgaacgccgtggagctggacttcctgctgagaagccccgtgcagaccggcaccgccagccccgtggagttcctgagccaccaggcctggggcgccgtgaaggtgctgagcagcatggaggagttcagcaacctggacagagacatcgagggcagcgccaagagctggaagaagttcgtggagagcgagtgccccgagaaggagaagctgccccaggagtggaagaacaagaccgccctgcagagactgtgcatgctgagagccatgagacccgacagaatgacctacgccctgagagacttcgtggaggagaagctgggcagcaagtacgtggtgggcagagccctggacttcgccaccagcttcgaggagagcggccccgccacccccatgttcttcatcctgagccccggcgtggaccccctgaaggacgtggagagccagggcagaaagctgggctacaccttcaacaaccagaacttccacaacgtgagcctgggccagggccaggaggtggtggccgaggccgccctggacctggccgccaagaagggccactgggtgatcctgcaggacaccctggagatgtgcagcagagagaccgagttcaagagcatcctgttcgccctgtgctacttccacgccgtggtggccgagagaagaaagttcggcccccagggctggaacagaagctaccccttcaacaccggcgacctgaccatcagcgtgaacgtgctgtacaacttcctggaggccaacgccaaggtgccctacgacgacctgagatacctgttcggcgagatcatgtacggcggccacatcaccgacgactgggacagaagactgtgcagaacctacctgggcgagttcatcagacccgagatgctggagggcgagctgagcctggcccccggcttccccctgcccggcaacatggactacaacggctaccaccagtacatcgacgccgagctgccccccgagagcccctacctgtacggcctgcaccccaacgccgagatcggcttcctgacccagaccagcgagaagctgttcagaaccgtgctggagctgcagcccagagacagccaggccagagacggcgccggcgccaccagagaggagaaggtgaaggccctgctggaggagatcctggagagagtgaccgacgagttcaacatccccgagctgatggccaaggtggaggagagaaccccctacatcgtggtggccttccaggagtgcggcagaatgaacatcctgaccagagagatccagagaagcctgagagagctggagctgggcctgaagggcgagctgaccatgaccagccacatggagaacctgcagaacgccctgtacttcgacatggtgcccgagagctgggccagaagagcctaccccagcaccgccggcctggccgcctggttccccgacctgctgaacagaatcaaggagctggaggcctggaccggcgacttcaccatgcccagcaccgtgtggctgaccggcttcttcaacccccagagcttcctgaccgccatcatgcagagcaccgccagaaagaacgagtggcccctggaccagatggccctgcagtgcgacatgaccaagaagaacagagaggagttcagaagcccccccagagagggcgcctacatccacggcctgttcatggagggcgcctgctgggacacccaggccggcatcatcaccgaggccaagctgaaggacctgaccccccccatgcccgtgatgttcatcaaggccatccccgccgacaagcaggactgcagaagcgtgtacagctgccccgtgtacaagaccagccagagaggccccacctacgtgtggaccttcaacctgaagaccaaggagaaccccagcaagtgggtgctggccggcgtggccctgctgctgcagatctag

SEQ ID NO: 117331 - DNA, 13233 bp, Artificial Sequence
  derived and/or modified sequence
atgagactggccgaggagagagccgccctggccgccgagaacgccgacggcgagcccggcgccgacagaagactgagactgctgggcacctacgtggccatgagcctgagacccgccgccggcgcctgggagagatgcgccggcagcgccgaggccgagcagctgctgcaggccttcctgggcagagacgccgccgagggccccagacccctgctggtggtgagacccggccccagaggcctggccatcagacccggcctggaggtgggccccgagagcggcctggccggcgccaaggccctgttcttcctgagaaccggccccgagccccccggccccgacagcttcagaggcgccgtggtgtgcggcgacctgcccgccgcccccctggagcacctggccgccctgttcagcgaggtggtgctgcccgtgctggccaacgagaagaacagactgaactggccccacatgatctgcgaggacgtgagaagacacgcccacagcctgcagtgcgacctgagcgtgatcctggagcaggtgaagggcaagaccctgctgcccctgcccgccggcagcgagaagatggagttcgccgacagcaagagcgagaccgtgctggacagcatcgacaagagcgtgatctacgccatcgagagcgccgtgatcaagtggagctaccaggtgcaggtggtgctgaagagagagagcagccagcccctgctgcagggcgagaaccccacccccaaggtggagctggagttctggaagagcagatacgaggacctgaagtacatctacaaccagctgagaaccatcaccgtgagaggcatggccaagctgctggacaagctgcagagcagctacttccccgccttcaaggccatgtacagagacgtggtggccgccctggccgaggcccaggacatccacgtgcacctgatccccctgcagagacacctggaggccctggagaacgccgagttccccgaggtgaagccccagctgagacccctgctgcacgtggtgtgcctgatctgggccacctgcaagagctacagaagccccggcagactgaccgtgctgctgcaggagatctgcaacctgctgatccagcaggccagcaactacctgagccccgaggacctgctgagaagcgaggtggaggagagccagagaaagctgcaggtggtgagcgacaccctgagcttcttcaagcaggagttccaggacagaagagagaacctgcacacctacttcaaggagaaccaggaggtgaaggagtgggacttccagagcagcctggtgttcgtgagactggacggcttcctgggccagctgcacgtggtggagggcctgctgaagaccgccctggacttccacaagctgggcaaggtggagttcagcggcgtgagaggcaacgccctgagccagcaggtgcagcagatgcacgaggagttccaggagatgtacagactgctgagcggcagcagcagcgactgcctgtacctgcagagcaccgacttcgagaacgacgtgagcgagttcaaccagaaggtggaggacctggacagaagactgggcaccatcttcatccaggccttcgacgacgcccccggcctggagcacgccttcaagctgctggacatcgccggcaacctgctggagagacccctggtggccagagacaccagcgacaagtacctggtgctgatccagatgttcaacaaggacctggacgccgtgagaatgatctacagccagcacgtgcaggaggaggccgagctgggcttcagccccgtgcacaagaacatgcccaccgtggccggcggcctgagatgggcccaggagctgagacagagaatccagggccccttcagcaacttcggcagaatcacccacccctgcatggagagcgccgagggcaagagaatgcagcagaagtacgaggacatgctgagcctgctggagaagtacgagaccagactgtacgaggactggtgcagaaccgtgagcgagaagagccagtacaacctgagccagcccctgctgaagagagaccccgagaccaaggagatcaccatcaacttcaacccccagctgatcagcgtgctgaaggagatgagctacctggagcccagagagatgaagcacatgcccgagaccgccgccgccatgttcagcagcagagacttctacagacagctggtggccaacctggagctgatggccaactggtacaacaaggtgatgaagaccctgctggaggtggagttccccctggtggaggaggagctgcagaacatcgacctgagactgagagccgccgaggagaccctgaactggaagaccgagggcatctgcgactacgtgaccgagatcaccagcagcatccacgacctggagcagagaatccagaagaccaaggacaacgtggaggagatccagaacatcatgaagacctgggtgacccccatcttcaagaccaaggacggcaagagagagagcctgctgagcctggacgacagacacgacagaatggagaagtactacaacctgatcaaggagagcggcctgaagatccacgccctggtgcaggagaacctgggcctgttcagcgccgaccccaccagcaacatctggaagacctacgtgaacagcatcgacaacctgctgctgaacggcttcttcctggccatcgagtgcagcctgaagtacctgctggagaacaccgagtgcaaggccggcctgacccccatcttcgaggcccagctgagcctggccatccccgagctggtgttctaccccagcctggagagcggcgtgaagggcggcttctgcgacatcgtggagggcctgatcaccagcatcttcagaatccccagcctggtgcccagactgagcccccagaacggcagcccccactaccaggtggacctggacggcatccccgacctggccaacatgagaagaaccctgatggagagagtgcagagaatgatgggcctgtgctgcggctaccagagcaccttcagccagtacagctacctgtacgtggaggacagaaaggaggtgctgggccagttcctgctgtacggccacatcctgacccccgaggagatcgaggaccacgtggaggacggcatccccgagaacccccccctgctgagccagttcaaggtgcagatcgacagctacgagaccctgtacgaggaggtgtgcagactggagcccatcaaggtgttcgacggctggatgaagatcgacatcagacccttcaaggccagcctgctgaacatcatcaagagatggagcctgctgttcaagcagcacctggtggaccacgtgacccacagcctggccaacctggacgccttcatcaagaagagcgagagcggcctgctgaagaaggtggagaagggcgacttccagggcctggtggagatcatgggccacctgatggccgtgaaggagagacagagcaacaccgacgagatgttcgagcccctgaagcagaccatcgagctgctgaagacctacgagcaggagctgcccgagaccgtgttcaagcagctggaggagctgcccgagaagtggaacaacatcaagaaggtggccatcaccgtgaagcagcaggtggcccccctgcaggccaacgaggtgaccctgctgagacagagatgcaccgccttcgacgccgagcagcagcagttctgggagcagttccacaaggaggcccccttcagattcgacagcatccacccccaccagatgctggacgccagacacatcgagatccagcagatggagagcaccatggccagcatcagcgagagcgccagcctgttcgaggtgaacgtgcccgactacaagcagctgagacagtgcagaaaggaggtgtgccagctgaaggagctgtgggacaccatcggcatggtgaccagcagcatccacgcctgggagaccaccccctggagaaacatcaacgtggaggccatggagctggagtgcaagcagttcgccagacacatcagaaacctggacaaggaggtgagagcctgggacgccttcaccggcctggagagcaccgtgtggaacaccctgagcagcctgagagccgtggccgagctgcagaaccccgccatcagagagagacactggagacagctgatgcaggccaccggcgtgagcttcaccatggaccaggacaccaccctggcccacctgctgcagctgcagctgcaccactacgaggacgaggtgagaggcatcgtggacaaggccgccaaggagatgggcatggagaagaccctgaaggagctgcagaccacctgggccggcatggagttccagtacgagccccaccccagaaccaacgtgcccctgctgtgcagcgacgaggacctgatcgaggtgctggaggacaaccaggtgcagctgcagaacctggtgatgagcaagtacgtggccttcttcctggaggaggtgagcggctggcagaagaagctgagcaccgtggacgccgtgatcagcatctggttcgaggtgcagagaacctggacccacctggagagcatcttcaccggcagcgaggacatcagagcccagctgccccaggacagcaagagattcgagggcatcgacatcgacttcaaggagctggcctacgacgcccagaagatccccaacgtggtgcagaccaccaacaagcccggcctgtacgagaagctggaggacatccagggcagactgtgcctgtgcgagaaggccctggccgagtacctggacaccaagagactggccttccccagattctacttcctgagcagcagcgacctgctggacatcctgagcaacggcaccgccccccagcaggtgcagagacacctgagcaagctgttcgacaacatggccaagatgagattccagctggacgccagcggcgagcccaccaagaccagcctgggcatgtacagcaaggaggaggagtacgtggccttcagcgagccctgcgactgcagcggccaggtggagatctggctgaaccacgtgctgggccacatgaaggccaccgtgagacacgagatgaccgagggcgtgaccgcctacgaggagaagcccagagagcagtggctgttcgaccaccccgcccaggtggccctgacctgcacccagatctggtggaccaccgaggtgggcatggccttcgccagactggaggagggctacgagagcgccatgaaggactactacaagaagcaggtggcccagctgaagaccctgatcaccatgctgatcggccagctgagcaagggcgacagacagaagatcatgaccatctgcaccatcgacgtgcacgccagagacgtggtggccaagatgatcgcccagaaggtggacaacgcccaggccttcctgtggctgagccagctgagacacagatgggacgacgaggtgaagcactgcttcgccaacatctgcgacgcccagttcctgtacagctacgagtacctgggcaacacccccagactggtgatcacccccctgaccgacagatgctacatcaccctgacccagagcctgcacctgaccatgagcggcgcccccgccggccccgccggcaccggcaagaccgagaccaccaaggacctgggcagagccctgggcatcctggtgtacgtgttcaactgcagcgagcagatggactacaagagctgcggcaacatctacaagggcctggcccagaccggcgcctggggctgcttcgacgagttcaacagaatcagcgtggaggtgctgagcgtggtggccgtgcaggtgaagagcatccaggacgccatcagagacaagaagcagtggttcagcttcctgggcgaggagatcagcctgaaccccagcgtgggcatcttcatcaccatgaaccccggctacgccggcagaaccgagctgcccgagaacctgaagagcctgttcagaccctgcgccatggtggtgcccgacttcgagctgatctgcgagatcatgctggtggccgagggcttcatcgaggcccagagcctggccagaaagttcatcaccctgtaccagctgtgcaaggagctgctgagcaagcaggaccactacgactggggcctgagagccatcaagagcgtgctggtggtggccggcagcctgaagagaggcgaccccgacagacccgaggaccaggtgctgatgagaagcctgagagacttcaacatccccaagatcgtgaccgacgacatgcccatcttcatgggcctgatcggcgacctgttccccgccctggacgtgcccagaagaagagaccccaacttcgaggccctggtgagaaaggccatcgtggacctgaagctgcaggccgaggacaacttcgtgctgaaggtggtgcagctggaggagctgctggccgtgagacacagcgtgttcgtggtgggcggcgccggcaccggcaagagccaggtgctgagaagcctgcacaagacctaccagatcatgaagagaagacccgtgtggaccgacctgaaccccaaggccgtgaccaacgacgagctgttcggcatcatcaaccccgccaccggcgagtggaaggacggcctgttcagcagcatcatgagagagctggccaacatcacccacgacggccccaagtggatcctgctggacggcgacatcgaccccatgtggatcgagagcctgaacaccgtgatggacgacaacaaggtgctgaccctggccagcaacgagagaatccccctgaaccccaccatgaagctgctgttcgagatcagccacctgagaaccgccacccccgccaccgtgagcagagccggcatcctgtacatcaaccccgccgacctgggctggaacccccccgtgagcagctggatcgagaagagagagatccagaccgagagagccaacctgaccatcctgttcgacaagtacctgcccacctgcctggacaccctgagaaccagattcaagaagatcatccccatccccgagcagagcatggtgcagatggtgtgccacctgctggagtgcctgctgaccaccgaggacatccccgccgactgccccaaggagatctacgagcactacttcgtgttcgccgccatctgggccttcggcggcgccatggtgcaggaccagctggtggactacagagccgagttcagcaagtggtggctgaccgagttcaagaccgtgaagttccccagccagggcaccatcttcgactactacatcgaccccgagaccaagaagttcgagccctggagcaagctggtgccccagttcgagttcgaccccgagatgcccctgcaggcctgcctggtgcacaccagcgagaccatcagagtgtgctacttcatggagagactgatggccagacagagacccgtgatgctggtgggcaccgccggcaccggcaagagcgtgctggtgggcgccaagctggccagcctggaccccgaggcctacctggtgaagaacgtgcccttcaactactacaccaccagcgccatgctgcaggccgtgctggagaagcccctggagaagaaggccggcagaaactacggcccccccggcaacaagaagctgatctacttcatcgacgacatgaacatgcccgaggtggacgcctacggcaccgtgcagccccacaccatcatcagacagcacctggactacggccactggtacgacagaagcaagctgagcctgaaggagatcaccaacgtgcagtacgtgagctgcatgaaccccaccgccggcagcttcaccatcaaccccagactgcagagacacttcagcgtgttcgtgctgagcttccccggcgccgacgccctgagcagcatctacagcatcatcctgacccagcacctgaagctgggcaacttccccgccagcctgcagaagagcatcccccccctgatcgacctggccctggccttccaccagaagatcgccaccaccttcctgcccaccggcatcaagttccactacatcttcaacctgagagacttcgccaacatcttccagggcatcctgttcagcagcgtggagtgcgtgaagagcacctgggacctgatcagactgtacctgcacgagagcaacagagtgtacagagacaagatggtggaggagaaggacttcgacctgttcgacaagatccagaccgaggtgctgaagaagaccttcgacgacatcgaggaccccgtggagcagacccagagccccaacctgtactgccacttcgccaacggcatcggcgagcccaagtacatgcccgtgcagagctgggagctgctgacccagaccctggtggaggccctggagaaccacaacgaggtgaacaccgtgatggacctggtgctgttcgaggacgccatgagacacgtgtgccacatcaacagaatcctggagagccccagaggcaacgccctgctggtgggcgtgggcggcagcggcaagcagagcctgaccagactggccgccttcatcagcagcatggacgtgttccagatcaccctgagaaagggctaccagatccaggacttcaagatggacctggccagcctgtgcctgaaggccggcgtgaagaacctgaacaccgtgttcctgatgaccgacgcccaggtggccgacgagagattcctggtgctgatcaacgacctgctggccagcggcgagatccccgacctgtacagcgacgacgaggtggagaacatcatcagcaacgtgagaaacgaggtgaagagccagggcctggtggacaacagagagaactgctggaagttcttcatcgacagaatcagaagacagctgaaggtgaccctgtgcttcagccccgtgggcaacaagctgagagtgagaagcagaaagttccccgccatcgtgaactgcaccgccatccactggttccacgagtggccccagcaggccctggagagcgtgagcctgagattcctgcagaacaccgagggcatcgagcccaccgtgaagcagagcatcagcaagttcatggccttcgtgcacaccagcgtgaaccagaccagccagagctacctgagcaacgagcagagatacaactacaccacccccaagagcttcctggagttcatcagactgtaccagagcctgctgcacagacacagaaaggagctgaagtgcaagaccgagagactggagaacggcctgctgaagctgcacagcaccagcgcccaggtggacgacctgaaggccaagctggccgcccaggaggtggagctgaagcagaagaacgaggacgccgacaagctgatccaggtggtgggcgtggagaccgacaaggtgagcagagagaaggccatggccgacgaggaggagcagaaggtggccgtgatcatgctggaggtgaagcagaagcagaaggactgcgaggaggacctggccaaggccgagcccgccctgaccgccgcccaggccgccctgaacaccctgaacaagaccaacctgaccgagctgaagagcttcggcagcccccccctggccgtgagcaacgtgagcgccgccgtgatggtgctgatggcccccagaggcagagtgcccaaggacagaagctggaaggccgccaaggtgaccatggccaaggtggacggcttcctggacagcctgatcaacttcaacaaggagaacatccacgagaactgcctgaaggccatcagaccctacctgcaggaccccgagttcaaccccgagttcgtggccaccaagagctacgccgccgccggcctgtgcagctgggtgatcaacatcgtgagattctacgaggtgttctgcgacgtggagcccaagagacaggccctgaacaaggccaccgccgacctgaccgccgcccaggagaagctggccgccatcaaggccaagatcgcccacctgaacgagaacctggccaagctgaccgccagattcgagaaggccaccgccgacaagctgaagtgccagcaggaggccgaggtgaccgccgtgaccatcagcctggccaacagactggtgggcggcctggccagcgagaacgtgagatgggccgacgccgtgcagaacttcaagcagcaggagagaaccctgtgcggcgacatcctgctgatcaccgccttcatcagctacctgggcttcttcaccaagaagtacagacagagcctgctggacagaacctggagaccctacctgagccagctgaagacccccatccccgtgacccccgccctggaccccctgagaatgctgatggacgacgccgacgtggccgcctggcagaacgagggcctgcccgccgacagaatgagcgtggagaacgccaccatcctgatcaactgcgagagatggcccctgatggtggacccccagctgcagggcatcaagtggatcaagaacaagtacggcgaggacctgagagtgacccagatcggccagaagggctacctgcagatcatcgagcaggccctggaggccggcgccgtggtgctgatcgagaacctggaggagagcatcgaccccgtgctgggccccctgctgggcagagaggtgatcaagaagggcagattcatcaagatcggcgacaaggagtgcgagtacaaccccaagttcagactgatcctgcacaccaagctggccaacccccactaccagcccgagctgcaggcccaggccaccctgatcaacttcaccgtgaccagagacggcctggaggaccagctgctggccgccgtggtgagcatggagagacccgacctggagcagctgaagagcgacctgaccaagcagcagaacggcttcaagatcaccctgaagaccctggaggacagcctgctgagcagactgagcagcgccagcggcaacttcctgggcgagaccgtgctggtggagaacctggagatcaccaagcagaccgccgccgaggtggagaagaaggtgcaggaggccaaggtgaccgaggtgaagatcaacgaggccagagagcactacagacccgccgccgccagagccagcctgctgtacttcatcatgaacgacctgagcaagatccaccccatgtaccagttcagcctgaaggccttcagcatcgtgttccagaaggccgtggagagagccgcccccgacgagagcctgagagagagagtggccaacctgatcgacagcatcaccttcagcgtgtaccagtacaccatcagaggcctgttcgagtgcgacaagctgacctacctggcccagctgaccttccagatcctgctgatgaacagagaggtgaacgccgtggagctggacttcctgctgagaagccccgtgcagaccggcaccgccagccccgtggagttcctgagccaccaggcctggggcgccgtgaaggtgctgagcagcatggaggagttcagcaacctggacagagacatcgagggcagcgccaagagctggaagaagttcgtggagagcgagtgccccgagaaggagaagctgccccaggagtggaagaacaagaccgccctgcagagactgtgcatgctgagagccatgagacccgacagaatgacctacgccctgagagacttcgtggaggagaagctgggcagcaagtacgtggtgggcagagccctggacttcgccaccagcttcgaggagagcggccccgccacccccatgttcttcatcctgagccccggcgtggaccccctgaaggacgtggagagccagggcagaaagctgggctacaccttcaacaaccagaacttccacaacgtgagcctgggccagggccaggaggtggtggccgaggccgccctggacctggccgccaagaagggccactgggtgatcctgcaggacaccctggagatgtgcagcagagagaccgagttcaagagcatcctgttcgccctgtgctacttccacgccgtggtggccgagagaagaaagttcggcccccagggctggaacagaagctaccccttcaacaccggcgacctgaccatcagcgtgaacgtgctgtacaacttcctggaggccaacgccaaggtgccctacgacgacctgagatacctgttcggcgagatcatgtacggcggccacatcaccgacgactgggacagaagactgtgcagaacctacctgggcgagttcatcagacccgagatgctggagggcgagctgagcctggcccccggcttccccctgcccggcaacatggactacaacggctaccaccagtacatcgacgccgagctgccccccgagagcccctacctgtacggcctgcaccccaacgccgagatcggcttcctgacccagaccagcgagaagctgttcagaaccgtgctggagctgcagcccagagacagccaggccagagacggcgccggcgccaccagagaggagaaggtgaaggccctgctggaggagatcctggagagagtgaccgacgagttcaacatccccgagctgatggccaaggtggaggagagaaccccctacatcgtggtggccttccaggagtgcggcagaatgaacatcctgaccagagagatccagagaagcctgagagagctggagctgggcctgaagggcgagctgaccatgaccagccacatggagaacctgcagaacgccctgtacttcgacatggtgcccgagagctgggccagaagagcctaccccagcaccgccggcctggccgcctggttccccgacctgctgaacagaatcaaggagctggaggcctggaccggcgacttcaccatgcccagcaccgtgtggctgaccggcttcttcaacccccagagcttcctgaccgccatcatgcagagcaccgccagaaagaacgagtggcccctggaccagatggccctgcagtgcgacatgaccaagaagaacagagaggagttcagaagcccccccagagagggcgcctacatccacggcctgttcatggagggcgcctgctgggacacccaggccggcatcatcaccgaggccaagctgaaggacctgaccccccccatgcccgtgatgttcatcaaggccatccccgccgacaagcaggactgcagaagcgtgtacagctgccccgtgtacaagaccagccagagaggccccacctacgtgtggaccttcaacctgaagaccaaggagaaccccagcaagtgggtgctggccggcgtggccctgctgctgcagatctag

SEQ ID NO: 117332 - DNA, 14170 bp, Artificial Sequence
  derived and/or modified sequence
agcagaggagtgagtcctggccgcgtccccgtcgctagggaaaccgatgcagctggaggccgcgcgcgatgcggctcgcggaggagcgggccgcgctcgcggcggagaacgcggatggggaacccggcgccgaccgacgactgcgactcctggggacctacgtggccatgagcctgcggccggctgcgggcgcctgggagcgttgcgcggggagtgctgaggcggagcagctgctccaggccttcctgggccgcgatgctgccgaggggccgcggccgctgctggtggtgcggcccgggcccaggggcctggcaatacgccccgggctggaggtgggacctgagtcgggcctggctggcgctaaggcgctttttttccttcgcaccgggcccgagcctccagggcccgacagcttccgcggcgcagtggtctgcggggacctgcccgcggcacctctggagcacctagccgcgctgttctcggaggttgttctacccgtcctggccaatgagaagaatcgcctaaactggccccacatgatatgtgaggatgtcaggcggcacgcccacagcctccaatgtgacctctcagttatacttgagcaagtgaagggaaaaactttgctgcctcttccagcaggctcagaaaaaatggagtttgcggattccaaaagtgagacagtcttggattctatagataagtcagtcatctatgccattgagtctgcagtgatcaaatggagctaccaagtccaggtggtactcaagagagagtcttcccagccactcttacaaggggagaatcccacccctaaggtggagttggagttctggaagagcaggtatgaagatctgaaatacatctataatcaactgagaacaataacggtgaggggcatggccaagctcctggacaagcttcagagtagctactttccagctttcaaagccatgtacagagatgttgttgcagctctagcagaggcacaggacatccatgtgcacctgataccgctccagcgccacctggaagctctggagaatgcagaatttccggaggtgaagccccagctgcggcccctgctccacgtggtctgtctgatttgggccacatgcaagtcctaccgctccccgggaaggctgactgtgctgctccaggagatttgcaaccttctcatccagcaggcctctaattatctcagcccagaagacctgctgagaagtgaggtagaagaaagtcagagaaaactgcaagtggtctcagacactttgagcttcttcaagcaagagtttcaggacagaagggagaatctccacacttacttcaaagagaaccaggaagtcaaggaatgggatttccagtcttctttggtctttgtgcgattggatggcttcctgggacaactgcacgtggtggagggtcttctgaagacggccctggatttccacaaactgggaaaggtggagttcagcggcgtcagagggaatgctctgagtcagcaggtccagcaaatgcatgaagaatttcaagagatgtacaggcttctctcaggatcctcctccgactgcctgtacctccaaagcacggactttgaaaatgacgtctctgaatttaaccagaaagtagaagatcttgaccgaagattggggactatctttattcaagcttttgatgatgcacctggcttggagcatgcctttaagctgctagacatagcaggaaacctccttgaaagaccgctggtagcgagggatacatctgataaatacctggtcctcatccaaatgttcaacaaagatctggatgcagtgaggatgatctacagtcagcacgtccaggaggaagcagaacttgggttctccccggtgcacaagaacatgcccaccgtggctggcggcctccgctgggcacaggagctgaggcagcgcatccagggtcctttcagcaactttggacgcatcacacacccttgcatggaatctgcagaaggaaagcgaatgcaacaaaaatatgaagatatgctgtcattgctagaaaagtatgagacaagactttatgaggattggtgccggacagtatcagagaagtcacagtacaatctttcccaaccacttctaaaacgtgacccagagacgaaggagatcactatcaactttaacccacagctgatttcagtgctgaaagaaatgagctatcttgaacccagagagatgaaacacatgcctgagacagcagcagccatgttctcctccagggatttctatcggcagcttgtggctaatttagagttgatggcaaattggtacaacaaggttatgaaaactctgctggaggtggaatttccattagtggaggaagagctgcaaaatattgatctccgcctcagagcagcagaggagactttgaactggaaaacagaaggcatttgcgattatgtcactgaaatcaccagtagtattcatgatcttgaacaaagaattcagaaaactaaagacaatgtggaagagatccaaaacatcatgaaaacatgggtgactccaatatttaagacaaaagatggaaaaagggaatcccttctttctctggatgatcggcatgatcgaatggaaaaatattacaatctcatcaaggaatctggccttaagatccacgcccttgttcaggaaaacctgggtctattttcagcagacccaacctccaatatctggaagacttatgttaactctattgacaatttgttgctgaatggattctttcttgccattgagtgctccctcaagtatcttctggaaaatactgagtgtaaggcaggacttaccccaatatttgaagcacaactgagtctagccatcccagagctagttttctatccgtctctggagtctggagtgaaggggggtttctgtgacattgttgagggtctcatcaccagcatttttaggataccatctctggtgccacggctttccccacaaaatggctctcctcactatcaggtcgacctggacggtataccagatttggcaaacatgcggcgcacactcatggagagagtccagagaatgatgggcctctgctgtggctatcagagcaccttcagccagtattcgtacctctatgtggaggaccggaaggaggttctgggtcagtttctgctgtacgggcacatcctcactccggaagaaattgaagaccatgtggaagatggcatcccagagaaccctcccctcctttctcagtttaaagtgcaaatcgactcctatgaaacgctctatgaagaggtgtgcaggctggaacccatcaaggtgtttgacggctggatgaaaattgatattcgaccctttaaggcatctctgctgaatattattaagaggtggagcctcctgttcaaacagcatcttgtggaccacgtcactcacagcttggccaacctggatgcgtttataaagaagagtgagagcggcttactcaagaaagttgaaaaaggagatttccaaggcttggttgagatcatgggacaccttatggctgttaaagaacggcagagtaacactgatgagatgtttgagcccttaaagcagactattgaattgctgaagacctatgaacaagaattgccagaaacagtgtttaagcagctggaggagctgcctgagaaatggaacaacataaaaaaggtggccattactgtgaagcagcaggtggccccactgcaggcaaatgaagtgacactcctccgccagaggtgcacagccttcgatgcagaacagcagcaattctgggagcaattccacaaagaagccccgttcaggtttgatagcatccaccctcatcaaatgctggatgccaggcacatcgagatccagcagatggaatccactatggcctccatttctgagtctgccagcttatttgaagtcaatgtccctgactataagcagctgaggcagtgcaggaaggaggtctgccagctgaaggagctctgggacaccattggaatggtgacctccagcatccatgcctgggagaccacaccctggaggaatatcaacgtggaagccatggagttggagtgcaaacagtttgcccggcatatccgaaacctggacaaggaggtcagggcctgggatgcattcacaggcctggaaagcactgtgtggaacacgctgagctccctgagggcagtagctgagctgcagaatccagccatccgggagcggcactggaggcagctgatgcaggccaccggtgtgagcttcactatggaccaggacaccaccctagcgcacctgctgcagctccagctgcaccactatgaggatgaggtccggggcattgtggacaaagctgcaaaagagatgggtatggagaaaaccttaaaggagctgcagactacctgggctggcatggaattccagtatgagccccacccacggaccaatgtccccctcctgtgctctgatgaggacctcatagaggttctggaggataatcaagttcaacttcagaacctggtgatgtccaagtatgttgctttcttcttggaggaggtgtcgggctggcagaagaagctgtccacagtggacgctgtcatctctatctggtttgaagtgcagcgaacatggactcacctggaaagcatattcactggatctgaagatattcgggcacagctaccccaggattctaaaaggtttgaaggcatcgacattgactttaaagagctagcttatgatgcccagaaaattccaaatgtagtgcaaaccaccaacaagccaggcctgtatgaaaagctggaggatattcagggcagattgtgcctgtgtgagaaggccctggcagagtacctcgacaccaagaggcttgccttcccgcggttttactttctctcctcctccgatctgttagacatcctttccaacggcacagctccacaacaggttcaacgtcacctttccaaactctttgacaacatggccaagatgcgattccagctagatgccagtggggaaccaaccaagacaagcctcggcatgtacagcaaagaagaggagtatgtggctttcagtgagccctgtgactgcagcgggcaggtagaaatatggctgaaccatgtccttggtcacatgaaggccactgtgaggcatgagatgacagaaggtgtaactgcctatgaagaaaagccgagggagcagtggctttttgaccacccagctcaggtggccctgacctgtactcagatctggtggacaacagaagtgggcatggcatttgccaggctggaggaaggctatgagagtgccatgaaggactattataagaagcaagtggcccagctcaaaacccttatcaccatgctgattggccagctctccaagggagaccggcagaagattatgactatatgcaccatcgatgtgcatgcccgggatgtggtagccaagatgattgctcagaaggtagacaatgcccaggctttcctctggctgtctcagctgcgccatcgttgggatgacgaggtcaaacactgctttgccaacatctgtgatgcccagtttttgtattcctatgagtacctgggaaacacacctcgcttggtgatcacacctttgactgacaggtgctacatcaccctcacccagtccctgcacctgaccatgagtggggctcccgcaggacctgcaggcacaggcaagaccgagaccaccaaggacctgggccgcgcactgggcatcctggtctatgtgttcaactgctcggagcagatggattacaagtcttgtggcaacatctacaaaggccttgctcagactggtgcctggggctgctttgatgagtttaatcgaatctccgtggaggtcttgtcagtggtggcagtgcaggtaaaaagcattcaagatgcgattagagataagaagcagtggttcagcttccttggggaggagatcagcctgaatccttctgtcggtatcttcatcaccatgaacccaggctatgctggccgcacagagctgccagagaatctcaagtctctcttcaggccttgtgcaatggtggttccagactttgaattgatctgtgaaatcatgctggtggcagaaggattcattgaagcccagtcattagccagaaagttcatcactctttaccagttgtgcaaagagcttctctccaaacaggatcactacgactggggcctacgggccatcaagtccgtgctggtggtggcaggatccctgaagagaggagaccctgaccggcctgaggaccaggtcctgatgcgctccttgcgggatttcaacatccccaagattgtgactgatgacatgcccatcttcatgggcctgatcggggacctctttcccgccctggatgtcccccggaggagagaccccaacttcgaagctttggttaggaaggcgatagtggatctgaagctccaggctgaggacaactttgtgctcaaggtggtccagctggaggagctcctggctgtgcggcactctgtatttgtggtgggtggcgctggtaccggcaagtcacaggtgctgaggtccttgcacaagacctatcagatcatgaaacggcgccccgtctggactgacctcaatcccaaagcagtcacaaatgatgagctctttggcatcatcaatccagccacaggagaatggaaggatggattgttctcttccatcatgcgggagcttgccaacatcacccatgatgggcccaagtggattttactggatggcgacatagatccaatgtggattgaatccctgaatactgtcatggatgataacaaggtgctgacattggccagcaatgagaggattcctctgaaccccaccatgaagctcctctttgagatcagccacctgcgcacagccactccagcaactgtctctagagcagggatcttgtacatcaacccggcagacttgggatggaaccctccagtgagcagctggattgagaagagggaaatccagacagagagagccaacttaaccattttgttcgacaagtatcttccaacctgcctagacacactcagaaccaggtttaagaagatcattcccatcccagagcagagcatggttcagatggtgtgtcaccttctggaatgtctcctgaccacggaggacatccctgcagactgccctaaggaaatttatgagcattattttgtgtttgctgccatctgggctttcggcggagcaatggtccaagatcagcttgtggactaccgggcagagttcagcaaatggtggctgactgagttcaaaacagtcaagtttccttcccaaggaaccatctttgactattacatcgacccagagaccaagaaattcgagccttggtccaagctcgtcccccagttcgaatttgaccccgagatgcccttgcaggcgtgtttggtgcacacgagtgagaccatccgtgtgtgctacttcatggagcggttgatggcgcggcagcggcctgtcatgctggtgggcacggctggcactggcaagtcggtgctggtgggagctaagctggccagccttgaccccgaggcatacctggtgaaaaacgtgccattcaactactacaccacgtcagcaatgctgcaggctgtcctggagaagcctctggaaaagaaggctggcagaaactatggccctccagggaacaagaaactcatctatttcattgatgacatgaacatgcctgaggtggatgcctacgggacggtgcagccccacaccatcatccggcagcatctggactatggccactggtatgatcggagcaagctgtccctaaaggagatcacaaatgtacagtatgtttcctgtatgaaccccacggcaggcagcttcaccatcaacccccggcttcagcgtcacttcagcgtgtttgtcctctccttcccgggggcagatgccctgtcctctatctacagcatcatcctcactcagcatctgaagctcggaaacttcccggcgtccctgcagaaatccatccccccactgatcgatctggccctcgccttccaccagaaaattgctaccaccttcctacccacaggaatcaaattccactacatcttcaacctcagagattttgccaacattttccagggcattctcttctcctcagtggaatgtgtgaaatccacatgggatcttataaggctctatctgcatgaatcaaatcgagtttatcgggataagatggtagaagaaaaggactttgatctttttgataaaatccagacagaagtgctcaagaaaacttttgatgatattgaagaccctgtggagcagacccaaagcccgaacctgtattgtcactttgcaaatggtattggggagcccaaatacatgcctgtacagtcttgggaacttttgacccagactctggtggaggccttggagaaccacaatgaagtcaacacagtgatggacctagttctctttgaggatgccatgcgccatgtctgccatatcaatcgcatcttggagtccccgcggggaaatgctctgctggttggtgtaggtgggagcggcaagcagagcctgacaaggctggcagctttcatcagctccatggatgtcttccagatcacactgcgcaaaggctaccagatccaggacttcaagatggacctggccagcctgtgtctgaaagctggagtgaagaatctcaacacagtgtttctcatgactgatgcccaagtggctgatgagaggttccttgtgctcatcaatgatcttttggcatctggggagatcccagatctctactctgatgatgaagttgaaaacatcataagcaatgtgaggaatgaagtcaagagccagggtctggttgacaacagagagaactgttggaagttctttatagatcggatccggcgacagctgaaggtgactctctgtttctcccctgtgggaaacaagctaagagtccgcagcaggaagttcccagccattgtgaactgcacagccatccactggttccacgagtggcctcagcaagcattggagtctgtcagcctccgcttcttgcagaacacagagggcattgagcccacagtaaagcagtcgattagcaaattcatggcctttgtccacacaagtgtcaaccaaacatcccagtcttatctgagcaatgaacagcgctacaactatacaactcccaagtcctttctggagttcatcagactctaccagagcttgttgcacaggcacagaaaagagctcaagtgcaagacagagcggttggagaacgggctgctgaagctgcatagcacctctgcccaggtggatgatctgaaagcaaagctggctgcccaggaagtagagctgaagcagaaaaatgaagatgcagacaaactgattcaggtcgtgggtgtggagactgacaaagtgagcagagagaaagccatggcagatgaagaggagcagaaggtggccgtcatcatgctagaggtgaaacagaagcagaaggactgtgaggaggacctggcaaaggctgagccagcactcacagcagcgcaggcagctctcaacaccctgaacaagaccaacctgacagagctgaagtcatttggctctccgcctctggccgtcagcaatgtcagcgctgcggtgatggtactgatggctcccaggggtagggtgcccaaggaccggagctggaaggctgctaaggtcaccatggccaaagtggatggcttcctggactcgctaataaacttcaacaaagagaacattcacgagaactgcctcaaagccatcaggccgtatctgcaagaccccgagttcaatcctgagtttgtggccaccaaatcctatgcggctgcaggcctctgctcctgggtcatcaatattgtgagattttatgaggtgttctgtgatgtggaacccaagcgccaggcactgaacaaagccaccgcggacctcacagctgcccaggagaagctggctgccatcaaagccaagatcgctcaccttaatgaaaacctggcaaagctcacagccaggtttgagaaagcaacagcagacaaactcaaatgtcagcaagaagccgaagtgaccgcagtcaccatctcccttgccaaccgcctggttggaggactcgcttctgaaaacgtgaggtgggcagatgccgtgcagaacttcaaacagcaggaaaggacgttatgtggagacattttacttataacggctttcatttcctaccttggcttcttcacaaagaaataccggcagagcctcctggacagaacttggaggccctacctgagccagctgaaaactcccattccagtcaccccagccctggatcccctgaggatgctgatggatgatgctgacgtggctgcctggcagaacgagggcctcccagccgaccgcatgtccgtggagaatgccaccattctcatcaactgtgagcgctggccactcatggttgaccctcagctacaaggcatcaaatggatcaagaataaatatggtgaagatctccgggtcacgcagattggtcagaaaggctaccttcaaatcatagagcaggccctggaagctggagctgtggtgctgattgaaaatctagaggagtccattgatcctgttctgggacccctgcttgggagagaagtcattaaaaaaggacgattcattaaaattggagacaaagaatgtgaatacaatcccaagttccggctcatcctccacaccaagctggctaatcctcactaccagcctgagctgcaggctcaggccaccctgatcaacttcaccgtgaccagggatggcctggaggaccagttgctggccgctgtggtcagcatggagaggccagacttggagcagctgaagtccgatctcacaaagcagcagaatggattcaaaattaccctgaaaacgttggaagacagtcttctctctcgcctctcctccgcctctgggaacttcctgggagaaacagtgctggtggaaaacctagagatcaccaagcagactgctgccgaagttgagaaaaaggtccaggaggccaaggtgactgaagtgaaaatcaacgaggcccgagagcactaccggccagcagctgccagggcctcactgctctacttcatcatgaacgacctcagcaagatccatccaatgtaccagttttctctcaaggccttcagtatcgtcttccagaaggctgtggagagggctgctcctgacgaaagcctcagggagcgggtggccaacctaatagacagcataaccttctctgtgtaccagtacaccatccgcgggctctttgagtgtgataagctgacctaccttgcccagctcacctttcagattctcctcatgaaccgagaagtcaatgcagtggagttggatttcctgcttcgatctccagtgcagacgggcaccgccagccccgtggagttcctctcccatcaggcgtggggagctgtcaaggtactttcatcaatggaagaattctctaatctggatcgggacatagagggatctgctaagagctggaaaaagtttgtggagtccgaatgtcctgagaaagagaagctcccacaggagtggaagaacaagacagccctgcagcgcctctgcatgctgagagccatgcggcccgaccggatgacctatgctttgcgagattttgttgaagagaagttaggaagcaaatacgtggtgggaagagccctagattttgcaacctcatttgaagaatcgggaccagccactcctatgtttttcatcctgtctccaggggtggacccactgaaggatgtagaaagtcaaggaagaaaacttggatacaccttcaacaatcagaactttcacaacgtgtctttggggcaaggacaggaagtggtggctgaggctgcgctggacctcgctgccaagaaaggtcactgggttattttgcagaacattcacctggtggccaagtggctcagcaccctggagaagaagctggaggagcacagtgagaacagccacccagagttcagggtcttcatgagtgcagagccagcaccctcccctgagggccacatcatcccccagggcatcctggagaactccattaagatcaccaatgagccccccacgggcatgcatgccaacctgcacaaggccctggacaacttcactcaggacactctggagatgtgttctcgggagacggagtttaagagcatcctctttgctctttgttacttccatgcggtggtggcagaaagacgaaaatttgggccccagggatggaatcgctcatacccctttaacactggagacctcactatctctgtgaatgtcctctacaacttcctggaggccaacgcaaaggtcccctatgatgatttgcgctacctgtttggagagatcatgtatggaggccatatcacagatgactgggacagaagactctgcagaacctacctgggggaattcattcgaccagaaatgttagaaggagaactgtctttggccccagggttcccactcccaggcaacatggactacaatggttatcatcagtacatcgatgctgagctgcccccagaatccccctacctctatggcctccacccgaacgcagagattggcttcctgacccaaacctcagaaaagctcttccgcactgtgctggagctgcagcctcgggacagccaggccagagacggagcgggcgccacaagagaagaaaaggtcaaggcacttctggaagaaatattggagcgggtgacagacgagtttaacatcccagaactgatggccaaagtggaggagcgcaccccttacattgtagttgccttccaggagtgtggccggatgaatatcctcaccagagagattcagcgctcactgagggagctggagctcggcttaaagggggagctgactatgaccagccacatggagaacttacagaatgccctgtacttcgatatggtgccagagtcctgggctagacgagcctacccttccacagcaggcctggcagcctggtttccagacctcctcaacagaatcaaggagctagaggcttggacgggtgactttacaatgccctccactgtgtggctgacaggcttcttcaacccccagtcgttcctgactgccatcatgcagtccacggctcgcaagaatgagtggccactggaccagatggccctgcaatgtgacatgacgaagaagaacagagaagagtttaggagtcctcctcgggaaggggcctacatccatggcctcttcatggaaggtgcctgctgggacacacaggctgggatcattacagaggcaaagctgaaggatctgacaccccctatgcctgtgatgttcatcaaggccattcctgcagataagcaggactgccgcagtgtctattcctgtcctgtgtacaagactagtcagcggggacccacctacgtgtggactttcaacctgaagactaaggaaaacccatccaagtgggttctggctggagtagccttgcttctccagatttagcatcctgcagagccaccgagaaaataaaaaagctgggcttggaggctgcctagagggacaggtgggtgaagggtcaccacagacacttagaacggtaagaaaccatgagcactcacaattctgtagaattcctctagggaacttggagaggtgtgcctaaggtgaggctgagctgaaggaatgtgggcccaggtttcttaataaaatgatttactcttcaactgtgtctggcccaggatttgagagctgctgaatcataaatgatcatgtagagaccaagagaaacaaaccacaagggccctgaccttgttacacaacactatcctaggtgctcttcttccaggctaccccacgcagtccttggaccagtggtattggcatcacccatgaaccagaatctccattttaacaatctctctggaaaatctgtatgcacattatagtttgagaaacactatcctggagcaggggtcaccaacatttttccataaagagccagttagtgaatacttttagtgatttacaggccacaatgcctctgtttgaactttgcaactttgccgtggtagaccaacagtaaccataaatgatgagtaaatgaaggggtgtgattgcattctaacaaattttatttacaaaaa

SEQ ID NO: 117333 - DNA, 3145 bp, Artificial Sequence
  derived and/or modified sequence
gttttaagaaacaagaaaggtcagggtggctgtggttggaacctccaacaggaaggttgttcttcccacgaatccaaaggctgtacaagggcaaagacactacagctgcctgaagttagtgctttaggatatggagcataaagagaggaagagatgagatccacttggataccagcaccccactccagcctcgaggaagcttttacacagtctgccatggttttacacagtttaaaactggaagacagattctgctgatttttttttaatccgatctcacaaagcagcagaatggattcaaaattaccctgaaaacgttggaagacagtcttctctctcgcctctcctccgcctctgggaacttcctgggagaaacagtgctggtggaaaacctagagatcaccaagcagactgctgccgaagttgagaaaaaggtccaggaggccaaggtgactgaagtgaaaatcaacgaggcccgagagcactaccggccagcagctgccagggcctcactgctctacttcatcatgaacgacctcagcaagatccatccaatgtaccagttttctctcaaggccttcagtatcgtcttccagaaggctgtggagagggctgctcctgacgaaagcctcagggagcgggtggccaacctaatagacagcataaccttctctgtgtaccagtacaccatccgcgggctctttgagtgtgataagctgacctaccttgcccagctcacctttcagattctcctcatgaaccgagaagtcaatgcagtggagttggatttcctgcttcgatctccagtgcagacgggcaccgccagccccgtggagttcctctcccatcaggcgtggggagctgtcaaggtactttcatcaatggaagaattctctaatctggatcgggacatagagggatctgctaagagctggaaaaagtttgtggagtccgaatgtcctgagaaagagaagctcccacaggagtggaagaacaagacagccctgcagcgcctctgcatgctgagagccatgcggcccgaccggatgacctatgctttgcgagattttgttgaagagaagttaggaagcaaatacgtggtgggaagagccctagattttgcaacctcatttgaagaatcgggaccagccactcctatgtttttcatcctgtctccaggggtggacccactgaaggatgtagaaagtcaaggaagaaaacttggatacaccttcaacaatcagaactttcacaacgtgtctttggggcaaggacaggaagtggtggctgaggctgcgctggacctcgctgccaagaaaggtcactgggttattttgcagaacattcacctggtggccaagtggctcagcaccctggagaagaagctggaggagcacagtgagaacagccacccagagttcagggtcttcatgagtgcagagccagcaccctcccctgagggccacatcatcccccagggcatcctggagaactccattaagatcaccaatgagccccccacgggcatgcatgccaacctgcacaaggccctggacaacttcactcaggacactctggagatgtgttctcgggagacggagtttaagagcatcctctttgctctttgttacttccatgcggtggtggcagaaagacgaaaatttgggccccagggatggaatcgctcatacccctttaacactggagacctcactatctctgtgaatgtcctctacaacttcctggaggccaacgcaaaggtcccctatgatgatttgcgctacctgtttggagagatcatgtatggaggccatatcacagatgactgggacagaagactctgcagaacctacctgggggaattcattcgaccagaaatgttagaaggagaactgtctttggccccagggttcccactcccaggcaacatggactacaatggttatcatcagtacatcgatgctgagctgcccccagaatccccctacctctatggcctccacccgaacgcagagattggcttcctgacccaaacctcagaaaagctcttccgcactgtgctggagctgcagcctcgggacagccaggccagagacggagcgggcgccacaagagaagaaaaggtcaaggcacttctggaagaaatattggagcgggtgacagacgagtttaacatcccagaactgatggccaaagtggaggagcgcaccccttacattgtagttgccttccaggagtgtggccggatgaatatcctcaccagagagattcagcgctcactgagggagctggagctcggcttaaagggggagctgactatgaccagccacatggagaacttacagaatgccctgtacttcgatatggtgccagagtcctgggctagacgagcctacccttccacagcaggcctggcagcctggtttccagacctcctcaacagaatcaaggagctagaggcttggacgggtgactttacaatgccctccactgtgtggctgacaggcttcttcaacccccagtcgttcctgactgccatcatgcagtccacggctcgcaagaatgagtggccactggaccagatggccctgcaatgtgacatgacgaagaagaacagagaagagtttaggagtcctcctcgggaaggggcctacatccatggcctcttcatggaaggtgcctgctgggacacacaggctgggatcattacagaggcaaagctgaaggatctgacaccccctatgcctgtgatgttcatcaaggccattcctgcagataagcaggactgccgcagtgtctattcctgtcctgtgtacaagactagtcagcggggacccacctacgtgtggactttcaacctgaagactaaggaaaacccatccaagtgggttctggctggagtagccttgcttctccagatttagcatcctgcagagccaccgagaaaataaaaaagctgggcttggaggctgcctagagggacaggtgggtgaagggtcaccacagacacttagaacggtaagaaaccatgagcactcacaattctgtagaattcctctagggaacttggagaggtgtgcctaaggtgaggctgagctgaaggaatgtgggcccaggtttcttaataaaatgatttactcttcaa

SEQ ID NO: 117334 - DNA, 9198 bp, Artificial Sequence
  derived and/or modified sequence
gaggtccggggcattgtggacaaagctgcaaaagagatgggtatggagaaaaccttaaaggagctgcagactacctgggctggcatggaattccagtatgagccccacccacggaccaatgtccccctcctgtgctctgatgaggacctcatagaggttctggaggataatcaagttcaacttcagaacctggtgatgtccaagtatgttgctttcttcttggaggaggtgtcgggctggcagaagaagctgtccacagtggacgctgtcatctctatctggtttgaagtgcagcgaacatggactcacctggaaagcatattcactggatctgaagatattcgggcacagctaccccaggattctaaaaggtttgaaggcatcgacattgactttaaagagctagcttatgatgcccagaaaattccaaatgtagtgcaaaccaccaacaagccaggcctgtatgaaaagctggaggatattcagggcagattgtgcctgtgtgagaaggccctggcagagtacctcgacaccaagaggcttgccttcccgcggttttactttctctcctcctccgatctgttagacatcctttccaacggcacagctccacaacaggttcaacgtcacctttccaaactctttgacaacatggccaagatgcgattccagctagatgccagtggggaaccaaccaagacaagcctcggcatgtacagcaaagaagaggagtatgtggctttcagtgagccctgtgactgcagcgggcaggtagaaatatggctgaaccatgtccttggtcacatgaaggccactgtgaggcatgagatgacagaaggtgtaactgcctatgaagaaaagccgagggagcagtggctttttgaccacccagctcaggtggccctgacctgtactcagatctggtggacaacagaagtgggcatggcatttgccaggctggaggaaggctatgagagtgccatgaaggactattataagaagcaagtggcccagctcaaaacccttatcaccatgctgattggccagctctccaagggagaccggcagaagattatgactatatgcaccatcgatgtgcatgcccgggatgtggtagccaagatgattgctcagaaggtagacaatgcccaggctttcctctggctgtctcagctgcgccatcgttgggatgacgaggtcaaacactgctttgccaacatctgtgatgcccagtttttgtattcctatgagtacctgggaaacacacctcgcttggtgatcacacctttgactgacaggtgctacatcaccctcacccagtccctgcacctgaccatgagtggggctcccgcaggacctgcaggcacaggcaagaccgagaccaccaaggacctgggccgcgcactgggcatcctggtctatgtgttcaactgctcggagcagatggattacaagtcttgtggcaacatctacaaaggccttgctcagactggtgcctggggctgctttgatgagtttaatcgaatctccgtggaggtcttgtcagtggtggcagtgcaggtaaaaagcattcaagatgcgattagagataagaagcagtggttcagcttccttggggaggagatcagcctgaatccttctgtcggtatcttcatcaccatgaacccaggctatgctggccgcacagagctgccagagaatctcaagtctctcttcaggccttgtgcaatggtggttccagactttgaattgatctgtgaaatcatgctggtggcagaaggattcattgaagcccagtcattagccagaaagttcatcactctttaccagttgtgcaaagagcttctctccaaacaggatcactacgactggggcctacgggccatcaagtccgtgctggtggtggcaggatccctgaagagaggagaccctgaccggcctgaggaccaggtcctgatgcgctccttgcgggatttcaacatccccaagattgtgactgatgacatgcccatcttcatgggcctgatcggggacctctttcccgccctggatgtcccccggaggagagaccccaacttcgaagctttggttaggaaggcgatagtggatctgaagctccaggctgaggacaactttgtgctcaaggtggtccagctggaggagctcctggctgtgcggcactctgtatttgtggtgggtggcgctggtaccggcaagtcacaggtgctgaggtccttgcacaagacctatcagatcatgaaacggcgccccgtctggactgacctcaatcccaaagcagtcacaaatgatgagctctttggcatcatcaatccagccacaggagaatggaaggatggattgttctcttccatcatgcgggagcttgccaacatcacccatgatgggcccaagtggattttactggatggcgacatagatccaatgtggattgaatccctgaatactgtcatggatgataacaaggtgctgacattggccagcaatgagaggattcctctgaaccccaccatgaagctcctctttgagatcagccacctgcgcacagccactccagcaactgtctctagagcagggatcttgtacatcaacccggcagacttgggatggaaccctccagtgagcagctggattgagaagagggaaatccagacagagagagccaacttaaccattttgttcgacaagtatcttccaacctgcctagacacactcagaaccaggtttaagaagatcattcccatcccagagcagagcatggttcagatggtgtgtcaccttctggaatgtctcctgaccacggaggacatccctgcagactgccctaaggaaatttatgagcattattttgtgtttgctgccatctgggctttcggcggagcaatggtccaagatcagcttgtggactaccgggcagagttcagcaaatggtggctgactgagttcaaaacagtcaagtttccttcccaaggaaccatctttgactattacatcgacccagagaccaagaaattcgagccttggtccaagctcgtcccccagttcgaatttgaccccgagatgcccttgcaggcgtgtttggtgcacacgagtgagaccatccgtgtgtgctacttcatggagcggttgatggcgcggcagcggcctgtcatgctggtgggcacggctggcactggcaagtcggtgctggtgggagctaagctggccagccttgaccccgaggcatacctggtgaaaaacgtgccattcaactactacaccacgtcagcaatgctgcaggctgtcctggagaagcctctggaaaagaaggctggcagaaactatggccctccagggaacaagaaactcatctatttcattgatgacatgaacatgcctgaggtggatgcctacgggacggtgcagccccacaccatcatccggcagcatctggactatggccactggtatgatcggagcaagctgtccctaaaggagatcacaaatgtacagtatgtttcctgtatgaaccccacggcaggcagcttcaccatcaacccccggcttcagcgtcacttcagcgtgtttgtcctctccttcccgggggcagatgccctgtcctctatctacagcatcatcctcactcagcatctgaagctcggaaacttcccggcgtccctgcagaaatccatccccccactgatcgatctggccctcgccttccaccagaaaattgctaccaccttcctacccacaggaatcaaattccactacatcttcaacctcagagattttgccaacattttccagggcattctcttctcctcagtggaatgtgtgaaatccacatgggatcttataaggctctatctgcatgaatcaaatcgagtttatcgggataagatggtagaagaaaaggactttgatctttttgataaaatccagacagaagtgctcaagaaaacttttgatgatattgaagaccctgtggagcagacccaaagcccgaacctgtattgtcactttgcaaatggtattggggagcccaaatacatgcctgtacagtcttgggaacttttgacccagactctggtggaggccttggagaaccacaatgaagtcaacacagtgatggacctagttctctttgaggatgccatgcgccatgtctgccatatcaatcgcatcttggagtccccgcggggaaatgctctgctggttggtgtaggtgggagcggcaagcagagcctgacaaggctggcagctttcatcagctccatggatgtcttccagatcacactgcgcaaaggctaccagatccaggacttcaagatggacctggccagcctgtgtctgaaagctggagtgaagaatctcaacacagtgtttctcatgactgatgcccaagtggctgatgagaggttccttgtgctcatcaatgatcttttggcatctggggagatcccagatctctactctgatgatgaagttgaaaacatcataagcaatgtgaggaatgaagtcaagagccagggtctggttgacaacagagagaactgttggaagttctttatagatcggatccggcgacagctgaaggtgactctctgtttctcccctgtgggaaacaagctaagagtccgcagcaggaagttcccagccattgtgaactgcacagccatccactggttccacgagtggcctcagcaagcattggagtctgtcagcctccgcttcttgcagaacacagagggcattgagcccacagtaaagcagtcgattagcaaattcatggcctttgtccacacaagtgtcaaccaaacatcccagtcttatctgagcaatgaacagcgctacaactatacaactcccaagtcctttctggagttcatcagactctaccagagcttgttgcacaggcacagaaaagagctcaagtgcaagacagagcggttggagaacgggctgctgaagctgcatagcacctctgcccaggtggatgatctgaaagcaaagctggctgcccaggaagtagagctgaagcagaaaaatgaagatgcagacaaactgattcaggtcgtgggtgtggagactgacaaagtgagcagagagaaagccatggcagatgaagaggagcagaaggtggccgtcatcatgctagaggtgaaacagaagcagaaggactgtgaggaggacctggcaaaggctgagccagcactcacagcagcgcaggcagctctcaacaccctgaacaagaccaacctgacagagctgaagtcatttggctctccgcctctggccgtcagcaatgtcagcgctgcggtgatggtactgatggctcccaggggtagggtgcccaaggaccggagctggaaggctgctaaggtcaccatggccaaagtggatggcttcctggactcgctaataaacttcaacaaagagaacattcacgagaactgcctcaaagccatcaggccgtatctgcaagaccccgagttcaatcctgagtttgtggccaccaaatcctatgcggctgcaggcctctgctcctgggtcatcaatattgtgagattttatgaggtgttctgtgatgtggaacccaagcgccaggcactgaacaaagccaccgcggacctcacagctgcccaggagaagctggctgccatcaaagccaagatcgctcaccttaatgaaaacctggcaaagctcacagccaggtttgagaaagcaacagcagacaaactcaaatgtcagcaagaagccgaagtgaccgcagtcaccatctcccttgccaaccgcctggttggaggactcgcttctgaaaacgtgaggtgggcagatgccgtgcagaacttcaaacagcaggaaaggacgttatgtggagacattttacttataacggctttcatttcctaccttggcttcttcacaaagaaataccggcagagcctcctggacagaacttggaggccctacctgagccagctgaaaactcccattccagtcaccccagccctggatcccctgaggatgctgatggatgatgctgacgtggctgcctggcagaacgagggcctcccagccgaccgcatgtccgtggagaatgccaccattctcatcaactgtgagcgctggccactcatggttgaccctcagctacaaggcatcaaatggatcaagaataaatatggtgaagatctccgggtcacgcagattggtcagaaaggctaccttcaaatcatagagcaggccctggaagctggagctgtggtgctgattgaaaatctagaggagtccattgatcctgttctgggacccctgcttgggagagaagtcattaaaaaaggacgattcattaaaattggagacaaagaatgtgaatacaatcccaagttccggctcatcctccacaccaagctggctaatcctcactaccagcctgagctgcaggctcaggccaccctgatcaacttcaccgtgaccagggatggcctggaggaccagttgctggccgctgtggtcagcatggagaggccagacttggagcagctgaagtccgatctcacaaagcagcagaatggattcaaaattaccctgaaaacgttggaagacagtcttctctctcgcctctcctccgcctctgggaacttcctgggagaaacagtgctggtggaaaacctagagatcaccaagcagactgctgccgaagttgagaaaaaggtccaggaggccaaggtgactgaagtgaaaatcaacgaggcccgagagcactaccggccagcagctgccagggcctcactgctctacttcatcatgaacgacctcagcaagatccatccaatgtaccagttttctctcaaggccttcagtatcgtcttccagaaggctgtggagagggctgctcctgacgaaagcctcagggagcgggtggccaacctaatagacagcataaccttctctgtgtaccagtacaccatccgcgggctctttgagtgtgataagctgacctaccttgcccagctcacctttcagattctcctcatgaaccgagaagtcaatgcagtggagttggatttcctgcttcgatctccagtgcagacgggcaccgccagccccgtggagttcctctcccatcaggcgtggggagctgtcaaggtactttcatcaatggaagaattctctaatctggatcgggacatagagggatctgctaagagctggaaaaagtttgtggagtccgaatgtcctgagaaagagaagctcccacaggagtggaagaacaagacagccctgcagcgcctctgcatgctgagagccatgcggcccgaccggatgacctatgctttgcgagattttgttgaagagaagttaggaagcaaatacgtggtgggaagagccctagattttgcaacctcatttgaagaatcgggaccagccactcctatgtttttcatcctgtctccaggggtggacccactgaaggatgtagaaagtcaaggaagaaaacttggatacaccttcaacaatcagaactttcacaacgtgtctttggggcaaggacaggaagtggtggctgaggctgcgctggacctcgctgccaagaaaggtcactgggttattttgcaggacactctggagatgtgttctcgggagacggagtttaagagcatcctctttgctctttgttacttccatgcggtggtggcagaaagacgaaaatttgggccccagggatggaatcgctcatacccctttaacactggagacctcactatctctgtgaatgtcctctacaacttcctggaggccaacgcaaaggtcccctatgatgatttgcgctacctgtttggagagatcatgtatggaggccatatcacagatgactgggacagaagactctgcagaacctacctgggggaattcattcgaccagaaatgttagaaggagaactgtctttggccccagggttcccactcccaggcaacatggactacaatggttatcatcagtacatcgatgctgagctgcccccagaatccccctacctctatggcctccacccgaacgcagagattggcttcctgacccaaacctcagaaaagctcttccgcactgtgctggagctgcagcctcgggacagccaggccagagacggagcgggcgccacaagagaagaaaaggtcaaggcacttctggaagaaatattggagcgggtgacagacgagtttaacatcccagaactgatggccaaagtggaggagcgcaccccttacattgtagttgccttccaggagtgtggccggatgaatatcctcaccagagagattcagcgctcactgagggagctggagctcggcttaaagggggagctgactatgaccagccacatggagaacttacagaatgccctgtacttcgatatggtgccagagtcctgggctagacgagcctacccttccacagcaggcctggcagcctggtttccagacctcctcaacagaatcaaggagctagaggcttggacgggtgactttacaatgccctccactgtgtggctgacaggcttcttcaacccccagtcgttcctgactgccatcatgcagtccacggctcgcaagaatgagtggccactggaccagatggccctgcaatgtgacatgacgaagaagaacagagaagagtttaggagtcctcctcgggaaggggcctacatccatggcctcttcatggaaggtgcctgctgggacacacaggctgggatcattacagaggcaaagctgaaggatctgacaccccctatgcctgtgatgttcatcaaggccattcctgcagataagcaggactgccgcagtgtctattcctgtcctgtgtacaagactagtcagcggggacccacctacgtgtggactttcaacctgaagactaaggaaaacccatccaagtgggttctggctggagtagccttgcttctccagatttagcatcctgcagagccaccgagaaaataaaaaagctgggcttggaggctgcctagagggacaggtgggtgaagggtcaccacagacacttagaacggtaagaaaccatgagcactcacaattctgtagaattcctctagggaacttggagaggtgtgcctaaggtgaggctgagctgaaggaatgtgggcccaggtttcttaataaaatgatttactcttc

SEQ ID NO: 117335 - DNA, 13588 bp, Artificial Sequence
  derived and/or modified sequence
agcagaggagtgagtcctggccgcgtccccgtcgctagggaaaccgatgcagctggaggccgcgcgcgatgcggctcgcggaggagcgggccgcgctcgcggcggagaacgcggatggggaacccggcgccgaccgacgactgcgactcctggggacctacgtggccatgagcctgcggccggctgcgggcgcctgggagcgttgcgcggggagtgctgaggcggagcagctgctccaggccttcctgggccgcgatgctgccgaggggccgcggccgctgctggtggtgcggcccgggcccaggggcctggcaatacgccccgggctggaggtgggacctgagtcgggcctggctggcgctaaggcgctttttttccttcgcaccgggcccgagcctccagggcccgacagcttccgcggcgcagtggtctgcggggacctgcccgcggcacctctggagcacctagccgcgctgttctcggaggttgttctacccgtcctggccaatgagaagaatcgcctaaactggccccacatgatatgtgaggatgtcaggcggcacgcccacagcctccaatgtgacctctcagttatacttgagcaagtgaagggaaaaactttgctgcctcttccagcaggctcagaaaaaatggagtttgcggattccaaaagtgagacagtcttggattctatagataagtcagtcatctatgccattgagtctgcagtgatcaaatggagctaccaagtccaggtggtactcaagagagagtcttcccagccactcttacaaggggagaatcccacccctaaggtggagttggagttctggaagagcaggtatgaagatctgaaatacatctataatcaactgagaacaataacggtgaggggcatggccaagctcctggacaagcttcagagtagctactttccagctttcaaagccatgtacagagatgttgttgcagctctagcagaggcacaggacatccatgtgcacctgataccgctccagcgccacctggaagctctggagaatgcagaatttccggaggtgaagccccagctgcggcccctgctccacgtggtctgtctgatttgggccacatgcaagtcctaccgctccccgggaaggctgactgtgctgctccaggagatttgcaaccttctcatccagcaggcctctaattatctcagcccagaagacctgctgagaagtgaggtagaagaaagtcagagaaaactgcaagtggtctcagacactttgagcttcttcaagcaagagtttcaggacagaagggagaatctccacacttacttcaaagagaaccaggaagtcaaggaatgggatttccagtcttctttggtctttgtgcgattggatggcttcctgggacaactgcacgtggtggagggtcttctgaagacggccctggatttccacaaactgggaaaggtggagttcagcggcgtcagagggaatgctctgagtcagcaggtccagcaaatgcatgaagaatttcaagagatgtacaggcttctctcaggatcctcctccgactgcctgtacctccaaagcacggactttgaaaatgacgtctctgaatttaaccagaaagtagaagatcttgaccgaagattggggactatctttattcaagcttttgatgatgcacctggcttggagcatgcctttaagctgctagacatagcaggaaacctccttgaaagaccgctggtagcgagggatacatctgataaatacctggtcctcatccaaatgttcaacaaagatctggatgcagtgaggatgatctacagtcagcacgtccaggaggaagcagaacttgggttctccccggtgcacaagaacatgcccaccgtggctggcggcctccgctgggcacaggagctgaggcagcgcatccagggtcctttcagcaactttggacgcatcacacacccttgcatggaatctgcagaaggaaagcgaatgcaacaaaaatatgaagatatgctgtcattgctagaaaagtatgagacaagactttatgaggattggtgccggacagtatcagagaagtcacagtacaatctttcccaaccacttctaaaacgtgacccagagacgaaggagatcactatcaactttaacccacagctgatttcagtgctgaaagaaatgagctatcttgaacccagagagatgaaacacatgcctgagacagcagcagccatgttctcctccagggatttctatcggcagcttgtggctaatttagagttgatggcaaattggtacaacaaggttatgaaaactctgctggaggtggaatttccattagtggaggaagagctgcaaaatattgatctccgcctcagagcagcagaggagactttgaactggaaaacagaaggcatttgcgattatgtcactgaaatcaccagtagtattcatgatcttgaacaaagaattcagaaaactaaagacaatgtggaagagatccaaaacatcatgaaaacatgggtgactccaatatttaagacaaaagatggaaaaagggaatcccttctttctctggatgatcggcatgatcgaatggaaaaatattacaatctcatcaaggaatctggccttaagatccacgcccttgttcaggaaaacctgggtctattttcagcagacccaacctccaatatctggaagacttatgttaactctattgacaatttgttgctgaatggattctttcttgccattgagtgctccctcaagtatcttctggaaaatactgagtgtaaggcaggacttaccccaatatttgaagcacaactgagtctagccatcccagagctagttttctatccgtctctggagtctggagtgaaggggggtttctgtgacattgttgagggtctcatcaccagcatttttaggataccatctctggtgccacggctttccccacaaaatggctctcctcactatcaggtcgacctggacggtataccagatttggcaaacatgcggcgcacactcatggagagagtccagagaatgatgggcctctgctgtggctatcagagcaccttcagccagtattcgtacctctatgtggaggaccggaaggaggttctgggtcagtttctgctgtacgggcacatcctcactccggaagaaattgaagaccatgtggaagatggcatcccagagaaccctcccctcctttctcagtttaaagtgcaaatcgactcctatgaaacgctctatgaagaggtgtgcaggctggaacccatcaaggtgtttgacggctggatgaaaattgatattcgaccctttaaggcatctctgctgaatattattaagaggtggagcctcctgttcaaacagcatcttgtggaccacgtcactcacagcttggccaacctggatgcgtttataaagaagagtgagagcggcttactcaagaaagttgaaaaaggagatttccaaggcttggttgagatcatgggacaccttatggctgttaaagaacggcagagtaacactgatgagatgtttgagcccttaaagcagactattgaattgctgaagacctatgaacaagaattgccagaaacagtgtttaagcagctggaggagctgcctgagaaatggaacaacataaaaaaggtggccattactgtgaagcagcaggtggccccactgcaggcaaatgaagtgacactcctccgccagaggtgcacagccttcgatgcagaacagcagcaattctgggagcaattccacaaagaagccccgttcaggtttgatagcatccaccctcatcaaatgctggatgccaggcacatcgagatccagcagatggaatccactatggcctccatttctgagtctgccagcttatttgaagtcaatgtccctgactataagcagctgaggcagtgcaggaaggaggtctgccagctgaaggagctctgggacaccattggaatggtgacctccagcatccatgcctgggagaccacaccctggaggaatatcaacgtggaagccatggagttggagtgcaaacagtttgcccggcatatccgaaacctggacaaggaggtcagggcctgggatgcattcacaggcctggaaagcactgtgtggaacacgctgagctccctgagggcagtagctgagctgcagaatccagccatccgggagcggcactggaggcagctgatgcaggccaccggtgtgagcttcactatggaccaggacaccaccctagcgcacctgctgcagctccagctgcaccactatgaggatgaggtccggggcattgtggacaaagctgcaaaagagatgggtatggagaaaaccttaaaggagctgcagactacctgggctggcatggaattccagtatgagccccacccacggaccaatgtccccctcctgtgctctgatgaggacctcatagaggttctggaggataatcaagttcaacttcagaacctggtgatgtccaagtatgttgctttcttcttggaggaggtgtcgggctggcagaagaagctgtccacagtggacgctgtcatctctatctggtttgaagtgcagcgaacatggactcacctggaaagcatattcactggatctgaagatattcgggcacagctaccccaggattctaaaaggtttgaaggcatcgacattgactttaaagagctagcttatgatgcccagaaaattccaaatgtagtgcaaaccaccaacaagccaggcctgtatgaaaagctggaggatattcagggcagattgtgcctgtgtgagaaggccctggcagagtacctcgacaccaagaggcttgccttcccgcggttttactttctctcctcctccgatctgttagacatcctttccaacggcacagctccacaacaggttcaacgtcacctttccaaactctttgacaacatggccaagatgcgattccagctagatgccagtggggaaccaaccaagacaagcctcggcatgtacagcaaagaagaggagtatgtggctttcagtgagccctgtgactgcagcgggcaggtagaaatatggctgaaccatgtccttggtcacatgaaggccactgtgaggcatgagatgacagaaggtgtaactgcctatgaagaaaagccgagggagcagtggctttttgaccacccagctcaggtggccctgacctgtactcagatctggtggacaacagaagtgggcatggcatttgccaggctggaggaaggctatgagagtgccatgaaggactattataagaagcaagtggcccagctcaaaacccttatcaccatgctgattggccagctctccaagggagaccggcagaagattatgactatatgcaccatcgatgtgcatgcccgggatgtggtagccaagatgattgctcagaaggtagacaatgcccaggctttcctctggctgtctcagctgcgccatcgttgggatgacgaggtcaaacactgctttgccaacatctgtgatgcccagtttttgtattcctatgagtacctgggaaacacacctcgcttggtgatcacacctttgactgacaggtgctacatcaccctcacccagtccctgcacctgaccatgagtggggctcccgcaggacctgcaggcacaggcaagaccgagaccaccaaggacctgggccgcgcactgggcatcctggtctatgtgttcaactgctcggagcagatggattacaagtcttgtggcaacatctacaaaggccttgctcagactggtgcctggggctgctttgatgagtttaatcgaatctccgtggaggtcttgtcagtggtggcagtgcaggtaaaaagcattcaagatgcgattagagataagaagcagtggttcagcttccttggggaggagatcagcctgaatccttctgtcggtatcttcatcaccatgaacccaggctatgctggccgcacagagctgccagagaatctcaagtctctcttcaggccttgtgcaatggtggttccagactttgaattgatctgtgaaatcatgctggtggcagaaggattcattgaagcccagtcattagccagaaagttcatcactctttaccagttgtgcaaagagcttctctccaaacaggatcactacgactggggcctacgggccatcaagtccgtgctggtggtggcaggatccctgaagagaggagaccctgaccggcctgaggaccaggtcctgatgcgctccttgcgggatttcaacatccccaagattgtgactgatgacatgcccatcttcatgggcctgatcggggacctctttcccgccctggatgtcccccggaggagagaccccaacttcgaagctttggttaggaaggcgatagtggatctgaagctccaggctgaggacaactttgtgctcaaggtggtccagctggaggagctcctggctgtgcggcactctgtatttgtggtgggtggcgctggtaccggcaagtcacaggtgctgaggtccttgcacaagacctatcagatcatgaaacggcgccccgtctggactgacctcaatcccaaagcagtcacaaatgatgagctctttggcatcatcaatccagccacaggagaatggaaggatggattgttctcttccatcatgcgggagcttgccaacatcacccatgatgggcccaagtggattttactggatggcgacatagatccaatgtggattgaatccctgaatactgtcatggatgataacaaggtgctgacattggccagcaatgagaggattcctctgaaccccaccatgaagctcctctttgagatcagccacctgcgcacagccactccagcaactgtctctagagcagggatcttgtacatcaacccggcagacttgggatggaaccctccagtgagcagctggattgagaagagggaaatccagacagagagagccaacttaaccattttgttcgacaagtatcttccaacctgcctagacacactcagaaccaggtttaagaagatcattcccatcccagagcagagcatggttcagatggtgtgtcaccttctggaatgtctcctgaccacggaggacatccctgcagactgccctaaggaaatttatgagcattattttgtgtttgctgccatctgggctttcggcggagcaatggtccaagatcagcttgtggactaccgggcagagttcagcaaatggtggctgactgagttcaaaacagtcaagtttccttcccaaggaaccatctttgactattacatcgacccagagaccaagaaattcgagccttggtccaagctcgtcccccagttcgaatttgaccccgagatgcccttgcaggcgtgtttggtgcacacgagtgagaccatccgtgtgtgctacttcatggagcggttgatggcgcggcagcggcctgtcatgctggtgggcacggctggcactggcaagtcggtgctggtgggagctaagctggccagccttgaccccgaggcatacctggtgaaaaacgtgccattcaactactacaccacgtcagcaatgctgcaggctgtcctggagaagcctctggaaaagaaggctggcagaaactatggccctccagggaacaagaaactcatctatttcattgatgacatgaacatgcctgaggtggatgcctacgggacggtgcagccccacaccatcatccggcagcatctggactatggccactggtatgatcggagcaagctgtccctaaaggagatcacaaatgtacagtatgtttcctgtatgaaccccacggcaggcagcttcaccatcaacccccggcttcagcgtcacttcagcgtgtttgtcctctccttcccgggggcagatgccctgtcctctatctacagcatcatcctcactcagcatctgaagctcggaaacttcccggcgtccctgcagaaatccatccccccactgatcgatctggccctcgccttccaccagaaaattgctaccaccttcctacccacaggaatcaaattccactacatcttcaacctcagagattttgccaacattttccagggcattctcttctcctcagtggaatgtgtgaaatccacatgggatcttataaggctctatctgcatgaatcaaatcgagtttatcgggataagatggtagaagaaaaggactttgatctttttgataaaatccagacagaagtgctcaagaaaacttttgatgatattgaagaccctgtggagcagacccaaagcccgaacctgtattgtcactttgcaaatggtattggggagcccaaatacatgcctgtacagtcttgggaacttttgacccagactctggtggaggccttggagaaccacaatgaagtcaacacagtgatggacctagttctctttgaggatgccatgcgccatgtctgccatatcaatcgcatcttggagtccccgcggggaaatgctctgctggttggtgtaggtgggagcggcaagcagagcctgacaaggctggcagctttcatcagctccatggatgtcttccagatcacactgcgcaaaggctaccagatccaggacttcaagatggacctggccagcctgtgtctgaaagctggagtgaagaatctcaacacagtgtttctcatgactgatgcccaagtggctgatgagaggttccttgtgctcatcaatgatcttttggcatctggggagatcccagatctctactctgatgatgaagttgaaaacatcataagcaatgtgaggaatgaagtcaagagccagggtctggttgacaacagagagaactgttggaagttctttatagatcggatccggcgacagctgaaggtgactctctgtttctcccctgtgggaaacaagctaagagtccgcagcaggaagttcccagccattgtgaactgcacagccatccactggttccacgagtggcctcagcaagcattggagtctgtcagcctccgcttcttgcagaacacagagggcattgagcccacagtaaagcagtcgattagcaaattcatggcctttgtccacacaagtgtcaaccaaacatcccagtcttatctgagcaatgaacagcgctacaactatacaactcccaagtcctttctggagttcatcagactctaccagagcttgttgcacaggcacagaaaagagctcaagtgcaagacagagcggttggagaacgggctgctgaagctgcatagcacctctgcccaggtggatgatctgaaagcaaagctggctgcccaggaagtagagctgaagcagaaaaatgaagatgcagacaaactgattcaggtcgtgggtgtggagactgacaaagtgagcagagagaaagccatggcagatgaagaggagcagaaggtggccgtcatcatgctagaggtgaaacagaagcagaaggactgtgaggaggacctggcaaaggctgagccagcactcacagcagcgcaggcagctctcaacaccctgaacaagaccaacctgacagagctgaagtcatttggctctccgcctctggccgtcagcaatgtcagcgctgcggtgatggtactgatggctcccaggggtagggtgcccaaggaccggagctggaaggctgctaaggtcaccatggccaaagtggatggcttcctggactcgctaataaacttcaacaaagagaacattcacgagaactgcctcaaagccatcaggccgtatctgcaagaccccgagttcaatcctgagtttgtggccaccaaatcctatgcggctgcaggcctctgctcctgggtcatcaatattgtgagattttatgaggtgttctgtgatgtggaacccaagcgccaggcactgaacaaagccaccgcggacctcacagctgcccaggagaagctggctgccatcaaagccaagatcgctcaccttaatgaaaacctggcaaagctcacagccaggtttgagaaagcaacagcagacaaactcaaatgtcagcaagaagccgaagtgaccgcagtcaccatctcccttgccaaccgcctggttggaggactcgcttctgaaaacgtgaggtgggcagatgccgtgcagaacttcaaacagcaggaaaggacgttatgtggagacattttacttataacggctttcatttcctaccttggcttcttcacaaagaaataccggcagagcctcctggacagaacttggaggccctacctgagccagctgaaaactcccattccagtcaccccagccctggatcccctgaggatgctgatggatgatgctgacgtggctgcctggcagaacgagggcctcccagccgaccgcatgtccgtggagaatgccaccattctcatcaactgtgagcgctggccactcatggttgaccctcagctacaaggcatcaaatggatcaagaataaatatggtgaagatctccgggtcacgcagattggtcagaaaggctaccttcaaatcatagagcaggccctggaagctggagctgtggtgctgattgaaaatctagaggagtccattgatcctgttctgggacccctgcttgggagagaagtcattaaaaaaggacgattcattaaaattggagacaaagaatgtgaatacaatcccaagttccggctcatcctccacaccaagctggctaatcctcactaccagcctgagctgcaggctcaggccaccctgatcaacttcaccgtgaccagggatggcctggaggaccagttgctggccgctgtggtcagcatggagaggccagacttggagcagctgaagtccgatctcacaaagcagcagaatggattcaaaattaccctgaaaacgttggaagacagtcttctctctcgcctctcctccgcctctgggaacttcctgggagaaacagtgctggtggaaaacctagagatcaccaagcagactgctgccgaagttgagaaaaaggtccaggaggccaaggtgactgaagtgaaaatcaacgaggcccgagagcactaccggccagcagctgccagggcctcactgctctacttcatcatgaacgacctcagcaagatccatccaatgtaccagttttctctcaaggccttcagtatcgtcttccagaaggctgtggagagggctgctcctgacgaaagcctcagggagcgggtggccaacctaatagacagcataaccttctctgtgtaccagtacaccatccgcgggctctttgagtgtgataagctgacctaccttgcccagctcacctttcagattctcctcatgaaccgagaagtcaatgcagtggagttggatttcctgcttcgatctccagtgcagacgggcaccgccagccccgtggagttcctctcccatcaggcgtggggagctgtcaaggtactttcatcaatggaagaattctctaatctggatcgggacatagagggatctgctaagagctggaaaaagtttgtggagtccgaatgtcctgagaaagagaagctcccacaggagtggaagaacaagacagccctgcagcgcctctgcatgctgagagccatgcggcccgaccggatgacctatgctttgcgagattttgttgaagagaagttaggaagcaaatacgtggtgggaagagccctagattttgcaacctcatttgaagaatcgggaccagccactcctatgtttttcatcctgtctccaggggtggacccactgaaggatgtagaaagtcaaggaagaaaacttggatacaccttcaacaatcagaactttcacaacgtgtctttggggcaaggacaggaagtggtggctgaggctgcgctggacctcgctgccaagaaaggtcactgggttattttgcaggacactctggagatgtgttctcgggagacggagtttaagagcatcctctttgctctttgttacttccatgcggtggtggcagaaagacgaaaatttgggccccagggatggaatcgctcatacccctttaacactggagacctcactatctctgtgaatgtcctctacaacttcctggaggccaacgcaaaggtcccctatgatgatttgcgctacctgtttggagagatcatgtatggaggccatatcacagatgactgggacagaagactctgcagaacctacctgggggaattcattcgaccagaaatgttagaaggagaactgtctttggccccagggttcccactcccaggcaacatggactacaatggttatcatcagtacatcgatgctgagctgcccccagaatccccctacctctatggcctccacccgaacgcagagattggcttcctgacccaaacctcagaaaagctcttccgcactgtgctggagctgcagcctcgggacagccaggccagagacggagcgggcgccacaagagaagaaaaggtcaaggcacttctggaagaaatattggagcgggtgacagacgagtttaacatcccagaactgatggccaaagtggaggagcgcaccccttacattgtagttgccttccaggagtgtggccggatgaatatcctcaccagagagattcagcgctcactgagggagctggagctcggcttaaagggggagctgactatgaccagccacatggagaacttacagaatgccctgtacttcgatatggtgccagagtcctgggctagacgagcctacccttccacagcaggcctggcagcctggtttccagacctcctcaacagaatcaaggagctagaggcttggacgggtgactttacaatgccctccactgtgtggctgacaggcttcttcaacccccagtcgttcctgactgccatcatgcagtccacggctcgcaagaatgagtggccactggaccagatggccctgcaatgtgacatgacgaagaagaacagagaagagtttaggagtcctcctcgggaaggggcctacatccatggcctcttcatggaaggtgcctgctgggacacacaggctgggatcattacagaggcaaagctgaaggatctgacaccccctatgcctgtgatgttcatcaaggccattcctgcagataagcaggactgccgcagtgtctattcctgtcctgtgtacaagactagtcagcggggacccacctacgtgtggactttcaacctgaagactaaggaaaacccatccaagtgggttctggctggagtagccttgcttctccagatttagcatcctgcagagccaccgagaaaataaaaaagctgggcttggaggctgcctagagggacaggtgggtgaagggtcaccacagacacttagaacggtaagaaaccatgagcactcacaattctgtagaattcctctagggaacttggagaggtgtgcctaaggtgaggctgagctgaaggaatgtgggcccaggtttcttaataaaatgatttactcttcaactgtgtctggcccaggatttgagagctgctgaatcataaatgatcatgtagagaccaagagaaaca

SEQ ID NO: 117336 - protein, 360 aa, Artificial Sequence
  derived and/or modified sequence
MIPLLLAALLCVPAGALTCYGDSGQPVDWFVVYKLPALRGSGEAAQRGLQYKYLDESSGGWRDGRALINSPEGAVGRSLQPLYRSNTSQLAFLLYNDQPPQPSKAQDSSMRGHTKGVLLLDHDGGFWLVHSVPNFPPPASSAAYSWPHSACTYGQTLLCVSFPFAQFSKMGKQLTYTYPWVYNYQLEGIFAQEFPDLENVVKGHHVSQEPWNSSITLTSQAGAVFQSFAKFSKFGDDLYSGWLAAALGTNLQVQFWHKTVGILPSNCSDIWQVLNVNQIAFPGPAGPSFNSTEDHSKWCVSPKGPWTCVGDMNRNQGEEQRGGGTLCAQLPALWKAFQPLVKNYQPCNGMARKPSRAYKI

SEQ ID NO: 117337 - protein, 305 aa, Artificial Sequence
  derived and/or modified sequence
MIPLLLAALLCVPAGALTCYGDSGQPVDWFVVYKLPALRGSGEAAQRGLQYKYLDESSGGWRDGRALINSPEGAVGRSLQPLYRSNTSQLAFLLYNDQPPQPSKAQDSSMRGHTKGKQLTYTYPWVYNYQLEGIFAQEFPDLENVVKGHHVSQEPWNSSITLTSQAGAVFQSFAKFSKFGDDLYSGWLAAALGTNLQVQFWHKTVGILPSNCSDIWQVLNVNQIAFPGPAGPSFNSTEDHSKWCVSPKGPWTCVGDMNRNQGEEQRGGGTLCAQLPALWKAFQPLVKNYQPCNGMARKPSRAYKI

SEQ ID NO: 117338 - DNA, 1083 bp, Artificial Sequence
  derived and/or modified sequence
atgatccccctgctgctggccgccctgctgtgcgtgcccgccggcgccctgacctgctacggcgacagcggccagcccgtggactggttcgtggtgtacaagctgcccgccctgagaggcagcggcgaggccgcccagagaggcctgcagtacaagtacctggacgagagcagcggcggctggagagacggcagagccctgatcaacagccccgagggcgccgtgggcagaagcctgcagcccctgtacagaagcaacaccagccagctggccttcctgctgtacaacgaccagcccccccagcccagcaaggcccaggacagcagcatgagaggccacaccaagggcgtgctgctgctggaccacgacggcggcttctggctggtgcacagcgtgcccaacttccccccccccgccagcagcgccgcctacagctggccccacagcgcctgcacctacggccagaccctgctgtgcgtgagcttccccttcgcccagttcagcaagatgggcaagcagctgacctacacctacccctgggtgtacaactaccagctggagggcatcttcgcccaggagttccccgacctggagaacgtggtgaagggccaccacgtgagccaggagccctggaacagcagcatcaccctgaccagccaggccggcgccgtgttccagagcttcgccaagttcagcaagttcggcgacgacctgtacagcggctggctggccgccgccctgggcaccaacctgcaggtgcagttctggcacaagaccgtgggcatcctgcccagcaactgcagcgacatctggcaggtgctgaacgtgaaccagatcgccttccccggccccgccggccccagcttcaacagcaccgaggaccacagcaagtggtgcgtgagccccaagggcccctggacctgcgtgggcgacatgaacagaaaccagggcgaggagcagagaggcggcggcaccctgtgcgcccagctgcccgccctgtggaaggccttccagcccctggtgaagaactaccagccctgcaacggcatggccagaaagcccagcagagcctacaagatctag

SEQ ID NO: 117339 - DNA, 1083 bp, Artificial Sequence
  derived and/or modified sequence
atgattccactcctgctggcagcattattatgtgttcccgcaggtgccctgacgtgctacggtgatagcggacaacccgtggattggtttgtggtctacaagctgccagcgcttcgcgggtcgggcgaagccgcgcaaagaggactgcagtataagtacttggatgaatcctcgggcggctggcgagatggccgcgcgcttataaactctcccgagggcgctgtaggtaggtccctgcagccactgtatcggtctaacacttcgcagttggcatttctgttatacaatgaccagccaccccagccctcaaaggctcaagactcttccatgagaggacatacaaaaggcgtgctgctgctggaccacgacggcgggttctggctggtgcattccgtgccaaattttcctccacctgctagcagtgcagcctattcgtggccgcacagtgcctgtacatatgggcagaccctgttgtgcgtcagtttcccttttgcccaattttctaaaatgggcaagcagctcacatatacatacccttgggtttataattatcagctggaaggtatcttcgcacaagaatttcctgatctggagaatgtcgttaagggacaccatgtgtcacaggaaccctggaacagctcaatcaccttgaccagccaggccggagcagtcttccagtcgttcgcaaaattttccaaattcggggatgacctgtactctggatggttagcagcagcactgggaacgaacctgcaggtccagttttggcacaagactgtaggcatcttgccttcaaactgctcagatatatggcaagtgctaaacgtgaaccagattgccttccccggccctgcaggcccatcttttaactcaactgaagaccatagtaaatggtgcgtcagtccaaagggtccctggacctgtgtgggtgatatgaacagaaaccagggcgaggaacagaggggcggcgggacgttatgtgcacaactcccagctctctggaaggccttccagccacttgtgaaaaattatcagccctgtaacgggatggccaggaaaccctcgcgcgcctataaaatatag

SEQ ID NO: 117340 - DNA, 1083 bp, Artificial Sequence
  derived and/or modified sequence
atgatccccctgctgctggccgccctgctgtgtgtgcctgctggggccctgacctgctacggggacagcggccagcctgtggactggtttgtggtgtacaagctgcctgccctgcggggcagcggggaggccgcccagaggggcctgcagtacaagtacctggatgagagcagcggcggctggagagatggccgggccctgatcaacagccctgagggcgctgtgggccgcagcctgcagcccctgtaccgcagcaacaccagccagctggccttcctgctgtacaatgaccagcccccccagcccagcaaggcccaggacagctccatgaggggccacaccaagggcgtgctgctgctggaccatgatggcggcttctggctggtgcacagcgtgcccaacttccccccaccagccagcagcgctgcctacagctggccccacagcgcctgcacctacggccagaccctgctgtgtgtgtccttcccctttgcccagttcagcaagatgggcaagcagctgacctacacctacccctgggtgtacaactaccagctggagggcatctttgcccaggagttcccagacctggagaatgtggtgaagggccaccacgtgtcccaggagccctggaacagcagcatcaccctgaccagccaggccggggctgtgttccagagctttgccaagttcagcaagtttggagatgacctgtacagcggctggctggccgccgccctgggcaccaacctgcaggtgcagttctggcacaagacagtgggcatcctgcccagcaactgcagcgacatctggcaggtgctgaatgtgaaccagatcgccttccctggccctgctggccccagcttcaacagcacagaggaccacagcaagtggtgtgtgagccccaagggcccctggacctgtgtgggggacatgaacagaaaccagggcgaggagcagaggggcggcggcaccctgtgtgcccagctgcctgccctgtggaaggccttccagcccctggtgaagaactaccagccctgcaatggcatggccaggaagcccagccgggcctacaagatctag

SEQ ID NO: 117341 - DNA, 1083 bp, Artificial Sequence
  derived and/or modified sequence
atgatccccctgctgctggccgccctgctgtgcgtgcccgccggcgcactaacatgctatggggacagcgggcagccggtcgattggtttgttgtttataagttgcctgccctacgtggcagcggcgaagccgctcaaaggggcctccagtataaatacctcgacgagagctccggaggttggagagatggtcgggcccttattaacagccccgagggtgctgtcgggcgcagcctgcagcccctttaccgttcgaatacgtcccagttggcctttctgctgtacaacgaccaacccccccagcccagtaaagctcaggactcttccatgcgggggcatacaaagggcgtgcttcttctggatcatgatggaggattctggcttgtgcattctgtaccaaacttcccacctcctgcatccagtgcagcatatagttggccgcatagcgcgtgcacctatggccagacgttgctttgcgtgtccttcccttttgcacaattctctaagatggggaagcaattgacatacacctatccatgggtgtataactatcagctggagggaatctttgcccaggagtttccggatctcgagaacgtcgtgaagggtcaccatgtgtctcaggaaccatggaattcaagtataaccttaacctcacaggccggcgcagtgttccaaagcttcgctaagttttctaagttcggcgacgatctctattcagggtggctcgccgcggctctcgggaccaatctacaggtgcagttctggcacaagaccgtgggcatcctgccaagcaactgctctgatatttggcaagtcctcaacgtgaatcagatcgcttttccaggtcctgccgggccctcttttaatagcaccgaggaccattctaagtggtgtgttagcccgaagggtccgtggacctgcgttggggatatgaaccggaaccagggggaagagcagaggggtggcgggacactgtgtgcacaactccccgccctctggaaggccttccagcctctggtcaagaactatcagccgtgtaatggtatggcgagaaaaccatcccgagcctataagatctag

SEQ ID NO: 117342 - DNA, 1083 bp, Artificial Sequence
  derived and/or modified sequence
atgatacccttactgctagctgccctgctttgtgttccggctggggcactgacctgctatggggattctgggcagcccgtcgactggttcgtcgtttataaacttcctgccctcagaggatctggcgaagcagcacagcgaggtctgcaatataaatacctggatgagtctagtggcggttggcgcgatggtcgtgcattaatcaactctccagaaggcgcagtgggtagatcgctgcagcctctatatagatcgaacacttctcaactggctttcctgctgtacaacgatcagccacctcagccgtcaaaggcacaagacagctcaatgcgaggccatactaagggagtcctcctcctggatcacgacggagggttctggttggtgcacagcgtccccaattttccacccccagcttcgagtgctgcctactcgtggccccattctgcctgtacttatgggcaaaccctcctctgcgtaagcttccctttcgcgcaattcagtaaaatgggcaagcagctgacgtacacatacccgtgggtgtataactaccagctggagggtattttcgctcaggagtttcctgacttagagaatgtggtcaagggccaccacgtaagccaggaaccatggaattcaagcattaccttaacctctcaggcgggtgcagtgttccagagcttcgcgaagttttctaagttcggagatgacttatactccgggtggctcgcagcagccttgggaactaacctgcaagttcaattttggcacaagaccgtcggaatcttacctagcaattgttccgacatatggcaggttcttaacgtcaatcagatcgcttttcctggaccagccggacccagcttcaactccaccgaggatcattcaaagtggtgcgtttcaccaaagggcccttggacctgcgtcggggacatgaacagaaatcagggcgaggagcaaagaggtggaggcaccctgtgcgcccagctgccggctctgtggaaggcttttcaacccttggtgaagaattaccaaccctgcaatgggatggctcgcaagccctctcgtgcctataaaatctag

SEQ ID NO: 117343 - DNA, 918 bp, Artificial Sequence
  derived and/or modified sequence
atgatcccacttctcctggctgcattgctgtgtgtcccggctggagctttgacatgctacggcgactcaggacagcccgtggattggttcgtagtgtacaagttgcctgctctccggggcagcggggaggccgcccaacgcgggctgcagtataagtatctggacgaatcctctggaggttggagggacggacgcgcactgatcaattccccagagggagcagtggggagaagcctgcaacctctttacagaagcaacacttctcaactcgctttcctcctgtacaatgaccagcctccacagccatccaaggcacaggattcctccatgcgaggccacaccaagggaaaacagttgacatacacttacccttgggtgtacaattaccagcttgaaggtattttcgctcaggagtttccagatctggagaatgtagtgaaaggccaccatgtgtctcaggaaccatggaactcaagcattactttaactagccaggctggcgcagtcttccagtcatttgcaaaattctccaagtttggcgatgacctttactccggctggctagcagctgccctgggaactaatttacaagtccagttttggcacaaaaccgttggtatactgcctagtaattgttccgatatctggcaagtgttgaatgtcaatcaaatcgcttttccggggcccgctgggcctagttttaacagtacggaagatcacagcaagtggtgtgtatcccctaagggcccatggacttgtgtgggggatatgaacaggaaccagggggaagagcagcgcggcggtggcaccctctgtgcacagttgccggctctctggaaggcgtttcagcctctggttaagaactatcagccatgcaacggcatggcaagaaagcccagccgggcatataagatctag

SEQ ID NO: 117344 - DNA, 918 bp, Artificial Sequence
  derived and/or modified sequence
atgatccccctgctgctggccgccctgctgtgtgtgcctgctggggccctgacctgctacggggacagcggccagcctgtggactggtttgtggtgtacaagctgcctgccctgcggggcagcggggaggccgcccagaggggcctgcagtacaagtacctggatgagagcagcggcggctggagagatggccgggccctgatcaacagccctgagggcgctgtgggccgcagcctgcagcccctgtaccgcagcaacaccagccagctggccttcctgctgtacaatgaccagcccccccagcccagcaaggcccaggacagctccatgaggggccacaccaagggcaagcagctgacctacacctacccctgggtgtacaactaccagctggagggcatctttgcccaggagttcccagacctggagaatgtggtgaagggccaccacgtgtcccaggagccctggaacagcagcatcaccctgaccagccaggccggggctgtgttccagagctttgccaagttcagcaagtttggagatgacctgtacagcggctggctggccgccgccctgggcaccaacctgcaggtgcagttctggcacaagacagtgggcatcctgcccagcaactgcagcgacatctggcaggtgctgaatgtgaaccagatcgccttccctggccctgctggccccagcttcaacagcacagaggaccacagcaagtggtgtgtgagccccaagggcccctggacctgtgtgggggacatgaacagaaaccagggcgaggagcagagaggaggcggcaccctgtgtgcccagctgcctgccctgtggaaggccttccagcccctggtgaagaactaccagccctgcaatggcatggccaggaagcccagccgggcctacaagatctag

SEQ ID NO: 117345 - DNA, 918 bp, Artificial Sequence
  derived and/or modified sequence
atgatccccctgctgctggccgccctgctgtgcgtgcccgccggcgcattaacttgctacggagattcagggcagcccgtcgattggtttgtggtgtacaaactgcctgcattgcggggatctggagaggcagcccaacgcggactgcaatacaaatatttggatgagagctcggggggctggcgggacggacgcgcactgatcaactccccagagggggccgtgggacgcagcttgcagccgctataccgcagtaacacctctcagttggccttcttgctctacaacgatcagcctccacaaccctccaaagcgcaggactcttctatgcgcggacataccaagggcaagcagctcacgtatacatacccttgggtgtacaattaccagctggaggggatcttcgcccaggaattccccgacctcgaaaacgtggtcaagggtcaccacgtgagccaggaaccctggaactccagtataaccctcactagccaggcaggggccgtgttccagagttttgctaagttcagcaaattcggtgacgatctttatagtggctggcttgccgcagccctgggcactaaccttcaagtgcaattttggcacaaaacagtaggcatcctgccaagtaactgttctgacatttggcaagttttgaatgtaaatcagatagctttccccggccctgccggacctagctttaatagtacagaggaccacagcaaatggtgtgtaagtccaaaaggtccttggacttgtgtcggtgacatgaaccgtaatcaaggtgaagagcaacggggaggcgggacgctttgcgcccagctgcccgctttgtggaaagccttccagcccctcgtgaagaattatcagccctgcaatggcatggccagaaaacccagcagagcctataagatctag

SEQ ID NO: 117346 - DNA, 918 bp, Artificial Sequence
  derived and/or modified sequence
atgatacctcttctgctggcagccctgctatgtgttcccgcaggtgctctgacgtgttacggagactctggacaacctgttgactggtttgtggtgtacaagctacccgcacttaggggatctggcgaggctgctcagcggggtctgcagtataagtacctggacgagtccagcggaggatggcgtgacggcagagcattgattaattctccagagggagcggtgggcaggagtctccagccactttaccggagcaacacttcacagctcgccttcctgctctacaatgatcagccccctcagccttccaaggctcaggacagttcaatgcggggacacacaaaagggaaacagctcacctatacgtatccctgggtttacaactaccaattagagggaatctttgcgcaggaatttcctgacctggagaacgttgtgaagggccatcatgtgtcgcaggagccatggaacagctcaattaccctgacttctcaggcaggggcagttttccagtctttcgccaaattctcaaaattcggagacgatttatatagcgggtggctggccgcagccctgggcacaaatcttcaggttcagttttggcataagacggtagggatcctgccctctaattgttccgatatctggcaggtgttaaatgtaaaccagattgcattcccaggtccggcagggccttcattcaattcaacggaagatcactccaagtggtgcgtcagtccaaagggaccatggacttgtgttggcgacatgaacagaaatcagggagaggagcaacgaggcggaggcaccttatgtgctcaactgcctgctctgtggaaggcatttcagcccctcgttaagaactaccagccttgcaacggcatggccagaaagcctagtagggcttacaaaatttag

SEQ ID NO: 117347 - DNA, 918 bp, Artificial Sequence
  derived and/or modified sequence
atgatccccctgctgctggccgccctgctgtgcgtgcccgccggcgccctgacctgctacggcgacagcggccagcccgtggactggttcgtggtgtacaagctgcccgccctgagaggcagcggcgaggccgcccagagaggcctgcagtacaagtacctggacgagagcagcggcggctggagagacggcagagccctgatcaacagccccgagggcgccgtgggcagaagcctgcagcccctgtacagaagcaacaccagccagctggccttcctgctgtacaacgaccagcccccccagcccagcaaggcccaggacagcagcatgagaggccacaccaagggcaagcagctgacctacacctacccctgggtgtacaactaccagctggagggcatcttcgcccaggagttccccgacctggagaacgtggtgaagggccaccacgtgagccaggagccctggaacagcagcatcaccctgaccagccaggccggcgccgtgttccagagcttcgccaagttcagcaagttcggcgacgacctgtacagcggctggctggccgccgccctgggcaccaacctgcaggtgcagttctggcacaagaccgtgggcatcctgcccagcaactgcagcgacatctggcaggtgctgaacgtgaaccagatcgccttccccggccccgccggccccagcttcaacagcaccgaggaccacagcaagtggtgcgtgagccccaagggcccctggacctgcgtgggcgacatgaacagaaaccagggcgaggagcagagaggcggcggcaccctgtgcgcccagctgcccgccctgtggaaggccttccagcccctggtgaagaactaccagccctgcaacggcatggccagaaagcccagcagagcctacaagatctag

SEQ ID NO: 117348 - DNA, 2010 bp, Artificial Sequence
  derived and/or modified sequence
gagtctgtaccctcgtgatgtccccgccccggttcccaggcaagtttagggaagtgaaaggcgccaggtgccagtcctggcctctgatgtaacccagcgccccgcagtcccgacacagattcctggatctcagccccatagcagctatgatcccgctgctgctggcagcgctgctgtgcgtccccgccggggccctgacctgctacggggactccgggcagcctgtagactggttcgtggtctacaagctgccagctcttagagggtccggggaggcggcgcagagagggctgcagtacaagtatctggacgagagctccggaggctggcgggacggcagggcactcatcaacagcccggagggggccgtgggccgaagcctgcagccgctgtaccggagcaacaccagccagctcgccttcctgctctacaatgaccaaccgcctcaacccagcaaggctcaggactcttccatgcgtgggcacacgaagggtgtcctgctccttgaccacgatgggggcttctggctggtccacagtgtacctaacttccctccaccggcctcctctgctgcatacagctggcctcatagcgcctgtacctacgggcagaccctgctctgtgtgtcttttcccttcgctcagttctcgaagatgggcaagcagctgacctacacctacccctgggtctataactaccagctggaagggatctttgcccaggaattccccgacttggagaatgtggtcaagggccaccacgttagccaagaaccctggaacagcagcatcacactcacatcccaggccggggctgttttccagagctttgccaagttcagcaaatttggagatgacctgtactccggctggttggcagcagcccttggtaccaacctgcaggtccagttctggcacaaaactgtaggcatcctgccctctaactgctcggatatctggcaggttctgaatgtgaaccagatagctttccctggaccagccggcccaagcttcaacagcacagaggaccactccaaatggtgcgtgtccccaaaagggccctggacctgcgtgggtgacatgaatcggaaccagggagaggagcaacggggtgggggcacactgtgtgcccagctgccagccctctggaaagccttccagccgctggtgaagaactaccagccctgtaatggcatggccaggaagcccagcagagcttataagatctaacccttatggccaggtgcagtggctcacgtatgtaatcccagcactttgggaagccaaggagggaggatcacttgaactcaggaattcgagaccagcctgggctacatagtgagaccacatctctactagaacttaaaaaaagttagccaggcacggtgataaatgcctgtagtcccagccactgaagccagaggatcgattgaaccagggagatcatggtcacagtgaactatgattacgccaacctgggtcacatagcaagactctgtttcaaaaaaaaagggggggcgggggacgggtgggtgcagtggctcacatctgtaaccccagcactttgggaggctgagatgggcagatcacttgaggtcaggagttcgagaccagcctggccaacatggtgaaaccccatatccattaaaaatatttaaaaattagccagacatggtggcacgcgtctgtggtcctagctcctcgggaggctgaggcaggagaatcgcttgaactcgggaggcagaggttgtcatgagctgagctaacaccacggcacttcagcctgggtgacagaatgagactctgtgtcaaaaaaataaaaaataaaaaatctaagggctcaggaaccagtttggacttgattttgaatcccagttcatccccttcctagctgtatgaccttgattgtgtgccttaaccgctctgtgacacagtctacctgtctgcaaaatgggaaacataatacctgccatcaggattgttgaggagtaaataaatggaaattggtgga

SEQ ID NO: 117349 - DNA, 1037 bp, Artificial Sequence
  derived and/or modified sequence
agtcctggcctctgatgtaacccagcgccccgcagtcccgacacagattcctggatctcagccccatagcagctatgatcccgctgctgctggcagcgctgctgtgcgtccccgccggggccctgacctgctacggggactccgggcagcctgtagactggttcgtggtctacaagctgccagctcttagagggtccggggaggcggcgcagagagggctgcagtacaagtatctggacgagagctccggaggctggcgggacggcagggcactcatcaacagcccggagggggccgtgggccgaagcctgcagccgctgtaccggagcaacaccagccagctcgccttcctgctctacaatgaccaaccgcctcaacccagcaaggctcaggactcttccatgcgtgggcacacgaagggcaagcagctgacctacacctacccctgggtctataactaccagctggaagggatctttgcccaggaattccccgacttggagaatgtggtcaagggccaccacgttagccaagaaccctggaacagcagcatcacactcacatcccaggccggggctgttttccagagctttgccaagttcagcaaatttggagatgacctgtactccggctggttggcagcagcccttggtaccaacctgcaggtccagttctggcacaaaactgtaggcatcctgccctctaactgctcggatatctggcaggttctgaatgtgaaccagatagctttccctggaccagccggcccaagcttcaacagcacagaggaccactccaaatggtgcgtgtccccaaaagggccctggacctgcgtgggtgacatgaatcggaaccagggagaggagcaacggggtgggggcacactgtgtgcccagctgccagccctctggaaagccttccagccgctggtgaagaactaccagccctgtaatggcatggccaggaagcccagcagagcttataagatctaacccttatggccaggtgcagtggctcacgtatgtaatcccagcact

SEQ ID NO: 117350 - protein, 4646 aa, Artificial Sequence [sequence omitted]

SEQ ID NO: 117351 - DNA, 13941 bp, Artificial Sequence
  derived and/or modified sequence
atgagcgagcccggggggggcgggggcgaggatggctcagcaggtctcgaggtatcagcagtccaaaatgttgccgatgtctcagttctgcaaaagcatcttcgcaaactggtccccctcctgctggaggacggcggggaggctccggcagcccttgaagctgctttagaggagaaatcagcactcgaacaaatgcgtaagttcctgtctgatccacaagtgcacaccgtgcttgtggaaaggtcaacactcaaggaagatgtgggagacgagggggaggaggagaaagagtttatttcgtacaacatcaatattgatattcattatggagtaaaatccaatagcctcgctttcataaagcggacacctgtgatcgacgcggacaaaccggttagcagtcaactaagggtgctaaccctgtcagaagattctccctacgaaactctgcactctttcatttccaatgccgtcgcccccttttttaagagttacatcagagagtccggtaaagccgaccgagatggcgacaaaatggctccatccgtggagaagaagatcgctgagctggagatggggctgctgcacctgcaacagaatatcgagataccggagattagccttcctatccacccgatgattacgaatgtcgctaaacagtgttacgaacgcggagagaaacccaaggttacagactttggcgacaaagtagaggacccaaccttcttgaaccagcttcagagcggggtgaaccgctggatcagggaaatacaaaaggtgactaagctcgaccgcgaccctgccagtggaaccgccttacaagaaatatccttttggctgaatcttgagcgtgccctctataggattcaggagaagagggagtcgccagaggtgttgctgacactcgacattctgaagcatggcaagagattccacgcgaccgtaagtttcgacactgacaccggcttgaagcaggctctggagacagtgaatgattacaaccccctgatgaaggatttccctctgaacgatctgctgtccgccaccgagcttgataagattcggcaggcgttagttgccatcttcacacacttgcgtaaaatccgtaataccaaataccctatccaacgcgctttgagattggtcgaggctatcagccgggacctgtcatcccagctccttaaagtcctgggaacaagaaaattgatgcatgttgcatacgaggagtttgaaaaagttatggtagcctgttttgaagtgtttcagacctgggatgacgagtacgagaagctgcaggttctgctgagagacattgttaaacggaagagagaggaaaatctgaaaatggtgtggcgaatcaatccagcacacaggaaacttcaggcccggctcgaccagatgagaaagttcaggcgacaacacgagcagctgcgggccgttattgttcgtgtgctccggccgcaggtgactgctgtggcacagcagaatcaaggcgaggtgcctgaaccccaagatatgaaagtggccgaggtgttgtttgacgctgccgatgccaatgctattgaagaagttaacttggcgtatgaaaatgtaaaggaggttgacggtctggatgtctctaaggaaggtacggaggcctgggaagccgccatgaagaggtatgacgaaagaattgaccgtgtagagactcgcatcaccgccaggctgagagatcagttgggcaccgccaagaatgcaaatgaaatgtttagaatattctctcgctttaacgcactgttcgtacgcccccacatcaggggcgccatccgcgagtatcagacccagttaatccaaagagtaaaagacgacatcgagtctctacatgacaaattcaaggttcagtacccacagagccaggcctgcaaaatgagtcatgtcagagatcttccccccgtgagcggaagtattatttgggctaaacagattgataggcagttgactgcctatatgaagcgagttgaagatgtactaggcaagggctgggagaaccacgtcgaggggcagaagctgaaacaagatggtgacagcttccgtatgaaactgaatacccaggaaatttttgacgactgggctagaaaagtgcagcagagaaacttaggcgtgtcagggcgaatcttcaccatagagagcacacgtgttcgcggccggactggcaatgtgctcaagttgaaggtcaattttctgcctgaaataatcacgttgtccaaggaggttagaaatttaaaatggctgggcttcagagtccctctggcaatagtgaacaaggcacaccaggccaaccagttgtatccgttcgcaatttcgctgatagaatctgtcagaacatatgagcgaacgtgcgagaaggttgaagaacggaataccatttccctgctggtcgccggtttgaaaaaagaagtccaggccttgatcgctgaggggatcgcccttgtgtgggagagttacaagttggacccatacgtgcagagactggcagagacggttttcaattttcaagagaaggtggacgatctgctcatcatcgaggaaaagattgacctggaggttaggagtctggaaacttgcatgtatgaccacaaaacattctccgagattctgaaccgtgtccagaaagcagtggacgacctgaatcttcactcttacagtaacctccccatctgggttaacaaactcgacatggaaatcgaaagaattctgggagtacgcttacaagccggactgagagcctggactcaggtcctgctcgggcaggctgaggacaaagcagaagtcgatatggatacggacgccccacaggtgagtcataaacctggcggtgagcctaaaatcaaaaacgttgttcacgagcttcgaattacgaaccaggtgatctacctcaaccctccgatcgaggaatgtaggtataaactctatcaggaaatgttcgcctggaaaatggtggtgctgtctctaccccggatccagagccagcgctatcaagtgggcgttcactacgaactgaccgaggaagaaaaattttaccggaatgccctgacccgcatgcccgacggtcccgtggcgcttgaggaatcttacagcgccgtgatggggattgtgtctgaggttgaacagtacgtgaaagtttggctccagtaccagtgcctctgggacatgcaggccgagaatatttacaatcggctgggcgaggacctgaacaaatggcaggcgttgctcgtgcagattcgaaaagctaggggcaccttcgataacgcggagaccaaaaaggagttcggccccgttgtgatagattacgggaaggtgcagagcaaagtcaacctaaagtacgacagctggcataaggaagtcctgtccaagtttggtcagatgctgggatcaaacatgaccgagtttcacagtcagatctccaagtccaggcaagagttggagcagcactccgtggacaccgccagtaccagtgacgctgtcacattcatcacgtacgtacaatccctcaagaggaagatcaagcagtttgagaaacaggtggaactgtatcgaaatggacaacgcctactggagaagcagcggtttcaattccccccgtcatggctctacatcgataatattgagggcgaatggggtgcctttaacgatatcatgagacggaaggacagcgccattcagcagcaagtcgccaacctgcagatgaaaatcgtccaggaagacagggcagtagagagcaggacaaccgatttactgactgattgggagaagaccaaacccgtgactggcaacctgcgccctgaggaggctctccaagccctgactatatatgaggggaagttcggtcggttgaaggatgacagggaaaagtgcgccaaggcaaaggaagctctcgagctgacagacacaggcctcttgtctggcagcgaagaacgagtccaagtggcccttgaggaattgcaggatctcaaaggggtgtggtctgagctgtctaaggtgtgggaacaaattgatcagatgaaggagcagccatgggtgtccgtgcaacctcgaaagctgagacagaaccttgacgctctgctgaatcagctcaaaagctttcctgcacgccttcgccagtatgcttcatatgagtttgtccagcggctgttgaaaggctacatgaaaatcaatatgttagtgattgagttgaagagcgaggcgctaaaggaccgacactggaaacaactgatgaaacgcctgcatgtaaattgggtggttagcgagttaactttgggtcaaatttgggacgtagacctgcaaaaaaatgaggctatagtcaaggacgtcttactggtggcccagggcgaaatggcactcgaagagttcctgaaacagataagggaggtgtggaatacttatgagcttgatctggttaactaccagaacaagtgtcgtttgatcagaggctgggacgatctgtttaataaggttaaggagcacatcaattcagttagtgcaatgaagctgagcccgtattacaaagtgttcgaagaggacgcattgagttgggaagacaagctgaaccgcatcatggcactgttcgacgtctggattgatgtgcagagacgctgggtgtacctggaggggatatttacggggtccgccgacatcaaacatctgcttcccgtggaaacacagcgcttccagtccatttccaccgagttcctagcccttatgaaaaaggtgagtaagagtccactggtgatggacgtgctcaatattcagggggtccagcgttccttggagcgcctggctgatcttctcggaaagattcagaaggcccttggcgagtacttggagagagaaagatcctcctttcctcgtttttactttgtcggagacgaagatcttttggagatcattggcaattccaaaaacgtggccaagctgcaaaagcatttcaaaaaaatgtttgcaggagttagcagtattattctaaatgaagataattccgtggtcctggggatttcaagccgagaaggggaagaagtgatgtttaaaacccccgtgtctatcactgagcatcccaaaattaatgagtggctgaccctggttgaaaaagaaatgagggtgacactggcgaagctgctcgcggagagcgtgactgaagtggagatcttcggaaaggccactagtattgatccgaatacctatataacctggatcgataagtatcaggcccaattagtagtgctctctgcgcagatcgcctggagcgaaaacgtggagacagcccttagctccatggggggaggcggagacgccgcccctctacattctgtgctatcaaacgtcgaagtgacgctcaacgttttggctgatagcgtgctgatggaacagccacctctgcggcggcgaaaactggaacatctgattacagaactagtgcaccagcgggacgtaacgcgctctctaatcaaatcaaagattgataatgccaaaagctttgagtggctatctcagatgcgattctactttgatccgaagcagactgatgtgttacaacaattgagtatccagatggcaaatgctaaattcaactatggtttcgagtacttgggagtgcaggacaagctcgtacagacccctctgaccgacagatgctatctaaccatgacacaagcactggaggctaggctggggggttccccattcggcccagccggcaccggtaagacggaaagcgtaaaagccctggggcaccaactggggaggtttgttttagtctttaactgtgacgagacatttgatttccaggcaatgggacgaattttcgtcggcctctgccaggtgggagcgtggggctgttttgacgagttcaaccgtttggaggaacggatgctctctgccgtgtcacagcaggtacagtgtatccaggaggctcttcgggaacacagcaatcccaattacgacaaaacctccgccccgatcacctgcgaactgttgaacaaacaggtaaaggtgtctcccgatatggccatatttattacgatgaatcctggatatgccggcaggagtaacctgccagataatttaaagaagctgtttagatccttggccatgactaagcctgaccgccagctgatcgcccaggttatgctttattctcaggggttcagaacggccgaagtcctggctaacaagatcgtccctttctttaagctgtgtgatgagcagctttcctcacagtctcactacgacttcggactaagagcactgaaatctgtgcttgtgagtgccgggaacgtcaaacgtgaaaggatacagaagattaaaagagaaaaagaagaacggggggaggcagtggatgaaggagaaatcgctgaaaaccttccagaacaggagatcctgatccagtccgtgtgtgagacaatggtgcccaagctggtcgctgaagacatcccgcttcttttttcgctgctgagcgacgtgttcccgggggtgcagtaccaccgcggtgagatgaccgccctgagagaagagctaaaaaaagtgtgtcaggagatgtacctcacgtacggtgacggtgaggaggtcgggggcatgtgggtcgagaaggtccttcagttataccagatcacgcagattaaccacgggctgatgatggtcggtccctccggcagcgggaagtctatggcgtggagggtcttgctgaaggctctcgagaggctggagggcgttgagggcgtggcccatatcatcgacccgaaagccatcagcaaggaccatctgtacggaaccctggatccaaatacaagagagtggacagatggtctatttacccacgttcttcgcaaaataatagactctgtgcggggggaactccagaaacgccagtggattgtgtttgatggagatgttgacccagaatgggttgagaacctgaattccgtcctagacgacaataaattactgacactccctaacggagagcggttgagcctgccccctaatgttcggattatgtttgaagtgcaagatctgaaatatgctacactggcaaccgtgagtcggtgtggaatggtgtggttcagtgaagatgttctcagtactgatatgatctttaacaacttcctcgcgcgacttagaagcataccccttgacgagggcgaggacgaggcccagagaagacgtaaaggtaaggaagacgagggagaggaggcagccagcccgatgttgcagattcagcgggatgccgcaaccatcatgcagccatacttcacttcaaatggtctcgtcacaaaggctctagaacatgctttccagctggaacacatcatggatctcacccgcttgcggtgtttaggaagtctgttctctatgctacatcaagcctgccgcaatgttgcacagtacaatgcgaatcatcctgatttccctatgcaaatagagcagctcgagagatacattcagaggtacctcgtgtacgctattctctggtcactctccggagattctcggttaaagatgagggccgagctcggcgagtatatcagacggattactacggtcccactgcctaccgctcccaacatcccaatcatcgattatgaggttagcatttcaggggagtggtctccgtggcaagccaaggtgccccaaattgaggtggaaacacacaaggtggctgctccggatgtggttgtgcctaccctcgacactgtgaggcatgaggccttactgtatacttggttggcggaacacaagcccctggtgctctgcggacctccaggttcagggaagaccatgacattgttctctgctctaagagccttaccggatatggaggtggtgggactgaacttttctagtgccaccacaccagagctcctgttgaagacatttgatcattattgcgaataccggaggacacccaatggggtggtgctagccccagtccaattaggaaagtggcttgttctgttttgcgacgaaatcaacctgccggatatggacaaatacgggacccagagagttattagcttcatccgtcagatggttgaacacggcggattctacagaacaagcgaccaaacatgggtcaaactggaaagaatccaatttgtgggtgcttgtaaccctccgacggatccagggaggaagccactgtcccaccggtttttacggcatgtgcccgttgtgtacgttgactatcccggacccgctagtctcactcagatatacggaacatttaaccgggcgatgctccgcctcattccttccctgcggacctacgccgagcctctgactgcagctatggtggagttttatacaatgagccaggagcggtttacccaggacactcagccacactatatctactctcccagagagatgacaagatgggtgcggggcatctttgaggctcttagaccacttgagaccctgccagtggagggcctcatacgaatctgggcccatgaggccctccggctatttcaagataggctagtggaagacgaagaacgacggtggacggatgaaaatatcgacacagttgccctgaagcatttccctaatatagatcgcgaaaaggcaatgtcacgacccattctttattccaattggctttccaaggattacatacccgtagaccaggaagagctaagggactacgtgaaggcgcgcctaaaggtgttctatgaagaagagctggatgtgcctttggtgctgttcaacgaagttctggaccatgtgttgcgcatagaccggatctttagacagcctcaaggacacctgctcctcattggggtttctggggctggcaagaccactctttcaagattcgtggcatggatgaatgggttgtccgtataccagattaaggtgcaccgaaagtacactggcgaggattttgatgaggacctcaggacagtgctgagacgaagtggatgtaaaaatgagaaaatcgcattcatcatggacgaatctaacgtccttgactccgggtttctggagagaatgaacacgctgctggctaacggcgaggttcctggactgtttgagggggacgagtacgctactctgatgacccagtgtaaggaaggagcccagaaagaagggctgatgttggactctcacgaagagctgtacaagtggtttaccagccaggtgatcagaaacctgcacgtggtctttaccatgaacccctcctcagaaggcctgaaagatcgtgcagctactagtccggccctgtttaatagatgtgtgcttaattggttcggagattggtccacagaggccttgtatcaggtcgggaaggagtttaccagcaagatggatctggaaaagccgaattatatagtgccagattacatgcccgtggtgtacgataaactgccacaacctccctcacatcgcgaagccatcgtcaatagctgcgtgttcgttcaccagacactgcatcaggcaaacgcacggctggccaagcgaggcggtcgcactatggcaatcacaccccgtcattatctcgatttcattaatcattacgccaacttgttccatgaaaagagatctgaattggaggagcagcagatgcatttgaatgtgggccttagaaaaatcaaggaaaccgtagatcaggtggaagagcttaggagggatctgcgaattaaatctcaggaactcgaggtcaagaatgctgctgcgaatgataaactgaaaaagatggttaaggaccagcaggaggccgaaaagaagaaagtcatgtctcaggaaattcaggagcaattacacaagcagcaggaagtgatcgccgataaacagatgtctgtaaaggaggaccttgacaaagttgaaccagctgtgatcgaagcccagaacgcagtgaagagtattaaaaaacagcacttggtggaagtacgtagtatggcgaacccacctgccgctgttaagctcgcactagaatctatctgcttgctgctaggagagtctactaccgattggaagcagatacggtccatcatcatgagggagaacttcatccctaccatcgtgaatttctccgctgaagaaatttccgatgccattagagaaaaaatgaaaaaaaattacatgtctaacccaagctacaattatgagatagtcaatagagctagtctggcatgcggcccgatggttaaatgggcaatcgcccagttaaattatgcggacatgttgaagagggtggagcccctgcgaaatgaacttcagaagctcgaagatgacgctaaagataaccagcagaaagcaaatgaagtcgaacaaatgattcgggatcttgaggcatccatcgctagatataaagaggagtacgctgtgctgatctcagaggctcaggccattaaggctgacctcgcggccgtagaagccaaagttaatcgcagcactgctctgctgaagtctctgtccgccgaacgcgagagatgggaaaagacttccgagacttttaagaaccaaatgagcactattgctggcgattgccttctctccgccgcctttatagcctatgccgggtactttgaccagcagatgagacagaacttatttactacctggtcgcaccatctgcagcaggctaacatccagtttcgcaccgacatcgcccggaccgaatatctctctaatgctgatgagcgactccgatggcaggccagcagtttacccgctgacgatctgtgcacggaaaatgcaatcatgctgaagcggttcaatcggtatccgctgattattgacccttctggacaagcgacagagtttattatgaatgagtacaaagaccgcaagatcacacgcacatcgttcctggatgatgcttttcggaagaatctcgagagcgctctcagatttggcaacccactgctggtacaggatgtggagtcttacgacccagttctgaaccccgtgctcaatcgcgaagtgcggcggacaggtggtagagtcttgattaccttgggagaccaggacatcgacctcagtcccagcttcgtgatctttttgagcacacgcgaccctacagtcgaattccctcccgacctgtgctctcgggtgacttttgtgaatttcaccgtcacccggagttcgttacagagtcagtgcttaaatgaagtcctaaaggccgagcgccccgatgtggacgagaagagatctgatcttctgaagctgcaaggggaatttcagcttcgactgagacaactggaaaagagccttctgcaggccctcaatgaggtaaagggaaggatattagacgatgatactataataaccactttagagaacctgaaaagagaagctgcggaggttacgcgcaaagtcgaggaaaccgacatcgttatgcaggaagtagaaacagtaagtcagcagtaccttccgctctcgactgcctgtagttccatctactttactatggagtccctgaaacagatacatttcctctatcagtattccttgcagttcttcttagacatctatcataatgtgctctacgagaatcctaatctcaaaggagtgacagaccatacacaacgtctctcaatcattaccaaagacctcttccaggtcgcatttaatcgggtggcaaggggcatgctgcaccaggatcacatcacgttcgccatgctgcttgcccggatcaagctaaaaggcacagtcggggagcccacgtacgacgcagagtttcaacacttcctgagagggaacgagatcgtattgtcagctggttctacgcctcgcatccagggtctgacggtggagcaggctgaggccgtagtgcggctaagctgtctccccgccttcaaggacctcatagcaaaagtacaggcggacgaacagttcggcatctggttagatagctccagcccggaacagactgtgccttacttatggtccgaagaaacacccgccacacccataggacaggcaattcatcggctgctcctgattcaagcatttcggccagatcgcctgctggccatggcacacatgttcgtgtctaccaatctcggcgaatcctttatgagtattatggagcagcccctcgacctaacacatatagtcggaaccgaagttaagcccaacacccccgtgctgatgtgtagcgtgcctggatacgatgccagcggacatgtggaggatttagcggctgagcagaacacccaaattacctctatcgctatcggatcagcagaggggtttaaccaagcagacaaggctatcaacactgccgtgaaaagcggacggtgggtaatgttaaagaatgtccaccttgcgcctgggtggttgatgcagctggagaagaagctacatagtctccagccgcatgcctgtttccgcctcttcctgactatggaaatcaaccccaaagtccctgtgaacctgctccgtgcgggccgaatttttgtcttcgagcctcctccaggcgtaaaggcaaatatgctgagaactttctcaagtatcccggtgagccggatatgtaagtcacctaatgaacgtgcccgactgtactttttgctcgcctggttccatgctatcattcaggaaaggctcaggtacgccccactcggatggtcaaagaagtacgaatttggcgaaagtgacctccgcagcgcatgcgacactgtagatacatggttggatgataccgcaaagggaaggcagaatatctcaccagacaaaatcccctggtcagccttgaaaactctgatggcccagagcatctacggcggccgagtcgataatgagtttgatcagcggctgctgaacacgttcctcgaacgcttgtttaccactcgatcctttgatagcgagttcaaactcgcgtgcaaggtggatggacacaaggatatccagatgcccgacggcatcagaagggaggagttcgtgcagtgggtcgagctgcttcctgatacccagacaccaagctggctagggctgcctaataacgccgaacgggttctgctgacaacccagggcgttgacatgattagcaagatgctcaaaatgcaaatgctcgaagacgaagatgatctggcctatgcagagactgaaaaaaagacaaggactgactcgacaagcgatgggcgtccggcctggatgaggaccctgcatactacagctagcaattggttacacctgatccctcagaccctgtcacatcttaaacggacagtggaaaacattaaggatccactcttcagattttttgaacgggaagtgaagatgggggctaaattgctccaagacgtcaggcaggaccttgccgacgtggttcaggtatgtgagggcaaaaaaaaacagactaactacctgaggacactgatcaacgagctcgttaagggcatcctccctcgtagctggagtcactatacagtgccagcaggtatgacagtaattcagtgggtatcagatttcagcgaacggattaaacagctccagaacatcagtctggctgccgcctcgggaggcgcaaaagagctgaaaaatattcatgtctgcttgggcggcctttttgtgcctgaggcctacataactgcaaccaggcagtatgtcgcccaggccaattcgtggagtctcgaagaactgtgcttggaggtgaacgtgaccacttcacagggcgccacactggatgcttgttctttcggggtgacgggtctgaaattgcagggtgcaacatgcaacaataataagctctctttatctaatgcaattagcacagccctgcctctcacccagctccgatgggtcaaacagactaacacagaaaaaaaggcttcagtcgtgacgctcccggtatatttgaatttcacacgcgctgacctcatattcacagttgattttgaaattgccaccaaggaggaccccagaagtttttatgagcggggcgtggcggtgctatgcacagagtag

SEQ ID NO: 117352 - DNA, 13941 bp, Artificial Sequence
  derived and/or modified sequence
atgtctgagcccggcggcggcggcggggaggatggcagcgctggcctggaggtgtctgctgtgcagaatgtggctgatgtgtctgtgctgcagaagcacctgaggaagctggtgcccctgctgctggaggatggaggagaggccccagctgccctggaggccgccctggaggagaagagcgccctggagcagatgaggaagttcctgagtgacccccaggtgcacacagtgctggtggagaggagcaccctgaaggaggatgtgggagatgaaggagaggaggagaaggagttcatctcctacaacatcaacatcgacatccactatggagtgaagagcaacagcctggccttcatcaagaggacccctgtgattgatgctgacaagcctgtgagcagccagctgcgggtgctgaccctgtctgaggacagcccctatgagaccctgcacagcttcatcagcaatgctgtggcccccttcttcaagagctacatccgggagagcggcaaggctgacagagatggagacaagatggcccccagcgtggagaagaagattgctgagctggagatgggcctgctgcacctgcagcagaacatcgagatccctgagatcagcctgcccatccaccccatgatcaccaacgtggccaagcagtgctatgagcggggggagaagcccaaggtgacagactttggagacaaggtggaggaccccaccttcctgaaccagctgcagagcggcgtgaaccgctggatccgggagatccagaaggtgaccaagctggaccgggaccctgccagcggcacagccctgcaggagatctccttctggctgaacctggagcgggccctgtaccgcatccaggagaagcgggagagccctgaggtgctgctgaccctggacatcctgaagcacggcaagcgcttccacgccaccgtgtcctttgacacagacaccggcctgaagcaggccctggagaccgtgaatgactacaaccccctgatgaaggacttccccctgaatgacctgctgagcgccacagagctggacaagatccggcaggccctggtggccatcttcacccacctgaggaagatccggaacaccaagtaccccatccagagggccctgcggctggtggaggccatcagccgggacctgagcagccagctgctgaaggtgctgggcaccaggaagctgatgcacgtggcctatgaggagtttgagaaggtgatggtggcctgctttgaggtgttccagacctgggatgatgaatatgagaagctgcaggtgctgctgcgggacatcgtgaagaggaagcgggaggagaacctgaagatggtgtggaggatcaacccagcccacaggaagctgcaggcccggctggaccagatgaggaagttccggcggcagcacgagcagctgcgggccgtcatcgtgcgggtgctgcggccccaggtgacagctgtggcccagcagaaccagggcgaggtgcctgagccccaggacatgaaggtggccgaggtgctgtttgatgctgctgatgccaatgccatcgaggaggtgaacctggcctatgaaaatgtgaaggaggtggatggcctggatgtgtccaaggagggcacagaggcctgggaggccgccatgaagagatatgatgaaagaattgacagagtggagacccgcatcacagcccggctgcgggaccagctgggcacagccaagaatgccaatgagatgttccgcatcttcagccgcttcaatgccctgtttgtgcggccccacatccggggggccatccgggagtaccagacccagctgatccagagggtgaaggatgacatcgagagcctgcatgacaagttcaaggtgcagtacccccagagccaggcctgcaagatgagccacgtgcgggacctgccccctgtgtctggcagcatcatctgggccaagcagattgaccggcagctgacagcctacatgaagagggtggaggatgtgctgggcaagggctgggagaaccacgtggagggccagaagctgaagcaggatggagacagcttcaggatgaagctgaacacccaggagatctttgatgactgggccaggaaggtgcagcagaggaacctgggcgtgtctggccgcatcttcaccatcgagagcaccagggtgcggggccgcactggaaatgtgctgaagctgaaggtgaacttcctgcctgagatcatcaccctgagcaaggaggtgaggaacctgaagtggctgggcttccgggtgcccctggccatcgtgaacaaggcccaccaggccaaccagctgtacccctttgccatcagcctcatcgagagcgtgaggacctatgaaagaacctgtgagaaggtggaggagaggaacaccatcagcctgctggtggccggcctgaagaaggaggtgcaggccctgattgctgagggcatcgccctggtgtgggagagctacaagctggacccctacgtgcagaggctggccgagaccgtcttcaacttccaggagaaggtggatgacctgctgatcatcgaggagaagattgacctggaggtgcgcagcctggagacctgcatgtatgaccacaagaccttcagcgagatcctgaacagagtgcagaaggctgtggatgacctgaacctgcacagctacagcaacctgcccatctgggtgaacaagctggacatggagattgagcgcatcctgggcgtgcggctgcaggccggcctgcgggcctggacccaggtgctgctgggccaggccgaggacaaggccgaggtggacatggacacagatgccccccaggtgagccacaagccaggaggagagcccaagatcaagaatgtggtgcatgagctgcgcatcaccaaccaggtgatctacctgaacccccccattgaagaatgtcgctacaagctgtaccaggagatgtttgcctggaagatggtggtgctgagcctgccccgcatccagagccagcgctaccaggtgggcgtgcactatgagctgacagaggaggagaagttctacagaaatgccctgaccaggatgccagatggccctgtggccctggaggagagctacagcgctgtgatgggcatcgtgtctgaggtggagcagtatgtgaaggtgtggctgcagtaccagtgcctgtgggacatgcaggccgagaacatctacaaccggctgggggaggacctgaacaagtggcaggccctgctggtgcagatcaggaaggcccggggcacctttgacaatgctgagaccaagaaggagtttggacctgtggtgattgattatggcaaggtgcagagcaaggtgaacctgaagtatgacagctggcacaaggaggtgctgagcaagtttggccagatgctgggcagcaacatgacagagttccacagccagatcagcaagagccggcaggagctggagcagcacagcgtggacacagccagcaccagtgatgctgtgaccttcatcacctacgtgcagagcctgaagaggaagatcaagcagtttgagaagcaggtggagctgtacagaaatggccagaggctgctggagaagcagcgcttccagtttcctccttcctggctgtacatcgacaacatcgagggggagtggggcgccttcaatgacatcatgaggaggaaggacagcgccatccagcagcaggtggccaacctgcagatgaagatcgtgcaggaggacagagctgtggagagcaggaccacagacctgctgacagactgggagaagaccaagcctgtgacaggcaacctgcggcctgaggaggccctgcaggccctgaccatctatgagggcaagtttggccgcctgaaggatgaccgggagaagtgtgccaaggccaaggaggccctggagctgacagacaccggcctgctgagcggcagcgaggagcgggtgcaggtggccctggaggagctgcaggacctgaagggcgtgtggagcgagctgagcaaggtgtgggagcagattgaccagatgaaggagcagccctgggtgtctgtgcagcccaggaagctgcggcagaacctggatgccctgctgaaccagctgaagagcttccctgcccggctgcggcagtatgccagctatgaatttgtgcagaggctgctgaagggctacatgaagatcaacatgctggtgattgagctgaagtctgaggccctgaaggacagacactggaagcagctgatgaagaggctgcacgtgaactgggtggtgtctgagctgaccctgggccagatctgggatgtggacctgcagaagaatgaggccatcgtgaaggatgtgctgctggtggcccagggcgagatggccctggaggagttcctgaagcagatccgggaggtgtggaacacctatgagctggacctggtgaactaccagaacaagtgccgcctcatccggggctgggatgacctcttcaacaaggtgaaggagcacatcaacagcgtgtctgccatgaagctgagcccctactacaaggtgtttgaggaggatgccctgtcctgggaggacaagctgaaccgcatcatggccctgtttgatgtgtggattgatgtgcagaggcgctgggtgtacctggagggcatcttcaccggcagcgctgacatcaagcacctgctgcctgtggagacccagcgcttccagagcatcagcacagagttcctggccctgatgaagaaggtgtccaagagccccctggtgatggatgtgctgaacatccagggcgtgcagaggagcctggagcggctggccgacctgctgggcaagatccagaaggccctgggggagtacctggagcgggagaggagcagcttcccccgcttctactttgtgggagatgaggacctgctggagatcatcggcaacagcaagaatgtggccaagctgcagaagcacttcaagaagatgtttgctggggtgagcagcatcatcctgaatgaagacaacagcgtggtgctgggcatcagcagccgggagggggaggaggtgatgttcaagacccctgtgtccatcacagagcaccccaagatcaatgagtggctgaccctggtggagaaggagatgagggtgaccctggccaagctgctggccgagagcgtgacagaggtggagatctttgggaaggccaccagcattgaccccaacacctacatcacctggattgacaagtaccaggcccagctggtggtgctgagcgcccagatcgcctggagcgaaaatgtggagacagccctgagctccatgggcggcggcggagatgctgcccccctgcacagcgtgctgagcaatgtggaggtgaccctgaatgtgctggccgacagcgtgctgatggagcagccccccctgcggcggaggaagctggagcacctgatcacagagctggtgcaccagagagatgtgaccaggagcctcatcaagagcaagattgacaatgccaagagctttgagtggctgagccagatgaggttctactttgaccccaagcagacagatgtgctgcagcagctgagcatccagatggccaatgccaagttcaactacggctttgagtacctgggcgtgcaggacaagctggtgcagacccccctgacagaccgctgctacctgaccatgacccaggccctggaggcccggctgggcggcagcccctttggacctgctggcaccgggaagacagaatctgtgaaggccctgggccaccagctgggccgctttgtgctggtgttcaactgtgatgagacctttgacttccaggccatgggccgcatctttgtgggcctgtgccaggtgggcgcctggggctgctttgatgagttcaaccggctggaggagaggatgctgtctgctgtgtcccagcaggtgcagtgcatccaggaggccctgcgggagcacagcaaccccaactatgacaagaccagcgcccccatcacctgtgagctgctgaacaagcaggtgaaggtgtccccagacatggccatcttcatcaccatgaaccctggctacgccggccgcagcaacctgcctgacaacctgaagaagctgttccgcagcctggccatgaccaagccagaccggcagctgattgcccaggtgatgctgtacagccagggcttcagaacagctgaggtgctggccaacaagatcgtgcccttcttcaagctgtgtgatgagcagctgagcagccagagccactatgactttggcctgcgggccctgaagtctgtgctggtgtctgctggaaatgtgaagcgggagcgcatccagaagatcaagcgggagaaggaggagcggggggaggccgtggatgaaggagaaattgctgagaacctgcctgagcaggagatcctgatccagagcgtgtgtgagaccatggtgcccaagctggtggccgaggacatccccctgctcttcagcctgctgagtgatgtgtttcctggggtgcagtaccacagaggagagatgacagccctgcgggaggagctgaagaaggtgtgccaggagatgtacctgacctatggagatggagaggaggtgggcggcatgtgggtggagaaggtgctgcagctgtaccagatcacccagatcaaccacggcctgatgatggtgggccccagcggcagcggcaagtccatggcctggagggtgctgctgaaggccctggagcggctggagggcgtggagggcgtggcccacatcatcgaccccaaggccatcagcaaggaccacctgtatggcaccctggaccccaacacccgggagtggacagatggcctcttcacccacgtgctgaggaagatcatcgacagcgtgcggggggagctgcagaagaggcagtggatcgtgtttgatggagatgtggaccctgagtgggtggagaacctgaacagcgtgctggatgacaacaagctgctgaccctgcccaatggagagcggctgagcctgccccccaacgtgcgcatcatgtttgaggtgcaggacctgaagtatgccaccctggccaccgtgagccgctgtggcatggtgtggttctctgaagatgtgctgagcacagacatgatcttcaacaacttcctggcccggctgcggagcatccccctggatgaaggagaagatgaggcccagaggaggaggaagggcaaggaggatgaaggagaggaggccgccagccccatgctgcagatccagagagatgctgccaccatcatgcagccctacttcaccagcaatggcctggtgaccaaggccctggagcacgccttccagctggagcacatcatggacctgacccggctgcgctgcctgggcagcctcttctccatgctgcaccaggcctgcagaaatgtggcccagtacaatgccaaccacccagacttccccatgcagatcgagcagctggagcgctacatccagcgctacctggtgtatgccatcctgtggagcctgagcggggacagccggctgaagatgagagctgagctgggggagtacatccgccgcatcaccaccgtgcccctgcccacagcccccaacatccccatcattgattatgaggtgtccatcagcggggagtggagcccctggcaggccaaggtgccccagatcgaggtggagacccacaaggtggccgccccagatgtggtggtgcccaccctggacacagtgagacatgaggccctgctgtacacctggctggccgagcacaagcccctggtgctgtgtggccccccaggcagcggcaagaccatgaccctcttcagcgccctgcgggccctgcctgacatggaggtggtgggcctgaacttcagcagcgccaccaccccagagctgctgctgaagacctttgaccactactgtgagtacagaaggacccccaacggggtggtgctggcccctgtgcagctgggcaagtggctggtgctcttctgtgatgagatcaacctgcctgacatggacaagtatggcacccagagggtcatctccttcatccggcagatggtggagcacggcggcttctaccgcaccagtgaccagacctgggtgaagctggagcgcatccagtttgtgggcgcctgcaaccccccaacagaccccggcaggaagcccctgagccaccgcttcctgcggcacgtgcctgtggtgtatgtggactacccaggccctgccagcctgacccagatctacggcaccttcaacagagccatgctgcggctcatccccagcctgcggacctacgccgagcccctgacagctgccatggtggagttctacaccatgagccaggagcgcttcacccaggacacccagccccactacatctacagcccccgggagatgacccgctgggtgcggggcatctttgaggccctgcggcccctggagaccctgcctgtggagggcctcatccgcatctgggcccacgaggccctgcggctcttccaggaccggctggtggaggatgaggagcggcgctggacagatgagaacatcgacacagtggccctgaagcacttccccaacatcgaccgggagaaggccatgagccggcccatcctgtacagcaactggctgagcaaggactacatccctgtggaccaggaggagctgcgggactatgtgaaggcccggctgaaggtgttctatgaggaggagctggatgtgcccctggtgctcttcaatgaggtgctggaccacgtgctgagaattgaccgcatcttccggcagccccagggccacctgctgctgattggagtgtctggagctgggaagaccaccctgagcagatttgtggcctggatgaatggcctgtctgtgtaccagatcaaggtgcacaggaagtacaccggggaggactttgatgaggacctgaggacagtgctgcggcgcagcggctgcaagaatgagaagatcgccttcatcatggatgagagcaatgtgctggacagcggcttcctggagaggatgaacaccctgctggccaacggggaggtgcccggcctgtttgaaggagatgaatatgccaccctgatgacccagtgcaaggagggcgcccagaaggagggcctgatgctggacagccatgaggagctgtacaagtggttcaccagccaggtgatccggaacctgcacgtggtgttcaccatgaaccccagcagcgagggcctgaaggacagagctgccaccagccctgccctcttcaacagatgtgtgctgaactggtttggagactggagcacagaggccctgtaccaggtgggcaaggagttcaccagcaagatggacctggagaagcccaactacatcgtgcctgactacatgcctgtggtgtatgacaagctgccccagccccccagccaccgggaggccatcgtgaacagctgtgtgtttgtgcaccagaccctgcaccaggccaatgcccggctggccaagagaggaggccgcaccatggccatcacccccaggcactacctggacttcatcaaccactacgccaacctcttccacgagaagaggtctgagctggaggagcagcagatgcacctgaatgtgggcctgaggaagatcaaggagaccgtggaccaggtggaggagctgcggcgggacctgcgcatcaagagccaggagctggaggtgaagaatgctgctgccaatgacaagctgaagaagatggtgaaggaccagcaggaggccgagaagaagaaggtgatgagccaggagatccaggagcagctgcacaagcagcaggaggtgattgctgacaagcagatgtctgtgaaggaggacctggacaaggtggagcctgctgtgattgaggcccagaatgctgtgaagagcatcaagaagcagcacctggtggaggtgcgctccatggccaaccccccagctgctgtgaagctggccctggagagcatctgcctgctgctgggggagagcaccacagactggaagcagatccgcagcatcatcatgagggagaacttcatccccaccatcgtgaacttctctgctgaggagatcagtgatgccatccgggagaagatgaagaagaactacatgagcaaccccagctacaactatgaaattgtgaacagagccagcctggcctgtggccccatggtgaagtgggccatcgcccagctgaactatgctgacatgctgaagagggtggagcccctgagaaatgagctgcagaagctggaggatgatgccaaggacaaccagcagaaggccaatgaggtggagcagatgatccgggacctggaggccagcatcgcccgctacaaggaggagtatgctgtgctgatcagcgaggcccaggccatcaaggctgacctggccgctgtggaggccaaggtgaacagaagcacagccctgctgaagagcctgtctgctgagcgggagcgctgggagaagaccagcgagaccttcaagaaccagatgagcaccatcgccggggactgcctgctgtctgctgccttcatcgcctatgccggctactttgaccagcagatgaggcagaacctcttcaccacctggagccaccacctgcagcaggccaacatccagttcagaacagacatcgccaggacagagtacctgagcaatgctgatgagcggctgcgctggcaggccagcagcctgcctgcagatgacctgtgcacagaaaatgccatcatgctgaagcgcttcaaccgctaccccctcatcatcgaccccagcggccaggccacagagttcatcatgaatgagtacaaggacaggaagatcaccaggaccagcttcctggatgatgccttcaggaagaacctggagagcgccctgcgctttggaaaccccctgctggtgcaggatgtggagagctatgaccctgtgctgaaccctgtgctgaaccgggaggtgcggaggactggaggccgggtgctgatcaccctgggggaccaggacatcgacctgagccccagctttgtgatcttcctgagcacccgggaccccaccgtggagttccccccagacctgtgcagccgggtgacctttgtgaacttcaccgtgaccaggagcagcctgcagagccagtgcctgaatgaggtgctgaaggccgagaggccagatgtggatgagaagagaagtgacctgctgaagctgcagggcgagttccagctgcggctgcggcagctggagaagagcctgctgcaggccctgaatgaggtgaagggccgcatcctggatgatgacaccatcatcaccaccctggagaacctgaagcgggaggccgctgaggtgaccaggaaggtggaggagacagacatcgtgatgcaggaggtggagaccgtgtcccagcagtacctgcccctgagcacagcctgcagcagcatctacttcaccatggagagcctgaagcagatccacttcctgtaccagtacagcctgcagttcttcctggacatctaccacaacgtgctgtatgagaaccccaacctgaagggcgtgacagaccacacccagaggctgagcatcatcaccaaggacctcttccaggtggccttcaacagagtggcccggggcatgctgcaccaggaccacatcacctttgccatgctgctggcccgcatcaagctgaagggcaccgtgggggagcccacctatgatgctgagttccagcacttcctgcggggaaatgagatcgtgctgtctgctggcagcaccccccgcatccagggcctgactgtggagcaggccgaggccgtggtgcggctgagctgcctgcctgccttcaaggacctgattgccaaggtgcaggctgatgagcagtttggcatctggctggacagcagcagccctgagcagacagtgccctacctgtggagcgaggagaccccagccacccccatcggccaggccatccaccggctgctgctgatccaggccttccggccagaccggctgctggccatggcccacatgtttgtgtccaccaacctgggggagagcttcatgagcatcatggagcagcccctggacctgacccacatcgtgggcacagaggtgaagcccaacacccctgtgctgatgtgcagcgtgcccggctatgatgccagcggccacgtggaggacctggccgctgagcagaacacccagatcaccagcatcgccatcggcagcgctgagggcttcaaccaggccgacaaggccatcaacacagctgtgaagagcggccgctgggtgatgctgaagaatgtgcacctggcccctggctggctgatgcagctggagaagaagctgcacagcctgcagccccacgcctgcttccgcctcttcctgaccatggagatcaaccccaaggtgcctgtgaacctgctgcgggccggccgcatctttgtgtttgagcccccacctggggtgaaggccaacatgctgcggaccttcagcagcatccctgtgagccgcatctgcaagagccccaatgaaagagcccggctgtacttcctgctggcctggttccacgccatcatccaggagcggctgcgctatgcccccctgggctggagcaagaagtatgaatttggagagagtgacctgcggagcgcctgtgacacagtggacacctggctggatgacacagccaagggccggcagaacatcagcccagacaagatcccctggagcgccctgaagaccctgatggcccagagcatctacggcggccgggtggacaatgaatttgaccagaggctgctgaacaccttcctggagcggctcttcaccaccaggagctttgacagcgagttcaagctggcctgcaaggtggatggccacaaggacatccagatgccagatggcatcagaagagaggagtttgtgcagtgggtggagctgctgcctgacacccagacccccagctggctgggcctgcccaacaatgctgagcgggtgctgctgaccacccagggcgtggacatgatcagcaagatgctgaagatgcagatgctggaggatgaagatgacctggcctatgcagagacagagaagaagaccaggacagacagcaccagtgatggccggcctgcctggatgaggaccctgcacaccacagccagcaactggctgcacctgatcccccagaccctgagccacctgaagaggacagtggagaacatcaaggaccccctcttccgcttctttgagcgggaggtgaagatgggcgccaagctgctgcaggatgtgcggcaggacctggctgatgtggtgcaggtgtgtgagggcaagaagaagcagaccaactacctgcggaccctcatcaatgagctggtgaagggcatcctgcccaggtcctggagccactacacagtgcctgctggcatgaccgtcatccagtgggtgtctgacttcagcgagcgcatcaagcagctgcagaacatcagcctggccgccgccagcggcggggccaaggagctgaagaacatccacgtgtgcctgggcggcctgtttgtgcctgaggcctacatcacagccacccggcagtatgtggcccaggccaacagctggagcctggaggagctgtgcctggaggtgaatgtgaccaccagccagggcgccaccctggatgcctgcagctttggagtgacaggcctgaagctgcagggcgccacctgcaacaacaacaagctgagcctgagcaatgccatcagcacagccctgcccctgacccagctgcgctgggtgaagcagaccaacacagagaagaaggcctctgtggtgaccctgcctgtgtacctgaacttcaccagggctgacctgatcttcaccgtggactttgagatcgccaccaaggaggaccccaggagcttctatgaaagaggagtggccgtgctgtgcacagaatag

SEQ ID NO: 117353 - DNA, 13941 bp, Artificial Sequence
  derived and/or modified sequence
atgagcgagcccggcggcggcggcggcgaggacggcagcgccggccttgaagtctccgctgtacagaacgttgcggacgtctccgtgctacagaagcacttaagaaaattggtaccccttttgctggaagacgggggcgaagcccctgcggccctagaggcagcactcgaggagaaatctgcgttagagcagatgaggaaattcttgagtgacccacaagtccatacggtgcttgtggagcgctctacacttaaggaggacgtcggggatgaaggcgaagaagagaaggaattcatctcatacaacataaacattgacatccattacggcgtcaaaagtaattctttggcctttattaagcgcacaccggtcatagacgctgataagcctgttagctcccagcttcgagtgctgactctctctgaggacagcccctacgagacactccatagttttataagcaatgctgtggctcctttttttaaatcttatattagagagtctgggaaggcggaccgggacggtgacaagatggcccctagtgtggaaaagaagattgctgagctggaaatgggcctgctacatctccaacagaacatcgaaattccagagatctcactgcctatccaccctatgatcacgaatgttgccaaacaatgctatgagaggggtgagaaacccaaggttaccgatttcggcgacaaggtagaggaccccacatttcttaatcaactgcagtctggagtgaaccggtggatccgcgagatacagaaggtgaccaaactcgatagagatcctgcaagcggcaccgccctgcaggaaatatcattttggctgaatttagaacgggctttgtacagaatccaggaaaagagggagtcccctgaggttcttctgacgctggacatcttgaaacacggtaagcggttccacgccacagtcagcttcgacaccgacaccggtctgaagcaagcactggagacagttaatgattacaatccgctcatgaaagatttcccactgaatgaccttttaagtgcaacagagctagataaaattcgtcaggcactggtggctatttttactcacctcagaaagatcagaaacacgaagtacccaatccaacgggctctgaggctcgtcgaagcaattagtcgggatctttcctctcaactgttgaaggtgctaggaacaaggaagctcatgcacgtagcatacgaggagtttgaaaaggtcatggtggcctgcttcgaggtgtttcagacatgggatgacgaatatgaaaagttgcaagtgcttttacgtgacattgtaaaacgtaaacgggaggagaaccttaagatggtttggagaattaaccctgcccaccgcaagctccaggctcggctggatcagatgcggaagtttcggcgccaacacgagcagctgcgtgctgtaatcgtacgcgtgctccggccccaggttaccgccgttgcccagcagaaccagggggaggtgccagagccgcaagacatgaaagtggcagaggtcctgttcgacgctgctgacgccaacgcgatcgaagaggttaatttggcatacgaaaacgttaaggaggtggatggcttagatgtctccaaggaggggactgaagcatgggaagccgcaatgaagcggtacgacgagcgcattgaccgggtcgagactcgcatcactgccaggctgagggaccaacttggtactgccaaaaatgcaaacgagatgttcagaatatttagcagattcaacgccctgttcgtgcgaccacacatcagaggggcaatcagagaataccagacacaattgatccagcgggtgaaagacgacatcgagtcccttcacgataaatttaaggtgcagtatccccagtcacaggcctgtaaaatgtcacacgttcgcgacctgccacctgtgtctggaagcattatctgggcgaagcagatcgatagacagctcaccgcctacatgaaacgggtggaggatgtcttggggaaagggtgggagaaccacgtggaggggcaaaagctgaagcaggacggagactcttttcgaatgaagctaaacactcaagagatttttgacgattgggcacggaaggttcagcagaggaacctgggtgtgtccggccggatatttaccatcgagagcaccagagtcaggggtaggaccggaaacgtcttgaaactgaaagtaaattttctgcccgaaatcatcacactgagtaaggaggtgcgtaatctgaagtggctgggtttcagggtccccctggccattgtgaataaggctcaccaggctaatcagttgtatccttttgccatctccttaatcgaatctgtccgtacttatgagcgcacttgtgagaaggtggaggagcggaacactattagcctcctcgtcgccggattaaagaaggaggtccaggcgttgatcgctgagggtattgcattggtgtgggagtcatacaagctggatccctatgtgcagaggctcgcggaaaccgttttcaatttccaggagaaagtcgatgacctcctcatcattgaggaaaagattgacctggaggtgagaagcctggagacgtgtatgtacgaccataagacattctctgagattttgaatagagtccagaaagccgtcgacgacctgaatcttcattcttatagcaatcttccaatttgggtgaataagctggatatggagatcgagaggatcctgggagtccgactgcaagcgggcttgagagcttggacacaagtcctgctcgggcaagccgaagacaaagctgaggtggacatggatacagacgccccccaggtcagccacaagcccggcggggagcccaagatcaagaatgtggtccatgagctacggattaccaaccaggttatttacctgaacccacccatcgaggaatgtcggtataagctgtaccaggagatgttcgcatggaagatggtcgtgctatctttgcctcggatccaatcccaacggtaccaagtcggggtgcactacgagcttactgaagaagagaagttctacagaaatgctctgacacggatgcctgatggacccgtcgctcttgaagaaagctattccgcagtgatgggtatcgtctcagaagtggagcagtatgtgaaggtctggttgcaatatcagtgcctatgggacatgcaggcagagaatatttataaccgtttaggggaggatctgaacaagtggcaagccctgcttgttcagattcggaaggccagaggtactttcgataacgccgagactaaaaaggaattcggaccagtggtgattgattatggcaaagtgcagtccaaggtgaatctgaaatatgattcgtggcataaggaggtgctttcgaaatttggacaaatgctcggatctaatatgacagaatttcattcccagatcagcaaatcccggcaagaactggagcagcatagcgtggataccgcgtctacaagtgacgccgtgacttttattacctacgttcagtcgttgaaacgaaagatcaaacaattcgaaaaacaagtcgagttgtaccgtaatggtcagcgcctgctcgagaaacagcgcttccaatttcccccttcttggctgtacattgataatatcgagggggaatggggggcgttcaacgatatcatgaggcgcaaagattctgccatccaacagcaggtcgccaacctgcagatgaagattgtccaggaagatcgggccgtggagagtcgaaccaccgaccttctcacagactgggaaaagacgaagccagtgactggcaatctacggccagaagaagccctgcaggcactgacaatatacgagggaaagttcggaaggcttaaagatgacagagagaaatgtgccaaggcaaaggaagctttagagctgactgatacaggcctgctcagcggcagcgaagagagagtgcaggtcgccctcgaggagctgcaggatctcaagggcgtgtggtcggaacttagcaaagtatgggaacagatagatcagatgaaagagcagccatgggtgtccgtgcagccccgcaagcttaggcagaacttggacgcccttctgaaccagctgaaatccttccctgctagactgaggcaatacgcgagctacgagtttgtccaacgtctgttgaaggggtatatgaaaatcaatatgcttgtgatcgagctgaaaagtgaagccctaaaagatcggcattggaaacaattaatgaagcggttgcacgtgaactgggtggtcagcgagctcactctcgggcagatttgggacgtcgacctgcagaaaaatgaagccatcgtgaaggacgtgctgctcgtggcccaaggcgagatggctctggaggaatttctgaaacaaattagggaggtgtggaatacctatgaactggacttagtgaattatcaaaacaagtgtcgcttgatcagggggtgggacgacctgttcaataaagttaaagagcacatcaactccgtgtccgccatgaagctgagcccatattataaagttttcgaagaggacgctctcagctgggaggacaagctcaatagaatcatggcactcttcgatgtctggattgatgtgcagcgacggtgggtgtatcttgagggcattttcacaggaagtgcggacattaaacacttactgcccgtcgaaacacaaaggtttcagagcatctcaaccgaatttttagctctgatgaagaaagtttcaaagtcacctctggtaatggatgtcctaaatatccagggagtgcagaggtcgcttgaacgtctggccgacctcttgggaaaaatacaaaaggccttgggcgagtacctcgaacgggagaggtcttcctttcctaggttctatttcgtcggagacgaggatctgctggaaatcattgggaacagcaaaaacgtggctaaactgcaaaaacactttaaaaagatgtttgctggcgtcagctcaatcatcctgaacgaggataatagcgtggtcctcggcatttcaagcagggaaggcgaggaagttatgttcaagacccctgtgtcgataactgaacacccaaagattaacgagtggctcaccttagtggagaaagagatgcgtgtgacgctcgcaaagctattagcagagagtgtgactgaggtggaaatcttcgggaaggctacttctattgaccctaatacctacatcacctggatcgacaaataccaagctcagctggtagtgctgtccgcccaaattgcatggtccgagaacgttgagacggcactctcaagcatgggagggggaggcgacgccgctccactgcatagcgtgctcagtaatgtggaggtgactctcaacgtgcttgccgactctgtgctcatggagcagcctcctctgcgcagacgaaagctggagcacctgatcactgagctcgtccaccagcgggatgtgactaggtctttaatcaagtctaagattgataacgctaaatctttcgagtggctttcgcagatgcgattctacttcgatcctaaacaaaccgacgtcttgcaacagctgtcaattcagatggctaatgccaaatttaattatggctttgagtacctgggggtccaggacaagctagtccagactccccttacagatcgatgttatctgacaatgacccaggcactcgaagctcgccttggggggtctccatttggaccggccgggacaggaaagacagaaagtgtcaaagctctcggacatcagctgggtagattcgtgctagtcttcaactgcgatgaaaccttcgatttccaggctatggggcgcattttcgtgggcctgtgccaggtgggcgcgtgggggtgcttcgacgagtttaatagactggaggagcgtatgctgtctgccgtgagccagcaagtacagtgtattcaagaggcactacgcgagcattccaaccctaactacgacaaaactagcgcacccatcacctgcgagctgctaaataaacaggtgaaagtgagccctgacatggccatcttcataaccatgaaccccggatacgccggccggtcaaatctgcctgacaacctgaagaaactctttcgtagcctggccatgaccaaacccgaccggcagctgatcgctcaggtgatgctgtactctcaggggtttcgcaccgcggaagtgcttgccaataaaatagtcccttttttcaaactctgcgatgaacaactttccagtcaaagtcattacgattttggattgagagccctcaaatctgtgcttgtgtccgcgggcaacgtaaagagggaacgaatccagaagattaagcgggaaaaggaggaaaggggggaggcagttgatgagggcgaaattgccgagaatctgccggagcaggaaatcctgattcagagtgtgtgtgaaacaatggtgccgaagctggtagcagaagacataccactcctttttagcctactgagcgatgttttcccaggagtacagtatcatcgcggggagatgacagccctgagagaggagctgaaaaaagtgtgccaggaaatgtacctcacatatggcgatggcgaagaggtcggtggcatgtgggtagagaaggtgctgcaactgtaccagatcacccagatcaaccatggcctgatgatggtcggaccctcggggtccggtaagtccatggcttggagagtgctgctgaaagctttggagagactagaaggggtggaaggcgtcgcccacattatcgatccgaaggcaataagcaaagaccatctctatggcactctggatcccaacacccgcgagtggacggacggactctttacccatgtcctgcgcaaaatcatcgactccgttagaggtgagcttcagaagcgccagtggatcgtgttcgacggagatgtggacccagagtgggttgagaatttaaacagcgtcttggacgacaacaagctcttgaccctcccaaacggggaacgtctgtcgctgccacccaacgtccgtattatgttcgaagtgcaagatctcaagtacgccaccctggctacagttagcagatgcggcatggtatggttctcagaggacgttctgtccacagacatgatcttcaataatttcctagcgcggttgcggtctattccattagatgagggggaggacgaggctcagcgaagacgtaaaggcaaagaagacgagggggaggaggccgcctcaccaatgctccagatacaacgggacgccgcaactatcatgcagccctacttcacgagcaacgggctggtgaccaaggctctcgaacacgccttccaactcgagcacatcatggatttaacacggctgcgctgcctggggagcctattctctatgctccatcaggcctgcaggaatgtggcacagtacaatgcaaaccaccccgatttcccaatgcagatagaacaactcgaaagatatatacagagatacctcgtatatgcaatactctggagcctgtcaggggactctcgcctcaaaatgagggccgagttgggagaatacattagacgcatcactacagttcccctaccgaccgctcctaacattcctattattgactacgaggtgagcattagtggagagtggtccccgtggcaggcgaaagttcctcagatcgaggtagagacccacaaggtcgctgcgccagatgtcgtagttcccaccctggacacggtcaggcacgaagcgttactgtacacttggcttgctgaacacaagccgctcgtcctttgtggcccgccagggtccggtaagacgatgacactgttctccgccctgcgagccctgccagacatggaggtcgtcggtcttaacttctccagtgcaaccacgcctgaactgctactcaaaacctttgatcattattgtgagtaccgtaggacccctaatggagtggttcttgcgcccgtccaactggggaagtggctcgtgctattttgcgacgagattaacctgcctgatatggataaatatggcacccaacgcgttatatcctttattcggcagatggtcgagcatggcggtttttacagaacctcagaccagacctgggtcaagcttgagcggatacaatttgtcggcgcttgcaaccctcccacagatcccggaaggaagccgttatctcaccgattcctgaggcacgttcctgtagtctacgtggattatcccggtcccgcttcactgacccagatatatggaaccttcaaccgagcaatgcttagacttatcccatctctgagaacatatgctgagccactaaccgccgcaatggtcgagttctatacaatgagtcaggaacgttttacccaagacacccagccgcattatatttacagtcccagggagatgactcggtgggtacggggaatcttcgaagcactgcgaccgctcgaaacccttccagtcgagggtctcatcaggatttgggctcacgaggcactgcgtctttttcaggacaggttggttgaagatgaagaacgccgatggaccgacgagaatatagataccgtcgcgttgaagcacttcccaaatatcgatagggaaaaagcgatgtcccgcccaattctctacagtaactggctttccaaagattacatacctgtggaccaggaagaattacgagattacgtaaaagcccgtctcaaagtattttatgaggaggaactggacgtgcccttagtgctgtttaacgaggttctggatcacgtactcaggattgacaggatctttagacagcctcaaggacatctccttcttattggcgtgagtggcgccggaaaaactactttgtcccgctttgtggcctggatgaacggactgtctgtctaccagatcaaggtgcataggaaatatactggcgaggacttcgacgaggatttgaggactgttttgagaaggagcggatgtaagaatgagaagatcgcattcatcatggatgagagcaacgtgctcgatagcggcttccttgaacgcatgaatactctgcttgcaaacggagaggtgccaggtctattcgagggagacgagtacgctactctgatgacccagtgtaaggagggcgcacagaaggagggactaatgcttgactcccatgaggaactgtataagtggtttaccagccaggtgataagaaacttgcatgtagttttcaccatgaacccttcaagtgagggcctcaaggatcgagcagccacctcccctgctttgttcaacagatgcgttttgaactggttcggagattggtccactgaggccctctaccaagttggcaaggaattcacatctaagatggatttagagaagcccaattacatcgtcccagactacatgcctgtcgtttatgataagttaccccagcccccttctcatcgcgaagctatcgtcaattcttgcgtgtttgttcaccaaacactacatcaggccaatgcccggctggctaaacgcggaggccggacgatggctattacccccagacactatctcgacttcatcaaccactacgccaacctcttccacgagaagcgatctgaactggaggagcagcaaatgcacctgaacgtcggactccggaaaattaaggaaacagttgatcaggtagaggaactgcggagagatctaaggatcaagtcacaagaactggaggtcaaaaatgcagccgctaatgataagctgaaaaagatggtcaaagaccagcaggaagccgaaaagaagaaagtgatgagccaggaaattcaggaacaattgcataaacagcaggaagtaattgccgataagcagatgtccgtcaaagaggacctggacaaggtggaaccagccgtcattgaagcgcagaacgctgtgaaaagtatcaagaagcagcatctggtcgaggtgaggagtatggcaaatccccccgccgcggtgaagcttgcccttgagagcatttgcctcctcttgggggagtcaacaactgactggaaacagatccgcagtatcattatgagggaaaactttattcccaccattgtgaatttctctgctgaggaaatttccgatgccatccgggaaaagatgaaaaagaattatatgagcaatcccagctataattacgagatcgtgaatagagcttccctggcctgtggtcctatggttaaatgggccatcgctcagctaaattatgctgatatgctgaagcgcgtggagccgcttaggaatgagctacagaagttagaggacgacgcaaaggataaccagcagaaggcaaacgaggtagagcagatgatcagagacctggaggctagtatcgccagatataaagaggaatatgcagtcctgatcagtgaggcacaggccataaaggccgatctcgctgctgtcgaggccaaggtcaaccggagcacggcccttctaaaaagcctctcagctgaacgtgaaagatgggaaaaaacctccgaaacatttaagaaccagatgagcaccatcgccggagattgcctgctttcagccgctttcattgcatacgcagggtactttgatcaacagatgaggcagaatctgtttacaacgtggagtcaccatctgcagcaagctaatattcagttccggaccgacatagcaaggaccgagtacctgtctaacgctgacgaaagattaaggtggcaggcttcatccctgccggctgatgacctctgtaccgaaaatgctatcatgctcaagcgcttcaatcgctatccactgattatagacccctcaggccaggccacggaatttattatgaacgaatacaaggaccggaagatcacccgtacgtcattcctggatgacgcattccggaaaaacctggaatccgccttacgatttgggaacccacttctcgttcaggatgtggagtcctatgacccggtgttgaatccggtacttaaccgagaggtccggcgtactggcggaagagtgctcattaccctcggcgaccaagacatagatttatccccatctttcgtaatcttcttatctacaagagatcccacagtggagttcccacccgatctctgtagtagagtgacattcgtcaatttcaccgtgactcggtctagccttcagagccaatgtctgaatgaggtcctcaaagctgagcggcccgatgtggacgaaaagagaagcgatttactcaagctgcagggagagtttcagctcagattgcgccaacttgagaaatctctcctgcaggcactgaatgaagtgaaaggacggattcttgacgatgacaccattattactacactcgagaatttgaaaagagaagccgctgaagtgacaaggaaagtggaagagaccgatatagttatgcaggaagtggagacggtatcacagcaatatctgcctttgtccaccgcctgttcaagcatttactttacaatggagagcctgaagcagattcacttcctgtatcaatactcactgcaattctttctggacatataccataacgtgctgtatgaaaaccccaatctgaagggcgtgaccgaccacacgcagaggctgtccattattaccaaagatctgtttcaggtggcattcaacagggttgctcggggtatgctgcatcaagaccacattaccttcgcaatgctgctagctcggatcaaattgaaagggaccgttggcgagcctacatatgacgccgagtttcagcacttccttagaggcaatgagatcgtcctcagcgccggcagcacccctcgaattcagggccttaccgtagagcaggcagaagcggtcgtgcgcctcagctgtctccctgcttttaaggacttaattgccaaggttcaggccgatgagcaatttgggatttggctcgattctagcagtcctgagcagaccgttccctacttatggagcgaggaaacccccgccacccccattggacaggcaatccatcgtctcttactaatccaagcttttagacccgaccgactcctggccatggcccatatgtttgtttcgacaaatcttggagagagcttcatgtcaattatggaacagcctttggacctgacacatatcgtaggcaccgaggttaaacccaataccccagtcctgatgtgcagcgttcctgggtacgatgcctctggccacgtagaagacttggctgcggagcagaacacccaaattaccagtattgccattggtagtgctgaagggtttaatcaggcggataaagctatcaatactgccgtgaagtcaggaaggtgggtaatgctcaaaaacgtccaccttgcgccaggctggctgatgcaacttgagaagaagctgcactctctgcagccccacgcctgttttaggctgtttcttacaatggagatcaaccctaaagtcccggtgaacctgcttagggctggcaggatattcgtgtttgagccacctccaggtgtcaaggccaatatgttacgcacattctctagcatccccgtttccagaatctgtaaaagccccaatgagagggctcggttatatttcctcttagcctggtttcacgccatcattcaggagaggctcagatatgctcctctcgggtggtccaagaaatacgagtttggcgagtccgatttgcgatccgcgtgcgacacagtggacacctggctcgatgatactgccaaaggcagacagaacatctcacctgataagatcccttggtccgctcttaagaccctgatggctcagagcatttatggtggccgcgtggacaacgaattcgatcaacgcttacttaacaccttcctggagcggcttttcacgactcgcagctttgactctgagttcaaactagcatgtaaagtggacggccacaaggatatccagatgcctgatgggataagaagagaagagtttgtccagtgggtggagctgttgcccgacacccaaacgccgagctggctcggactccccaataacgcagagcgcgtactgttaactactcagggcgttgatatgattagtaagatgctgaagatgcagatgctcgaggatgaggatgacttagcgtatgcagagaccgagaagaagacccggactgatagtactagtgacggcagaccagcgtggatgcgaactttgcacactacagcttccaattggttgcatctgatccctcagaccttaagccaccttaaacgaactgtagagaatattaaagaccccctgtttaggtttttcgagcgcgaggtgaaaatgggcgctaagctcctacaggacgttcggcaagatttagcagatgtggtccaggtttgcgaaggcaaaaagaaacagactaattatctgcgcaccctgatcaacgagttggtcaagggcatcctgccacgttcttggtcccactacactgtccctgctggtatgacagtgatccaatgggtttccgatttctcagagcgcattaagcagcttcaaaatattagtttggctgcagccagtggtggcgccaaggagttaaagaacatacacgtgtgcttggggggacttttcgtccccgaggcttacattacagccaccagacagtatgtcgcacaggctaatagttggtccctggaagaactgtgtctggaggtgaacgtgacaactagccagggcgctactttggacgcatgctctttcggggttacaggtctgaaactgcagggcgccacttgtaataataataaattatctttaagcaacgcaatctcaactgccctacccctcacacagctccgatgggtgaaacaaaccaatactgaaaagaaagcctcggtcgtgaccctaccagtgtacttaaatttcacccgagccgaccttatttttacagtggattttgaaatcgctaccaaggaagaccccaggtctttttacgaacgaggagttgcggtcctttgcacagagtag

SEQ ID NO: 117354 - DNA, 13941 bp, Artificial Sequence
  derived and/or modified sequence
atgagcgagcctggtggtggtgggggagaagacggtagcgctggtcttgaagtgtctgccgtccagaacgtagctgacgtcagcgtcctgcagaaacatctacggaagctggtgccactgctccttgaggatggcggtgaagcccctgcagctctcgaagcagccctagaagagaagtccgccctcgaacagatgcgaaaattcttgagcgatccacaggtacacacagtactggtagagagatcaaccttgaaagaggacgtgggagacgagggggaagaagagaaggaatttatttcttataacattaacatcgatatccattacggcgtcaaaagtaatagtttggcattcattaagagaacaccagtgattgatgccgacaagccggtaagttcccagctgcgcgttctgactctgagcgaagattccccatatgagactctccacagcttcattagcaatgctgtagcaccattctttaaaagttacatcagagagagcggaaaggccgacagggacggcgacaagatggcacctagcgtggaaaaaaaaattgcagaactggagatgggtctcctccatctccaacagaatatcgaaatccccgagatatccctgcccatacacccgatgattacgaatgtggctaagcaatgctacgagcgcggtgaaaagcctaaggtgactgacttcggcgataaagtggaagaccccactttcctgaaccagctccaatccggagtaaatcggtggattcgagaaatccagaaggtaaccaaactggatcgagatcccgcaagtggcacagcccttcaagagatatcgttttggctcaatctcgaaagggccctataccggattcaagaaaaacgcgagagcccagaggtcctgctaacacttgatatcctgaaacacggaaagcgttttcacgccactgtctccttcgatacggacacaggtctaaagcaggctctcgagacagtgaatgactacaacccccttatgaaggacttccctctaaatgatctattatccgctaccgaactggataagattagacaagctctggttgcaatcttcacccacctgcggaagatcagaaatactaaatatcccatccagagggccctgcggttggtggaagctatttcgcgggatctgtctagccagttgctcaaggtgctagggacgaggaagttaatgcacgtggcatacgaggagtttgagaaggtcatggtggcttgcttcgaggtgtttcagacctgggatgacgaatacgagaaactgcaggttctcctgcgcgatatcgtaaaaagaaaaagggaggaaaatttgaagatggtatggagaatcaatccagctcaccggaagctgcaagctcgattggatcagatgcgcaagttcaggcgccagcatgaacagctgagagcagtcattgtgagagtgctgcgacctcaggtcacggcagtggcccagcagaaccagggagaggtgcccgagcctcaggatatgaaggtagcagaggtactttttgatgcggctgatgccaatgcaattgaggaagtgaacctggcctacgaaaatgtgaaagaggtggacggactggatgtttccaaggagggaactgaggcgtgggaagcagctatgaagcgctacgatgaacggattgaccgcgttgaaacccgcattaccgctcgactccgggatcagctaggtacggctaagaatgctaatgaaatgttccgaatcttctctcgcttcaatgccttatttgtgaggccgcacatcaggggggctatacgagaatatcagacccaactaatccagcgggtgaaagacgatatcgagtctttgcacgataagttcaaggtccaatatccacagagccaggcgtgcaagatgagccatgtacgcgatctgcctcccgtttctggttccatcatttgggccaagcagatcgaccgtcagctgacagcttacatgaaacgcgtggaggacgttctgggcaagggttgggagaaccacgtggaaggccagaaactgaaacaggacggcgacagcttccggatgaaattgaatacccaggagatttttgacgactgggctcgcaaagttcagcagaggaacctgggcgtttcaggcagaattttcactatcgaaagtaccagggtgcggggacgtactggaaacgttctgaagctcaaggtcaactttctgccagaaattatcactctgtctaaggaagtgcgaaacctcaaatggctcggctttagagtacctctggccattgtgaacaaggcccaccaggccaatcaactttatccattcgctatttctttaatcgaatccgttagaacttacgaaagaacttgcgagaaggtggaagagcgaaacaccatcagcctgttagtggctggactgaaaaaggaggtccaggcactgatcgcagaaggaatcgccctggtgtgggagtcgtacaaacttgatccatacgtccaacgactcgctgagacggtgtttaacttccaggagaaggttgacgatcttctcataatcgaggagaagatagacctggaggtccgatctctggaaacgtgcatgtatgaccacaaaacattctcagagatattgaaccgggtccagaaagccgtcgatgatctgaatttgcactcctattccaacctgcctatttgggtaaacaaattggacatggagatagagaggatcctgggggtcagactacaggccggactgagggcctggactcaagtgctgctcgggcaagcagaagacaaagccgaggtggacatggataccgatgcgccacaagtgtcccacaaaccagggggagaaccaaagattaaaaacgtcgtccacgagctccgaattacaaatcaagtcatttatctcaatccgccaatagaggaatgtagatataaactctatcaagagatgttcgcctggaagatggtagtgctttctcttccccgtatccagagtcaaagataccaggtgggtgtgcactacgagcttacagaagaagagaaattctacagaaatgctctgactagaatgcccgacgggccagtggccctggaagagtcttactcggcagtgatgggtatcgtgagcgaagtggagcagtatgtcaaggtgtggctccagtatcagtgcctgtgggatatgcaggcagagaacatatacaaccgacttggcgaggatcttaacaaatggcaggccctcttggtccaaatacgaaaagccagaggaaccttcgataacgccgagaccaagaaagaattcggacccgtcgtaatagactatgggaaagtccagagcaaggttaatctcaaatacgatagctggcacaaggaagtcctgtctaagttcggacagatgttgggcagcaacatgaccgaatttcatagtcagatctcaaagtcgcggcaggagctagaacagcacagtgtcgatactgcttctacctcggatgccgtgacttttatcacatacgtccagtccctcaagcgcaagataaagcagttcgagaaacaagtggaattgtaccgaaatgggcagcgcctgctagagaaacaaagattccagttccctccatcctggttatacattgacaatatcgagggggagtggggcgcttttaacgacattatgcgaaggaaagattccgctatccaacagcaggtggctaacctacagatgaagatcgtccaggaagatcgcgctgtggagtcaaggaccactgatctgttgactgattgggagaaaacaaaaccagtcacagggaacttacgccctgaagaggccctgcaagcactgacgatctatgaaggcaagttcggccgtctaaaagacgatcgcgagaagtgcgccaaggccaaagaggcattggaacttactgacaccggcctactgagcggtagcgaagagcgagtgcaagtcgctcttgaagagcttcaggatctgaagggtgtgtggtctgagctgtcaaaggtgtgggagcagatcgaccaaatgaaggaacagccatgggtgtcagtgcagcctcggaagcttagacagaacctcgatgccctgttgaatcagctcaagtccttccccgctcggctgcgacagtacgcaagttacgaattcgtacagcggctcctgaaagggtatatgaaaattaacatgctggtgatcgagctgaagtcagaagccctgaaggaccggcactggaagcagctcatgaagaggttgcatgtcaactgggtcgtgtcagagctcacattagggcagatttgggacgtggacctacaaaagaacgaagccattgtgaaagatgtgcttctggtggcgcagggtgaaatggctctagaagagttcctcaagcagataagagaagtctggaacacctatgaactggacttggtcaattatcagaacaagtgcaggttgatacggggatgggatgacctctttaacaaggtaaaggaacacatcaattctgtgagcgctatgaagctgtccccctactacaaggtttttgaagaagatgccctgtcttgggaggataagctcaatcggattatggccctgttcgacgtctggattgatgtacagaggaggtgggtttatctggaaggcatttttaccgggtcggccgacatcaagcacctgttgcccgtggagacgcagcgtttccagtctatctccactgagttcctggctttgatgaagaaagtcagcaagagtcccctggtcatggatgtgcttaacatccaaggggttcaaaggtccttggagaggttagcagacctgctcggcaaaattcaaaaagccctgggcgaatatctagaacgggagcgctcaagttttcccaggttctatttcgttggtgacgaagacctgctcgaaattatcggcaatagtaagaatgttgctaagctgcagaagcactttaagaaaatgttcgcaggtgtgtctagcattatcctgaatgaggacaactccgtggtccttggtatcagttcacgggaaggggaagaggttatgtttaagacgccggtatctatcaccgagcatcccaaaatcaacgaatggctcaccctagtcgagaaagaaatgcgtgtgactctggctaagctgctagccgaatcggtcactgaagtggagatcttcgggaaggctacttctatagaccccaatacttacataacttggatagacaagtaccaggcgcaattggtggtgctgagcgcccagatagcctggagcgagaatgttgagaccgctctgagtagcatgggaggcggtggagatgccgcacctctgcactctgtgctgtccaatgtagaggtaaccctcaatgtgttggccgattccgtgttgatggagcaaccgccactaaggagacgtaagctcgagcatcttattacagagctcgtgcaccagcgtgatgttactcggagcctgatcaagtctaaaattgacaatgccaaatctttcgaatggctgtcacagatgcgcttctatttcgatcccaaacagacagatgttctgcagcagctcagcattcagatggctaacgccaagttcaactacggatttgaataccttggagtgcaagataagctggtgcagacccccctcaccgatcgctgctatttaacaatgacccaggcactggaggccaggttaggcggatctccatttggcccagctggcactgggaagactgaaagcgtcaaagccttgggacaccagctcggccgttttgtcctcgtgtttaattgcgacgagaccttcgacttccaggcaatgggcagaatattcgttggactgtgccaagtgggtgcttgggggtgtttcgatgagttcaatcggctggaggagcgtatgctctccgctgtgtcccaacaagtccagtgtattcaggaggcactccgcgagcactctaatcctaactacgacaaaacctccgctcctatcacctgcgagttacttaataagcaggtcaaggttagtccagacatggctatattcataacaatgaacccagggtatgcaggtcggagtaatctgcccgataatctgaagaagctctttaggtctcttgccatgacaaagcccgataggcagctaatcgcacaagtgatgctgtactcccaggggttcagaaccgctgaagttctggctaataagatcgtcccattctttaagctttgcgacgagcagttgagctctcagagtcactacgacttcggcttgcgtgctctcaaatccgttctggtgtccgcagggaacgtgaagagagagcggatccagaaaataaagcgggagaaggaagaaagaggagaggccgtagacgagggcgagattgctgagaacctgccagaacaggaaattctcattcagagcgtgtgtgagacaatggtgccaaagctcgtagcagaagacatccccttactgttctccctgctgtcagatgtatttcccggagttcagtaccacagaggcgaaatgaccgcccttagagaagagctcaagaaggtgtgtcaggagatgtatcttacttatggggacggcgaggaggttggcggtatgtgggttgaaaaagttttgcagctgtatcaaattacccaaatcaaccatggcctgatgatggtagggccttctggctccggcaagtcaatggcgtggcgagtgctcctaaaggcgctagaacggcttgaaggggtcgaaggggttgctcatatcatagacccaaaagccatctcaaaggaccacctctatggaacactggatcccaataccagagaatggaccgacggtctcttcacccacgtgctgcgcaagatcattgatagcgtgaggggcgagctccaaaagaggcagtggatcgtgtttgatggcgatgttgatccagagtgggtggagaatcttaatagtgtcttggacgacaataagctgctgaccttacctaacggcgagagattatcgctcccaccaaatgttaggatcatgttcgaggtacaggacctcaaatatgccaccctcgcaacagtgtcgcgatgtggcatggtatggtttagtgaagacgtgctgtctactgacatgatcttcaataactttctcgcacgcctgcggtccattccactggacgagggggaagacgaggctcagcgcaggcgaaagggcaaggaagatgagggagaagaagccgcttcaccaatgctccagatacagagggacgctgctaccattatgcagccctactttacaagcaacgggctggtgaccaaggcgctcgagcatgcctttcagttggaacacattatggatttgacacggctgaggtgcctgggatccctcttcagtatgttacaccaggcctgccgaaacgtggcccaatacaatgccaaccacccggacttccctatgcagatcgaacagctcgaaaggtatatccagcgctacctggtttacgctatcctttggtccctgagcggcgacagtcggttgaaaatgagagccgagctgggtgagtatattcgacgaattaccacagttcccctgcccaccgcaccaaacataccaattatcgattatgaagtctccatctcgggcgagtggtccccctggcaggctaaggtaccccagattgaggtagagacacacaaagttgccgctcctgatgtggtggtgccaaccctggacactgtacgtcatgaagcgctgctatatacttggctggcagaacataagccactggtcctttgcggtccccctgggtccggtaaaaccatgactctgttcagcgctctgagggctctccccgatatggaagtggtcggcctgaacttcagcagcgctaccacacctgagctgttgctgaaaacttttgaccactattgtgagtataggcgcacgcccaatggcgtggtgctcgctccagtgcagttagggaagtggcttgtgctgttctgtgacgagattaatttgccagacatggacaaatacggcactcagagagtcatctcctttatccggcagatggttgaacatgggggtttctatcggacctctgaccagacttgggtgaagctcgagcgcatccagttcgtcggtgcatgtaaccccccaacagatcctgggaggaagcctttgagccaccggtttctcaggcacgtgcccgtggtatatgtagattatcccggacccgcatcattgactcaaatctacggcacattcaacagggccatgttgcggctgattccctctctgagaacttatgcagagccactgacggctgctatggtggagttttatacaatgtcccaggagcgcttcactcaggatactcagccacattacatttattcccccagggaaatgacacggtgggtcagaggtatttttgaagcactgaggcctctggagacattgcccgtggaaggcttgattcggatttgggctcatgaggctctacgcctgtttcaagacagactggttgaagatgaggagagaaggtggacggacgaaaacatcgacaccgtagctctcaagcatttccccaacatcgacagggaaaaagccatgtcacgccctattttgtactccaactggcttagcaaagactatatcccagtcgatcaggaggagctgcgcgactacgtgaaggctcgtttgaaggtcttctatgaagaagagcttgatgtccctcttgtgcttttcaatgaggtattagaccacgttttgcggatagaccggatttttaggcagccccagggacacctgctactaatcggggtcagcggtgctggaaaaactactctctctcgcttcgtagcctggatgaacggcctctcggtgtaccagattaaagttcatcgcaagtatacgggggaagatttcgatgaagacctgaggaccgtgctgcgcagaagcggctgcaagaatgaaaagatcgcgtttatcatggatgagtctaacgtgttagattcaggtttcctggaacgcatgaacacgctgctggctaacggtgaagtccccggattgtttgaaggtgatgaatacgcgacactgatgactcaatgtaaggagggggcacagaaagaaggcctgatgctcgattcacacgaggagttgtataaatggttcacaagtcaggtgatacgtaatctacacgtcgttttcaccatgaatccaagctctgagggactgaaagacagagcggcaacctcgcctgccttattcaaccggtgtgtactgaattggttcggcgactggtcaaccgaagccctgtatcaagttggaaaagaattcacttcaaaaatggatctcgagaagccgaactacatcgttcctgactatatgccggtagtgtacgacaagcttcctcaacccccaagccaccgagaagccatcgtcaatagttgcgtgtttgttcaccaaacactccaccaggccaacgcgaggctcgccaaaagaggcggacggactatggccattaccccaaggcattatctggactttatcaatcattatgctaacctcttccacgagaagaggagcgagctggaagaacaacagatgcacctgaacgtcgggctccgcaagattaaggaaaccgtggaccaagttgaagaactgaggcgggatctccggatcaagagtcaggaattggaggttaagaatgctgctgccaacgataagcttaagaaaatggtaaaagatcagcaggaggccgaaaaaaagaaggttatgagtcaggaaattcaggagcagttgcataagcagcaagaggtcattgctgataaacaaatgtcggttaaagaagacctggacaaggtggagccggctgtgatcgaggcccagaatgccgtcaaatccatcaagaagcagcatttagtcgaggtgagatctatggcaaaccccccagcagctgtgaaactggccctcgagtctatctgtctcttactgggtgagagtacgacagactggaagcagattcgttctattataatgcgggaaaatttcatcccaacaatagtaaatttctcagctgaagagatttccgacgccattcgcgagaaaatgaagaagaactacatgagcaatccatcatacaattacgaaatagtgaacagggcttccctggcctgcggccctatggtcaaatgggccatagctcaattgaattatgcagacatgctcaagagggtcgaaccacttaggaatgaactgcagaagctagaagacgacgccaaggacaaccagcagaaagccaatgaagtggagcagatgattcgcgacctggaggcctccatcgccaggtacaaggaagaatatgctgtgttgatctctgaagcacaggccatcaaggccgacctcgctgccgtcgaagcaaaggtaaatagaagcacagccctgctgaaatcgctgtccgcagagagggagcgctgggagaagacatctgagacgttcaaaaatcagatgtcaactatcgctggggactgccttttgtccgcagcattcattgcgtatgccggatactttgatcagcaaatgcgccaaaacttgttcactacctggtcacatcatcttcaacaggcaaacattcagtttagaacggatattgcgaggacagagtatctgtccaacgccgacgagcgcctaagatggcaggccagctctctgccggctgacgacctctgtaccgagaacgccatcatgctcaagaggtttaataggtaccctctcattattgacccatcaggccaggccacggagtttatcatgaacgagtataaagaccgcaagattacaagaactagtttcctagacgacgcgttccgaaaaaatctcgagagcgctctgcgctttggtaaccctttacttgtccaggatgtcgagtcttacgatccagtactgaaccctgtgctgaatcgcgaggtgagaaggacaggcggaagggtcttaatcaccctgggagaccaggatattgacttgagccccagctttgttattttcctaagcactcgagatccgacagtggagtttcctccggacctttgctctcgggttacatttgtgaattttaccgtgactaggtctagtctccagtcacagtgcctgaacgaggttttgaaggcggagcgacccgatgtcgatgagaagcgctccgacctgctgaagctacagggagagtttcagttgagactccggcagctcgagaaatccctcctgcaagctctgaacgaggtgaaggggagaatcctggacgacgacaccattattaccaccctggagaaccttaagcgagaggccgctgaggtaacacggaaagtagaagaaaccgacattgttatgcaggaggtggaaaccgtctcacagcagtatctgcccctttccactgcctgttccagcatttactttacaatggaatcactcaaacagatccattttctttaccagtactcccttcagttctttctggatatttaccacaacgtcctgtacgagaacccgaacctgaagggcgtcacagatcacactcaacggctgagcatcatcacaaaggacttgttccaggtggcttttaatcgagtcgcaaggggaatgttacaccaagatcacattacctttgccatgcttctcgcacggattaaactgaaagggacagttggtgaaccaacctacgacgctgagttccagcacttcctccggggaaatgagattgtgctttcggctggttctacaccgcgtatccaaggcctgaccgtggagcaagcggaggccgtggtgaggcttagttgtctaccagcgttcaaagacctgatcgctaaggttcaggccgacgagcaatttggtatttggctggactcctctagcccagaacagaccgttccgtatctttggagtgaggagaccccagcaacacccatagggcaagccatccatcgcctgctcctgatccaagcattcaggcccgaccgccttttggccatggcacatatgttcgtatccactaatctcggcgagagctttatgtctatcatggaacagccccttgatttgacacacatcgtagggaccgaagtgaaacctaatacccccgttttgatgtgttcggtccccggttacgacgcctcaggtcacgtggaagatctcgctgccgaacagaatactcagattacaagtatagcaataggaagcgccgaaggtttcaatcaggccgacaaagcgatcaatacagccgtgaaaagcgggaggtgggtgatgctgaagaatgttcacctggcccctgggtggttgatgcaactggagaaaaaactccactccctgcaaccccatgcctgcttcagactcttcctgaccatggagatcaatccaaaggtcccagtgaacctgttacgcgctgggagaatttttgtgttcgaacccccaccaggcgtgaaggccaacatgcttaggactttctcctctataccagtgtcaaggatatgcaaatcccccaacgagcgagcccgtctctacttcttgttggcctggtttcatgcaattatccaagagcgcctacgatatgctccgctgggatggtcaaaaaaatacgagttcggcgagtccgacctgcgttctgcgtgcgacaccgtggacacatggctagatgatacagccaaaggcagacagaacatctcaccagacaaaatcccatggagtgcactgaagacactcatggcacagtcgatctatggcggtcgcgtcgacaacgagtttgaccagagacttctcaacacatttctggaacgcttgtttacaacaaggtccttcgatagcgagtttaagctcgcgtgtaaagtagacggacacaaagacatccaaatgcccgatggtattagaagggaagagtttgtgcaatgggttgaactcttgcccgacacccagactccgtcttggctgggcctcccaaataacgcggaacgcgtccttctgacgacccagggggtggacatgatttccaagatgctgaaaatgcagatgctggaggacgaggacgatctggcttatgccgaaacagaaaaaaaaaccagaacagatagcactagcgatggaaggcctgcttggatgaggactctgcacacgaccgcctcaaattggctgcatctgattcctcagacattgtctcacctgaaacgcaccgttgagaatatcaaagatccactgtttcgattctttgaaagagaggtgaagatgggcgctaaattgctacaggatgtcagacaggacctggcagatgtcgttcaagtctgcgagggtaagaagaagcaaacgaactatctccggactctgatcaacgaactagtcaagggcatcctgcccaggagttggagtcattacacagttcccgctggcatgactgtcattcagtgggtatctgacttttctgagcgcatcaagcaactgcagaatatttctttagccgcagcctcaggcggtgctaaggagttgaagaatatccacgtgtgcctgggagggcttttcgtccccgaggcttacatcacagccacacgacagtacgtggctcaggcgaatagttggagcctagaggagctgtgtttagaagtgaatgtgaccactagccagggtgctactctggatgcctgttccttcggagtaactggactgaaactgcaaggtgccacatgcaacaacaataaattgagtttatctaacgcaatatctacagcgctccctctcacccagctgagatgggttaagcagacaaacactgagaaaaaagcatccgtagttacgctgcccgtgtacctgaattttactcgtgccgacctgattttcacggttgattttgagatcgccaccaaggaagaccccaggtccttctatgaaaggggtgtagccgtgttatgtactgaatag

SEQ ID NO: 117355 - DNA, 13941 bp, Artificial Sequence
  derived and/or modified sequence
atgagcgagcccggcggcggcggcggcgaggacggcagcgccggcctggaggtgagcgccgtgcagaacgtggccgacgtgagcgtgctgcagaagcacctgagaaagctggtgcccctgctgctggaggacggcggcgaggcccccgccgccctggaggccgccctggaggagaagagcgccctggagcagatgagaaagttcctgagcgacccccaggtgcacaccgtgctggtggagagaagcaccctgaaggaggacgtgggcgacgagggcgaggaggagaaggagttcatcagctacaacatcaacatcgacatccactacggcgtgaagagcaacagcctggccttcatcaagagaacccccgtgatcgacgccgacaagcccgtgagcagccagctgagagtgctgaccctgagcgaggacagcccctacgagaccctgcacagcttcatcagcaacgccgtggcccccttcttcaagagctacatcagagagagcggcaaggccgacagagacggcgacaagatggcccccagcgtggagaagaagatcgccgagctggagatgggcctgctgcacctgcagcagaacatcgagatccccgagatcagcctgcccatccaccccatgatcaccaacgtggccaagcagtgctacgagagaggcgagaagcccaaggtgaccgacttcggcgacaaggtggaggaccccaccttcctgaaccagctgcagagcggcgtgaacagatggatcagagagatccagaaggtgaccaagctggacagagaccccgccagcggcaccgccctgcaggagatcagcttctggctgaacctggagagagccctgtacagaatccaggagaagagagagagccccgaggtgctgctgaccctggacatcctgaagcacggcaagagattccacgccaccgtgagcttcgacaccgacaccggcctgaagcaggccctggagaccgtgaacgactacaaccccctgatgaaggacttccccctgaacgacctgctgagcgccaccgagctggacaagatcagacaggccctggtggccatcttcacccacctgagaaagatcagaaacaccaagtaccccatccagagagccctgagactggtggaggccatcagcagagacctgagcagccagctgctgaaggtgctgggcaccagaaagctgatgcacgtggcctacgaggagttcgagaaggtgatggtggcctgcttcgaggtgttccagacctgggacgacgagtacgagaagctgcaggtgctgctgagagacatcgtgaagagaaagagagaggagaacctgaagatggtgtggagaatcaaccccgcccacagaaagctgcaggccagactggaccagatgagaaagttcagaagacagcacgagcagctgagagccgtgatcgtgagagtgctgagaccccaggtgaccgccgtggcccagcagaaccagggcgaggtgcccgagccccaggacatgaaggtggccgaggtgctgttcgacgccgccgacgccaacgccatcgaggaggtgaacctggcctacgagaacgtgaaggaggtggacggcctggacgtgagcaaggagggcaccgaggcctgggaggccgccatgaagagatacgacgagagaatcgacagagtggagaccagaatcaccgccagactgagagaccagctgggcaccgccaagaacgccaacgagatgttcagaatcttcagcagattcaacgccctgttcgtgagaccccacatcagaggcgccatcagagagtaccagacccagctgatccagagagtgaaggacgacatcgagagcctgcacgacaagttcaaggtgcagtacccccagagccaggcctgcaagatgagccacgtgagagacctgccccccgtgagcggcagcatcatctgggccaagcagatcgacagacagctgaccgcctacatgaagagagtggaggacgtgctgggcaagggctgggagaaccacgtggagggccagaagctgaagcaggacggcgacagcttcagaatgaagctgaacacccaggagatcttcgacgactgggccagaaaggtgcagcagagaaacctgggcgtgagcggcagaatcttcaccatcgagagcaccagagtgagaggcagaaccggcaacgtgctgaagctgaaggtgaacttcctgcccgagatcatcaccctgagcaaggaggtgagaaacctgaagtggctgggcttcagagtgcccctggccatcgtgaacaaggcccaccaggccaaccagctgtaccccttcgccatcagcctgatcgagagcgtgagaacctacgagagaacctgcgagaaggtggaggagagaaacaccatcagcctgctggtggccggcctgaagaaggaggtgcaggccctgatcgccgagggcatcgccctggtgtgggagagctacaagctggacccctacgtgcagagactggccgagaccgtgttcaacttccaggagaaggtggacgacctgctgatcatcgaggagaagatcgacctggaggtgagaagcctggagacctgcatgtacgaccacaagaccttcagcgagatcctgaacagagtgcagaaggccgtggacgacctgaacctgcacagctacagcaacctgcccatctgggtgaacaagctggacatggagatcgagagaatcctgggcgtgagactgcaggccggcctgagagcctggacccaggtgctgctgggccaggccgaggacaaggccgaggtggacatggacaccgacgccccccaggtgagccacaagcccggcggcgagcccaagatcaagaacgtggtgcacgagctgagaatcaccaaccaggtgatctacctgaacccccccatcgaggagtgcagatacaagctgtaccaggagatgttcgcctggaagatggtggtgctgagcctgcccagaatccagagccagagataccaggtgggcgtgcactacgagctgaccgaggaggagaagttctacagaaacgccctgaccagaatgcccgacggccccgtggccctggaggagagctacagcgccgtgatgggcatcgtgagcgaggtggagcagtacgtgaaggtgtggctgcagtaccagtgcctgtgggacatgcaggccgagaacatctacaacagactgggcgaggacctgaacaagtggcaggccctgctggtgcagatcagaaaggccagaggcaccttcgacaacgccgagaccaagaaggagttcggccccgtggtgatcgactacggcaaggtgcagagcaaggtgaacctgaagtacgacagctggcacaaggaggtgctgagcaagttcggccagatgctgggcagcaacatgaccgagttccacagccagatcagcaagagcagacaggagctggagcagcacagcgtggacaccgccagcaccagcgacgccgtgaccttcatcacctacgtgcagagcctgaagagaaagatcaagcagttcgagaagcaggtggagctgtacagaaacggccagagactgctggagaagcagagattccagttcccccccagctggctgtacatcgacaacatcgagggcgagtggggcgccttcaacgacatcatgagaagaaaggacagcgccatccagcagcaggtggccaacctgcagatgaagatcgtgcaggaggacagagccgtggagagcagaaccaccgacctgctgaccgactgggagaagaccaagcccgtgaccggcaacctgagacccgaggaggccctgcaggccctgaccatctacgagggcaagttcggcagactgaaggacgacagagagaagtgcgccaaggccaaggaggccctggagctgaccgacaccggcctgctgagcggcagcgaggagagagtgcaggtggccctggaggagctgcaggacctgaagggcgtgtggagcgagctgagcaaggtgtgggagcagatcgaccagatgaaggagcagccctgggtgagcgtgcagcccagaaagctgagacagaacctggacgccctgctgaaccagctgaagagcttccccgccagactgagacagtacgccagctacgagttcgtgcagagactgctgaagggctacatgaagatcaacatgctggtgatcgagctgaagagcgaggccctgaaggacagacactggaagcagctgatgaagagactgcacgtgaactgggtggtgagcgagctgaccctgggccagatctgggacgtggacctgcagaagaacgaggccatcgtgaaggacgtgctgctggtggcccagggcgagatggccctggaggagttcctgaagcagatcagagaggtgtggaacacctacgagctggacctggtgaactaccagaacaagtgcagactgatcagaggctgggacgacctgttcaacaaggtgaaggagcacatcaacagcgtgagcgccatgaagctgagcccctactacaaggtgttcgaggaggacgccctgagctgggaggacaagctgaacagaatcatggccctgttcgacgtgtggatcgacgtgcagagaagatgggtgtacctggagggcatcttcaccggcagcgccgacatcaagcacctgctgcccgtggagacccagagattccagagcatcagcaccgagttcctggccctgatgaagaaggtgagcaagagccccctggtgatggacgtgctgaacatccagggcgtgcagagaagcctggagagactggccgacctgctgggcaagatccagaaggccctgggcgagtacctggagagagagagaagcagcttccccagattctacttcgtgggcgacgaggacctgctggagatcatcggcaacagcaagaacgtggccaagctgcagaagcacttcaagaagatgttcgccggcgtgagcagcatcatcctgaacgaggacaacagcgtggtgctgggcatcagcagcagagagggcgaggaggtgatgttcaagacccccgtgagcatcaccgagcaccccaagatcaacgagtggctgaccctggtggagaaggagatgagagtgaccctggccaagctgctggccgagagcgtgaccgaggtggagatcttcggcaaggccaccagcatcgaccccaacacctacatcacctggatcgacaagtaccaggcccagctggtggtgctgagcgcccagatcgcctggagcgagaacgtggagaccgccctgagcagcatgggcggcggcggcgacgccgcccccctgcacagcgtgctgagcaacgtggaggtgaccctgaacgtgctggccgacagcgtgctgatggagcagccccccctgagaagaagaaagctggagcacctgatcaccgagctggtgcaccagagagacgtgaccagaagcctgatcaagagcaagatcgacaacgccaagagcttcgagtggctgagccagatgagattctacttcgaccccaagcagaccgacgtgctgcagcagctgagcatccagatggccaacgccaagttcaactacggcttcgagtacctgggcgtgcaggacaagctggtgcagacccccctgaccgacagatgctacctgaccatgacccaggccctggaggccagactgggcggcagccccttcggccccgccggcaccggcaagaccgagagcgtgaaggccctgggccaccagctgggcagattcgtgctggtgttcaactgcgacgagaccttcgacttccaggccatgggcagaatcttcgtgggcctgtgccaggtgggcgcctggggctgcttcgacgagttcaacagactggaggagagaatgctgagcgccgtgagccagcaggtgcagtgcatccaggaggccctgagagagcacagcaaccccaactacgacaagaccagcgcccccatcacctgcgagctgctgaacaagcaggtgaaggtgagccccgacatggccatcttcatcaccatgaaccccggctacgccggcagaagcaacctgcccgacaacctgaagaagctgttcagaagcctggccatgaccaagcccgacagacagctgatcgcccaggtgatgctgtacagccagggcttcagaaccgccgaggtgctggccaacaagatcgtgcccttcttcaagctgtgcgacgagcagctgagcagccagagccactacgacttcggcctgagagccctgaagagcgtgctggtgagcgccggcaacgtgaagagagagagaatccagaagatcaagagagagaaggaggagagaggcgaggccgtggacgagggcgagatcgccgagaacctgcccgagcaggagatcctgatccagagcgtgtgcgagaccatggtgcccaagctggtggccgaggacatccccctgctgttcagcctgctgagcgacgtgttccccggcgtgcagtaccacagaggcgagatgaccgccctgagagaggagctgaagaaggtgtgccaggagatgtacctgacctacggcgacggcgaggaggtgggcggcatgtgggtggagaaggtgctgcagctgtaccagatcacccagatcaaccacggcctgatgatggtgggccccagcggcagcggcaagagcatggcctggagagtgctgctgaaggccctggagagactggagggcgtggagggcgtggcccacatcatcgaccccaaggccatcagcaaggaccacctgtacggcaccctggaccccaacaccagagagtggaccgacggcctgttcacccacgtgctgagaaagatcatcgacagcgtgagaggcgagctgcagaagagacagtggatcgtgttcgacggcgacgtggaccccgagtgggtggagaacctgaacagcgtgctggacgacaacaagctgctgaccctgcccaacggcgagagactgagcctgccccccaacgtgagaatcatgttcgaggtgcaggacctgaagtacgccaccctggccaccgtgagcagatgcggcatggtgtggttcagcgaggacgtgctgagcaccgacatgatcttcaacaacttcctggccagactgagaagcatccccctggacgagggcgaggacgaggcccagagaagaagaaagggcaaggaggacgagggcgaggaggccgccagccccatgctgcagatccagagagacgccgccaccatcatgcagccctacttcaccagcaacggcctggtgaccaaggccctggagcacgccttccagctggagcacatcatggacctgaccagactgagatgcctgggcagcctgttcagcatgctgcaccaggcctgcagaaacgtggcccagtacaacgccaaccaccccgacttccccatgcagatcgagcagctggagagatacatccagagatacctggtgtacgccatcctgtggagcctgagcggcgacagcagactgaagatgagagccgagctgggcgagtacatcagaagaatcaccaccgtgcccctgcccaccgcccccaacatccccatcatcgactacgaggtgagcatcagcggcgagtggagcccctggcaggccaaggtgccccagatcgaggtggagacccacaaggtggccgcccccgacgtggtggtgcccaccctggacaccgtgagacacgaggccctgctgtacacctggctggccgagcacaagcccctggtgctgtgcggcccccccggcagcggcaagaccatgaccctgttcagcgccctgagagccctgcccgacatggaggtggtgggcctgaacttcagcagcgccaccacccccgagctgctgctgaagaccttcgaccactactgcgagtacagaagaacccccaacggcgtggtgctggcccccgtgcagctgggcaagtggctggtgctgttctgcgacgagatcaacctgcccgacatggacaagtacggcacccagagagtgatcagcttcatcagacagatggtggagcacggcggcttctacagaaccagcgaccagacctgggtgaagctggagagaatccagttcgtgggcgcctgcaacccccccaccgaccccggcagaaagcccctgagccacagattcctgagacacgtgcccgtggtgtacgtggactaccccggccccgccagcctgacccagatctacggcaccttcaacagagccatgctgagactgatccccagcctgagaacctacgccgagcccctgaccgccgccatggtggagttctacaccatgagccaggagagattcacccaggacacccagccccactacatctacagccccagagagatgaccagatgggtgagaggcatcttcgaggccctgagacccctggagaccctgcccgtggagggcctgatcagaatctgggcccacgaggccctgagactgttccaggacagactggtggaggacgaggagagaagatggaccgacgagaacatcgacaccgtggccctgaagcacttccccaacatcgacagagagaaggccatgagcagacccatcctgtacagcaactggctgagcaaggactacatccccgtggaccaggaggagctgagagactacgtgaaggccagactgaaggtgttctacgaggaggagctggacgtgcccctggtgctgttcaacgaggtgctggaccacgtgctgagaatcgacagaatcttcagacagccccagggccacctgctgctgatcggcgtgagcggcgccggcaagaccaccctgagcagattcgtggcctggatgaacggcctgagcgtgtaccagatcaaggtgcacagaaagtacaccggcgaggacttcgacgaggacctgagaaccgtgctgagaagaagcggctgcaagaacgagaagatcgccttcatcatggacgagagcaacgtgctggacagcggcttcctggagagaatgaacaccctgctggccaacggcgaggtgcccggcctgttcgagggcgacgagtacgccaccctgatgacccagtgcaaggagggcgcccagaaggagggcctgatgctggacagccacgaggagctgtacaagtggttcaccagccaggtgatcagaaacctgcacgtggtgttcaccatgaaccccagcagcgagggcctgaaggacagagccgccaccagccccgccctgttcaacagatgcgtgctgaactggttcggcgactggagcaccgaggccctgtaccaggtgggcaaggagttcaccagcaagatggacctggagaagcccaactacatcgtgcccgactacatgcccgtggtgtacgacaagctgccccagccccccagccacagagaggccatcgtgaacagctgcgtgttcgtgcaccagaccctgcaccaggccaacgccagactggccaagagaggcggcagaaccatggccatcacccccagacactacctggacttcatcaaccactacgccaacctgttccacgagaagagaagcgagctggaggagcagcagatgcacctgaacgtgggcctgagaaagatcaaggagaccgtggaccaggtggaggagctgagaagagacctgagaatcaagagccaggagctggaggtgaagaacgccgccgccaacgacaagctgaagaagatggtgaaggaccagcaggaggccgagaagaagaaggtgatgagccaggagatccaggagcagctgcacaagcagcaggaggtgatcgccgacaagcagatgagcgtgaaggaggacctggacaaggtggagcccgccgtgatcgaggcccagaacgccgtgaagagcatcaagaagcagcacctggtggaggtgagaagcatggccaacccccccgccgccgtgaagctggccctggagagcatctgcctgctgctgggcgagagcaccaccgactggaagcagatcagaagcatcatcatgagagagaacttcatccccaccatcgtgaacttcagcgccgaggagatcagcgacgccatcagagagaagatgaagaagaactacatgagcaaccccagctacaactacgagatcgtgaacagagccagcctggcctgcggccccatggtgaagtgggccatcgcccagctgaactacgccgacatgctgaagagagtggagcccctgagaaacgagctgcagaagctggaggacgacgccaaggacaaccagcagaaggccaacgaggtggagcagatgatcagagacctggaggccagcatcgccagatacaaggaggagtacgccgtgctgatcagcgaggcccaggccatcaaggccgacctggccgccgtggaggccaaggtgaacagaagcaccgccctgctgaagagcctgagcgccgagagagagagatgggagaagaccagcgagaccttcaagaaccagatgagcaccatcgccggcgactgcctgctgagcgccgccttcatcgcctacgccggctacttcgaccagcagatgagacagaacctgttcaccacctggagccaccacctgcagcaggccaacatccagttcagaaccgacatcgccagaaccgagtacctgagcaacgccgacgagagactgagatggcaggccagcagcctgcccgccgacgacctgtgcaccgagaacgccatcatgctgaagagattcaacagataccccctgatcatcgaccccagcggccaggccaccgagttcatcatgaacgagtacaaggacagaaagatcaccagaaccagcttcctggacgacgccttcagaaagaacctggagagcgccctgagattcggcaaccccctgctggtgcaggacgtggagagctacgaccccgtgctgaaccccgtgctgaacagagaggtgagaagaaccggcggcagagtgctgatcaccctgggcgaccaggacatcgacctgagccccagcttcgtgatcttcctgagcaccagagaccccaccgtggagttcccccccgacctgtgcagcagagtgaccttcgtgaacttcaccgtgaccagaagcagcctgcagagccagtgcctgaacgaggtgctgaaggccgagagacccgacgtggacgagaagagaagcgacctgctgaagctgcagggcgagttccagctgagactgagacagctggagaagagcctgctgcaggccctgaacgaggtgaagggcagaatcctggacgacgacaccatcatcaccaccctggagaacctgaagagagaggccgccgaggtgaccagaaaggtggaggagaccgacatcgtgatgcaggaggtggagaccgtgagccagcagtacctgcccctgagcaccgcctgcagcagcatctacttcaccatggagagcctgaagcagatccacttcctgtaccagtacagcctgcagttcttcctggacatctaccacaacgtgctgtacgagaaccccaacctgaagggcgtgaccgaccacacccagagactgagcatcatcaccaaggacctgttccaggtggccttcaacagagtggccagaggcatgctgcaccaggaccacatcaccttcgccatgctgctggccagaatcaagctgaagggcaccgtgggcgagcccacctacgacgccgagttccagcacttcctgagaggcaacgagatcgtgctgagcgccggcagcacccccagaatccagggcctgaccgtggagcaggccgaggccgtggtgagactgagctgcctgcccgccttcaaggacctgatcgccaaggtgcaggccgacgagcagttcggcatctggctggacagcagcagccccgagcagaccgtgccctacctgtggagcgaggagacccccgccacccccatcggccaggccatccacagactgctgctgatccaggccttcagacccgacagactgctggccatggcccacatgttcgtgagcaccaacctgggcgagagcttcatgagcatcatggagcagcccctggacctgacccacatcgtgggcaccgaggtgaagcccaacacccccgtgctgatgtgcagcgtgcccggctacgacgccagcggccacgtggaggacctggccgccgagcagaacacccagatcaccagcatcgccatcggcagcgccgagggcttcaaccaggccgacaaggccatcaacaccgccgtgaagagcggcagatgggtgatgctgaagaacgtgcacctggcccccggctggctgatgcagctggagaagaagctgcacagcctgcagccccacgcctgcttcagactgttcctgaccatggagatcaaccccaaggtgcccgtgaacctgctgagagccggcagaatcttcgtgttcgagcccccccccggcgtgaaggccaacatgctgagaaccttcagcagcatccccgtgagcagaatctgcaagagccccaacgagagagccagactgtacttcctgctggcctggttccacgccatcatccaggagagactgagatacgcccccctgggctggagcaagaagtacgagttcggcgagagcgacctgagaagcgcctgcgacaccgtggacacctggctggacgacaccgccaagggcagacagaacatcagccccgacaagatcccctggagcgccctgaagaccctgatggcccagagcatctacggcggcagagtggacaacgagttcgaccagagactgctgaacaccttcctggagagactgttcaccaccagaagcttcgacagcgagttcaagctggcctgcaaggtggacggccacaaggacatccagatgcccgacggcatcagaagagaggagttcgtgcagtgggtggagctgctgcccgacacccagacccccagctggctgggcctgcccaacaacgccgagagagtgctgctgaccacccagggcgtggacatgatcagcaagatgctgaagatgcagatgctggaggacgaggacgacctggcctacgccgagaccgagaagaagaccagaaccgacagcaccagcgacggcagacccgcctggatgagaaccctgcacaccaccgccagcaactggctgcacctgatcccccagaccctgagccacctgaagagaaccgtggagaacatcaaggaccccctgttcagattcttcgagagagaggtgaagatgggcgccaagctgctgcaggacgtgagacaggacctggccgacgtggtgcaggtgtgcgagggcaagaagaagcagaccaactacctgagaaccctgatcaacgagctggtgaagggcatcctgcccagaagctggagccactacaccgtgcccgccggcatgaccgtgatccagtgggtgagcgacttcagcgagagaatcaagcagctgcagaacatcagcctggccgccgccagcggcggcgccaaggagctgaagaacatccacgtgtgcctgggcggcctgttcgtgcccgaggcctacatcaccgccaccagacagtacgtggcccaggccaacagctggagcctggaggagctgtgcctggaggtgaacgtgaccaccagccagggcgccaccctggacgcctgcagcttcggcgtgaccggcctgaagctgcagggcgccacctgcaacaacaacaagctgagcctgagcaacgccatcagcaccgccctgcccctgacccagctgagatgggtgaagcagaccaacaccgagaagaaggccagcgtggtgaccctgcccgtgtacctgaacttcaccagagccgacctgatcttcaccgtggacttcgagatcgccaccaaggaggaccccagaagcttctacgagagaggcgtggccgtgctgtgcaccgagtag

SEQ ID NO: 117356 - DNA, 14333 bp, Artificial Sequence
  derived and/or modified sequence
ctggcagtggctgcctttagggcggagccggctcccgctctcctcagtctgcggtgggctagcggacggtccggcttccggcggccgtttctgtctcttgctggctgtctcgctgagtcgcggccgccttctcatcgctcctggaaggtcccgagcgcgacaccatgtcggagcccgggggcggcggcggcgaggacggctcggccggattggaagtgtcggccgtgcagaatgtggcggacgtgtcggtgctgcagaagcacctgcgcaagctggtgccgctgctgctggaggacggcggcgaggcgccggccgcgctggaggcggcgctggaggagaagagcgccctggagcagatgcgcaagttcctttcggacccgcaggtccacacggtgctggtggagcgctccacgctcaaagaggacgtcggtgatgaaggagaagaagaaaaagaattcatttcctataacatcaacatagacattcattatggggttaaatccaatagcttggcattcattaaacgtactcccgtgattgatgcagataaacccgtgtcttctcagctccgggtccttacactcagtgaagactcgccctacgaaactttgcattctttcattagcaatgcagtggctcctttttttaagtcctacattagagagtctggcaaggcagacagggatggtgataaaatggctccttcagttgaaaagaagattgcagaactcgaaatgggactccttcacttgcagcaaaatattgaaattccggagatcagcctgccgattcatccaatgatcacaaatgttgcaaaacagtgttatgagcgtggagaaaagccaaaagttacagactttggtgataaggttgaagacccaacatttcttaatcagttacaatctggagttaaccgctggatccgagaaattcaaaaagtgaccaaactggatcgagatcctgcatcaggaactgccttacaggaaattagtttttggctaaacttggaacgtgcgttataccgcatccaggagaaacgggagagcccggaagttctcctgactctggatatcttgaaacatggcaagcgcttccatgccaccgtcagttttgacactgacacaggtctaaaacaggctttggaaactgtgaatgactacaatcctctgatgaaagatttccctctgaatgatttgctgtctgccacggagctggacaaaataagacaggcgcttgttgccattttcacacatttgagaaagatccgaaacacaaaatatcctattcagagggcactgcgtttggtggaggcaatttcaagagacttgagttctcaattactcaaagtattgggcactaggaaattgatgcatgttgcttatgaagaatttgaaaaagttatggtagcatgctttgaagtttttcagacttgggatgatgagtatgagaaacttcaggtattgttgagagacatcgtcaaaagaaaaagggaagaaaatctgaagatggtgtggcgtatcaaccctgcccacaggaagctgcaggcccgccttgaccagatgagaaaatttagacgccagcatgaacagctaagagctgttatcgtcagggtcctgaggccacaggtcacggcagttgcacaacagaatcaaggagaggtccctgaaccccaagatatgaaagtggctgaggttctctttgatgctgcagatgcaaatgccattgaggaagtaaaccttgcttatgagaacgtcaaggaagtggatggactggatgtttccaaagagggcacggaagcctgggaggctgctatgaagaggtacgatgagaggatcgacagagtggagacccggatcaccgctcgccttcgggatcagcttggcacagccaagaatgccaacgagatgtttaggattttctccaggtttaatgcactgtttgtcaggcctcacatccgtggggccattcgcgaataccagacccagctgatccagcgcgtgaaagatgacattgagtctcttcacgacaagttcaaggtccagtacccacagagtcaggcttgtaagatgagtcacgttcgtgacttgccccctgtgtcagggtctatcatctgggctaaacagatcgacaggcagctgacggcctacatgaagcgggtggaagatgtccttggcaagggctgggagaatcacgtggaggggcagaagctgaagcaggatggagacagcttccgcatgaagctcaacacgcaggagatctttgatgactgggcaaggaaggtgcagcagcgcaacctcggtgtctcggggcgcattttcaccatcgaaagtactcgggttcggggccgaactggaaatgtgcttaagctgaaagttaactttcttcctgagattatcacactatccaaagaagtccggaacctcaaatggcttggtttccgcgtcccactggcgattgtgaacaaagcccatcaagcaaaccagctttacccgtttgccatctcactgatcgagagcgttcgtacctatgaacggacctgcgagaaggtggaggagcggaacaccatttcccttttggtggctggcttgaaaaaggaagtgcaggccctgatcgcagaaggcattgcgttggtgtgggagtcctacaaacttgacccatatgtacagcgcttagcagagactgtcttcaacttccaagaaaaggtggatgatctgctgatcattgaagaaaaaatagacctagaagtccgttccttggaaacttgtatgtatgaccataagacattctcggaaatcttgaacagagtccagaaagcagtggatgacttaaatctgcactcctattccaatttgcccatctgggtcaacaagcttgacatggagattgaaagaatattgggcgtccgtctgcaagctggcctgagagcttggacgcaggttcttcttggacaagctgaagataaagcagaagttgacatggacacagatgctccacaagttagtcacaagcctggtggagagccaaagatcaaaaatgtcgttcatgagctaagaataaccaatcaggtaatctacttgaatccaccaattgaagagtgcagatacaagctgtatcaggaaatgtttgcctggaagatggttgtactgtctctccccaggatccagagtcagaggtaccaggtgggtgtacattacgaattgactgaggaagagaaattctatcggaatgctttaacacggatgcctgatggccctgttgccctggaagagtcgtattctgctgtcatgggcattgtatctgaagttgaacagtatgtcaaggtttggcttcagtatcagtgtttatgggatatgcaagctgaaaacatctataacagacttggagaagatctcaacaaatggcaggctctcctggtccaaataaggaaggccagaggaacctttgacaatgcagaaaccaagaaagagtttggaccagtagttatagattatggcaaggtacaatctaaggtgaacttgaaatatgactcttggcataaggaggttcttagcaaatttgggcagatgctaggatcaaacatgacggaattccattcccagatctcaaagtcccgccaagagttggagcagcactcagtagacacggccagcacctccgatgcagtgaccttcatcacctatgtgcagtctttgaaacggaagatcaagcagtttgagaagcaagttgagctctaccgcaatggccagcgcttactggaaaagcaaaggttccagttcccaccttcctggctttatattgacaacatcgagggagagtggggagccttcaatgacatcatgcggcgaaaggactctgccattcagcagcaggtggcaaacctgcaaatgaagattgtccaggaggatcgggccgtggaaagccgcaccaccgacctgctgactgactgggagaagaccaagcctgtcacgggcaaccttcgcccagaagaggcacttcaggctctcaccatatatgaggggaagtttggtaggctgaaggacgacagagagaagtgtgcaaaggccaaggaggcgctggaattgacagatactgggcttctcagtggcagtgaagagcgcgtgcaggtggccttagaagaattacaggacctcaaaggcgtttggtcagaactttctaaggtttgggagcaaatcgatcagatgaaggagcaaccctgggtttcagtacagcctcgaaagcttcgacaaaatttggatgccctcctgaaccagctgaaaagcttccctgcccggttgcgacagtatgcgtcctatgagtttgttcagaggcttctgaaaggttacatgaagataaatatgctggtgattgaactgaaatccgaagcacttaaagaccgccattggaaacagctcatgaaaaggcttcacgttaattgggttgtttctgagctaacccttggccaaatctgggatgttgacttgcagaaaaatgaagcgattgtcaaggatgtactgcttgtggcacaaggggagatggctttggaagaatttttgaagcagataagagaagtgtggaatacttatgaactagacttggttaattatcagaacaagtgccgcttgatccgtggctgggatgacctcttcaacaaggtcaaagaacacatcaacagcgtctcggccatgaagctctctccgtattacaaggtttttgaagaggatgctctcagctgggaagataagctgaacaggatcatggctctctttgatgtgtggattgatgtgcagaggcggtgggtctacctggaaggtatcttcacaggcagtgcagatatcaagcacctgctgccagtggaaacccagcggtttcagagcatcagcactgagtttttggctctaatgaaaaaagtgtccaagtctccccttgttatggatgttctgaacatccagggagtacagaggtctctggaaagattggcagacctgctaggaaagatccagaaagcattgggagaatatctggaaagagagcggtcatctttccccaggttctattttgtgggtgatgaagatttgcttgaaatcattggaaacagcaagaatgtcgctaaattacagaaacacttcaagaagatgtttgctggagtttcgagcatcatcctgaacgaggataactctgttgttttgggtatttcatctcgggaaggagaggaggttatgtttaaaactcctgtgtcaattactgaacatcccaaaatcaatgagtggctcacattggtagaaaaggagatgagagtcaccctggccaaactgcttgctgagtctgttacggaagttgagatttttggtaaagcaacttcaattgacccaaatacctacatcacttggattgataaataccaggcccagcttgtggttttgtcagcccagatagcctggtctgagaacgtggagaccgcactgagcagcatgggcggaggtggagatgccgcgcccttgcactctgtgctgagcaatgtggaggtcaccctcaatgtgttagcagactctgtcctcatggagcagcccccactccgaaggcggaagctagaacacttgattacagagttggttcaccagagagatgttacaaggtccttgatcaaaagcaagattgacaacgccaaatcttttgaatggctcagccagatgcgattttactttgaccctaagcaaactgatgtgttacagcagttgtcaattcaaatggcaaatgccaaatttaactatggctttgagtacctgggtgttcaggacaaactggtccagacccccctcactgaccgctgctatttgacaatgacacaagccttggaggccaggctggggggttccccatttggacctgctggaactgggaaaacagagtctgtcaaagctcttggccatcagcttggacggtttgttttagttttcaactgtgatgaaacctttgatttccaggcaatgggccggatctttgtgggcctttgccaggtgggtgcctggggctgctttgacgagttcaaccgcctggaggagcggatgctctcggctgtgtcccagcaggtgcagtgcatacaggaagcactgcgtgaacattccaaccccaactacgacaagacctctgcccccattacttgtgagctgctgaacaaacaagtcaaggtgagcccggacatggccatcttcatcaccatgaaccctggctacgcgggccggtctaaccttcctgacaacttgaagaagctgttccggagcttggccatgaccaagcccgaccggcagttaatcgcccaggtcatgctgtactcacagggtttccgcactgctgaagtgcttgccaacaaaatcgtcccgttttttaaactatgcgatgagcagctctcttcccaaagccattatgacttcggtcttcgggctttgaagagtgtgctggtgagtgcaggcaatgtgaagagagagagaatccagaagataaagagggagaaagaggaacgaggggaagcagttgatgaaggagaaattgctgaaaatctccctgaacaagagattctgatacagagcgtctgtgagacgatggtgccaaagctggtggcagaggacatcccgctgctcttcagcctcctgtcggacgtgttccctggagtccagtatcacaggggtgagatgactgcccttcgagaggagctgaagaaagtgtgtcaggagatgtatttgacatatggagatggagaagaagttggtggaatgtgggttgaaaaggttctccagctctatcagatcacccagatcaatcatggcctgatgatggtggggccctcgggaagtgggaagagcatggcctggcgtgtcctgctgaaggcattggagagactcgagggtgtggaaggtgtggcccatatcatcgaccccaaggccatcagcaaagaccacctctacggaaccctggaccccaacaccagggaatggacagatgggctcttcacacacgtgctgagaaagatcatcgacagcgtgagaggcgagctgcagaagcgccagtggatcgtcttcgatggcgatgtggatccagagtgggttgagaacttgaactcagtgctggatgacaataagctcctaactttgcccaatggagagcgcctcagtcttccacccaatgtgagaataatgtttgaggtacaggacttgaaatacgcgaccttggccacagtgtcgcgctgcggcatggtctggttcagtgaggatgtgctgagcaccgacatgatcttcaacaacttcctggccaggctgcgcagcatcccgctggatgaaggggaggatgaggcacagcggcggcgtaagggcaaagaggatgagggggaggaggccgcttcccccatgctgcagatccaaagagatgcagctacgatcatgcaaccgtacttcacgtccaacggcctggtcaccaaggcgctagagcacgccttccagctggagcacatcatggacctaacacgcctgcgctgcctgggctcgctcttctccatgctgcaccaggcctgccgcaacgtggcgcagtataacgccaaccatcccgacttccccatgcagatcgagcagctggagcgctacattcagcgatatctggtttatgccatactctggtccctgtctggagacagccggctaaaaatgagagcagagctgggtgaatacatcagaagaatcacgaccgtgcctctgcccactgcgcccaacatacccattatcgattatgaggtgtccatcagcggagaatggtctccgtggcaggccaaggtgcctcagattgaagtggagacgcacaaggtggcagcccctgatgtcgtcgtgccaacgctggacacagtccgccacgaagccctcttgtacacttggctggccgaacacaagcccctggtcttgtgtggccctcctgggtctggcaagaccatgacactcttcagcgccctccgggccttgcctgacatggaggtggtgggtctcaacttctccagtgctactactccagagctgcttctgaagacttttgatcactactgcgagtacaggcgcacacctaatggggtggttttggctcctgttcaacttggaaagtggctggtgttgttctgtgatgaaatcaacttgccagatatggataaatatgggacccagagggtcatatccttcatcagacagatggtggagcacggaggcttttaccgtacctcagatcaaacatgggtgaagctggagagaatccagtttgttggggcttgtaatccccccacagaccctggaagaaagcccctctcacacaggttcctgcgccacgtgcctgtcgtgtatgtggattacccgggccccgcctccctcacacagatctacggcaccttcaaccgcgccatgctgaggctcattccatccctgcggacgtatgcagagccgctcactgctgccatggtggagttctacaccatgtctcaggagagattcacccaggatacacaacctcactatatctattcaccccgtgaaatgactaggtgggtgagaggcatctttgaagcgctgagacctctggagaccctgcctgttgaaggcctcattcggatttgggcacatgaagctctgcgtctcttccaagatagactcgtagaggatgaggagaggcgttggactgatgagaacatcgacacggttgctctgaagcacttccctaacatcgacagagagaaggcaatgagccgacccatcttgtacagcaactggctgtcaaaggattacatcccagtagaccaagaagagttaagagattatgtcaaagctaggctgaaggtcttttatgaagaagaacttgatgttccgctggtgctgtttaatgaagtcctagaccacgtgctgaggattgacagaatattccgtcaacctcaaggccacttgcttctgattggtgttagtggagcaggaaaaactaccctgtctcgtttcgtcgcctggatgaacggtttgagtgtgtaccagattaaggtccataggaagtacacaggggaagactttgatgaagatctacggacagtgttgagacgttctggctgtaaaaatgaaaagatagcatttataatggatgaatctaatgtgttagattctggattcctggagcgaatgaatacccttctggccaatggagaggtgcctggtctctttgaaggagacgagtatgccaccttgatgacgcagtgcaaagagggggcacagaaggaaggcctgatgctggactcgcacgaggagctctacaagtggttcactagccaggttatccgcaacctccacgtcgtgttcaccatgaacccgtcctcggagggactcaaggaccgggcagctacatcaccagcacttttcaacaggtgtgtgttgaattggtttggagactggtccaccgaagcactgtatcaggttggcaaagaattcacaagtaagatggatctggagaagccaaattacatcgtgcctgattacatgccagttgtgtatgataagctgccgcagccaccatcccatcgggaagccattgtgaacagctgtgtgtttgttcatcagactcttcaccaggcgaatgctcggctagcaaagcgaggcggcagaacgatggccatcacccctcgccactacctggacttcatcaatcactatgccaacctgttccacgagaagcggagcgagctggaggagcagcagatgcacttgaacgtggggctcaggaagatcaaagagacagtcgaccaggtagaagaactgcgtcgtgacttgaggataaagagccaagagctggaggtgaagaatgcagcagccaatgacaagctgaaaaagatggtgaaagaccagcaggaggctgaaaagaagaaggttatgagccaagaaatccaggaacagctgcataagcagcaggaggtaattgcagacaaacagatgagtgtcaaagaagatcttgataaggtggaacctgccgtcattgaggcccagaatgctgtgaagtcgatcaagaagcagcacctggtggaggtgaggtccatggccaaccctcctgctgctgtgaagctggcgctggagtccatctgcctgctgctgggggaaagcaccacagactggaagcagatccgctccatcatcatgcgggagaacttcatccccaccatcgtcaacttctctgcagaggagatcagtgacgccataagggagaagatgaagaaaaattacatgtccaatccaagttacaattatgaaattgtgaatcgggcttccctggcttgcggccctatggtgaaatgggcaattgcacagcttaactatgcagacatgttaaagagagtggagcccctacgcaatgagctgcagaagctggaagatgacgccaaggacaaccagcagaaggccaacgaggtggagcagatgatccgagacctggaagccagcatcgcccgctacaaggaggaatacgccgtcctgatctcagaggcccaggccatcaaggcagacctggcagctgtcgaggcaaaagtaaaccggagcactgctcttctgaagagcttgtctgctgaacgtgaacgatgggaaaaaacaagtgaaactttcaaaaaccagatgtccaccattgctggggactgtctcttgtcagctgcgttcattgcctacgcgggttactttgaccagcagatgcgtcagaacttgttcactacctggtcccatcacctacagcaagccaacatccagttccgtacagatattgccaggacggaatacctttccaatgctgatgagcgtcttcgctggcaggccagctccttgcctgctgatgacctttgcacagaaaatgccatcatgctgaaacgattcaataggtatccgctgatcattgacccctctggacaggccacagaattcattatgaatgaatataaggatcgtaagatcacacggaccagcttcctggatgacgccttcagaaagaacttagagagtgcactgagattcggtaacccccttctggtccaggatgtggaaagctacgatccagttttgaacccggtgctgaaccgtgaagtgcggcgaacaggggggagagtgctgatcactctcggggaccaggacatagacctgtcgccatcgtttgtcatcttcctgtccacccgggatccaactgtcgagttcccaccagatctctgttcccgggttacttttgtaaacttcacagttacccgtagcagtttacaaagccagtgtctaaatgaagtacttaaagcagaaagacctgatgtggacgagaaacgatctgatcttcttaaacttcaaggggaatttcagctccgtttgcgtcagctggaaaaatctctactacaagctctgaacgaggtgaaagggcgcattttggatgacgacacgatcataaccactctggagaacctgaagagagaggctgcagaggtcaccaggaaagttgaggagacggacattgtcatgcaggaggtggagaccgtgtcccagcagtacctcccgctctccaccgcctgcagcagcatctacttcaccatggagtccctcaagcagatacacttcttgtaccagtactccctccagtttttcctggacatttatcacaacgtcctatacgagaacccgaacctgaagggtgtcaccgaccacacacagcgcctgtccattataacaaaggacctcttccaggtggcgtttaaccgagtggctcgaggcatgctgcatcaggaccacattacctttgccatgctgctggcaagaatcaaactgaagggcaccgtgggggagcccacctacgatgcagaattccagcacttcttgagaggaaatgagattgtcctgagtgctggctccacccccaggatccagggcctgactgtggagcaggcggaggcggtggtgaggctgagctgccttcccgcgtttaaggacttgattgcaaaggttcaggcagacgagcaatttggcatctggctggacagcagctccccggagcagactgtgccctacctctggagtgaagaaacacctgcaacacccattggccaggccatccaccgcctgctcctgatccaggctttccggcccgatcgcctgttggccatggcccacatgtttgtttcaacaaaccttggggagtctttcatgtccatcatggagcagccgctcgacctgacccacattgtgggcacagaggtgaagcccaacactcctgtcttaatgtgctctgtgcctggttatgatgccagtggacatgtcgaggaccttgcagccgagcagaacacgcagatcacttcaattgcaatcggctctgcagaaggctttaaccaagcagataaggcaataaacaccgctgtaaagtcgggcaggtgggtgatgctgaagaatgtgcatctggccccagggtggctgatgcagctggagaagaagttgcattccctgcagccgcatgcctgcttccgactcttcctcaccatggagatcaaccccaaggtgcctgtgaatctgctccgtgcgggccgcatctttgtgttcgagccaccgccaggggtgaaggccaacatgctgaggacgttcagcagcattcccgtctcacggatatgcaagtctcccaacgagcgtgcccgcttgtacttcctgctggcctggtttcatgcgatcatccaagaacgcttacgatacgcaccactggggtggtcaaagaagtatgaatttggagagtctgacctgcggtcagcttgcgatacggtggacacgtggctggatgacacggccaagggcaggcagaacatctcaccggataagatcccgtggtctgcactaaagaccttaatggcccagtccatttatggcgggcgcgtggacaacgagtttgaccagcgtctgctcaacaccttcctggagcgcctgttcacaaccaggagtttcgacagtgagtttaagctggcatgcaaggtcgacggacataaagacattcaaatgccagatggcatcaggcgagaggagtttgtgcagtgggtggagttgctccccgacacccagacgccctcctggctgggcctgcccaacaacgccgagagagtcctccttaccacacagggtgtggacatgatcagtaaaatgctgaagatgcagatgttggaggatgaggacgacctggcctacgcagagactgagaagaagacgaggacagactccacgtccgacgggcgccctgcctggatgcggacactgcacaccaccgcgtccaactggctgcacctcatcccccagacgctgagccacctcaagcgcaccgtggagaatatcaaggatcctttgttcaggttctttgagagagaagtgaagatgggcgcaaagctgcttcaggacgttcgccaggaccttgcagatgtcgtccaggtgtgcgaaggaaagaagaagcagaccaactacttgcgcacgctgatcaacgagctagtgaaagggatcttgcctcggagctggtcccactacacggtgcctgccggcatgaccgtcatccagtgggtgtccgacttcagcgagaggatcaaacagctgcagaacatctcactggcagctgcatctggtggcgccaaggagctaaagaacatccacgtgtgcctgggtggcctgttcgtgcctgaggcgtacatcactgccaccaggcagtatgtggcccaggccaacagctggtccctggaggagctctgcctggaagtcaacgtcaccacctcacagggcgccacccttgacgcttgcagcttcggagtcacgggtttgaaacttcaaggggccacgtgcaacaacaacaagctgtcactgtccaatgccatctcaaccgcccttcccctgacgcagctgcgctgggtcaagcagacaaacaccgagaagaaggccagtgtggtaaccttacctgtctacctgaacttcacccgtgcagacctcatcttcaccgtggacttcgaaattgctacaaaggaggatcctcgcagcttctacgagcggggtgtcgcagtcttgtgcacagagtaaacttttctagctgcccctttctgtaatagtgaaagttggtatttaacatttattcatttttaaaatatttggaaggtctgagcttgtgaaaagaaagtggttggtctgaggttggaggaagctgaatggaatctgacggttgggagtggtggaaattggaaggataccaggaggtatttgggaaggccaatggcgtggctcctttgaggaaataaaacactaagcatg

SEQ ID NO: 117357 - protein, 920 aa, Artificial Sequence
  derived and/or modified sequence
MANGTADVRKLFIFTTTQNYFGLMSELWDQPLLCNCLEINNFLDDGNQMLLRVQRSDAGISFSNTIEFGDTKDKVLVFFKLRPEVITDENLHDNILVSSMLESPISSLYQAVRQVFAPMLLKDQEWSRNFDPKLQNLLSELEAGLGIVLRRSDTNLTKLKFKEDDTRGILTPSDEFQFWIEQAHRGNKQISKERANYFKELFETIAREFYNLDSLSLLEVVDLVETTQDVVDDVWRQTEHDHYPESRMLHLLDIIGGSFGRFVQKKLGTLNLWEDPYYLVKESLKAGISICEQWVIVCNHLTGQVWQRYVPHPWKNEKYFPETLDKLGKRLEEVLAIRTIHEKFLYFLPASEEKIICLTRVFEPFTGLNPVQYNPYTEPLWKAAVSQYEKIIAPAEQKIAGKLKNYISEIQDSPQQLLQAFLKYKELVKRPTISKELMLERETLLARLVDSIKDFRLDFENRCRGIPGDASGPLSGKNLSEVVNSIVWVRQLELKVDDTIKIAEALLSDLPGFRCFHQSAKDLLDQLKLYEQEQFDDWSRDIQSGLSDSRSGLCIEASSRIMELDSNDGLLKVHYSDRLVILLREVRQLSALGFVIPAKIQQVANIAQKFCKQAIILKQVAHFYNSIDQQMIQSQRPMMLQSALAFEQIIKNSKAGSGGKSQITWDNPKELEGYIQKLQNAAERLATENRKLRKWHTTFCEKVVVLMNIDLLRQQQRWKDGLQELRTGLATVEAQCPLAWQSKWEGPEDPLQYLRGLVARALAIQNWVDKAEKQALLSETLDLSELFHPDTFLNALRQETARAVGRSVDSLKFVASWKGRLQEAKLQIKISGLLLEGCSFDGNQLSENQLDSPSVSSVLPCFMGWIPQDACGPYSPDECISLPVYTSAERDRVVTNIDVPCGGNQDQWIQCGAALFLKNQ

SEQ ID NO: 117358 - protein, 4307 aa, Artificial Sequence
  derived and/or modified sequence
MANGTADVRKLFIFTTTQNYFGLMSELWDQPLLCNCLEINNFLDDGNQMLLRVQRSDAGISFSNTIEFGDTKDKVLVFFKLRPEVITDENLHDNILVSSMLESPISSLYQAVRQVFAPMLLKDQEWSRNFDPKLQNLLSELEAGLGIVLRRSDTNLTKLKFKEDDTRGILTPSDEFQFWIEQAHRGNKQISKERANYFKELFETIAREFYNLDSLSLLEVVDLVETTQDVVDDVWRQTEHDHYPESRMLHLLDIIGGSFGRFVQKKLGTLNLWEDPYYLVKESLKAGISICEQWVIVCNHLTGQVWQRYVPHPWKNEKYFPETLDKLGKRLEEVLAIRTIHEKFLYFLPASEEKIICLTRVFEPFTGLNPVQYNPYTEPLWKAAVSQYEKIIAPAEQKIAGKLKNYISEIQDSPQQLLQAFLKYKELVKRPTISKELMLERETLLARLVDSIKDFRLDFENRCRGIPGDASGPLSGKNLSEVVNSIVWVRQLELKVDDTIKIAEALLSDLPGFRCFHQSAKDLLDQLKLYEQEQFDDWSRDIQSGLSDSRSGLCIEASSRIMELDSNDGLLKVHYSDRLVILLREVRQLSALGFVIPAKIQQVANIAQKFCKQAIILKQVAHFYNSIDQQMIQSQRPMMLQSALAFEQIIKNSKAGSGGKSQITWDNPKELEGYIQKLQNAAERLATENRKLRKWHTTFCEKVVVLMNIDLLRQQQRWKDGLQELRTGLATVEAQGFQASDMHAWKQHWNHQLYKALEHQYQMGLEALNENLPEINIDLTYKQGRLQFRPPFEEIRAKYYREMKRFIGIPNQFKGVGEAGDESIFSIMIDRNASGFLTIFSKAEDLFRRLSAVLHQHKEWIVIGQVDMEALVEKHLFTVHDWEKNFKALKIKGKEVERLPSAVKVDCLNINCNPVKTVIDDLIQKLFDLLVLSLKKSIQAHLHEIDTFVTEAMEVLTIMPQSVEEIGDANLQYSKLQERKPEILPLFQEAEDKNRLLRTVAGGGLETISNLKAKWDKFELMMESHQLMIKDQIEVMKGNVKSRLQIYYQELEKFKARWDQLKPGDDVIETGQHNTLDKSAKLIKEKKIEFDDLEVTRKKLVDDCHHFRLEEPNFSLASSISKDIESCAQIWAFYEEFQQGFQEMANEDWITFRTKTYLFEEFLMNWHDRLRKVEEHSVMTVKLQSEVDKYKIVIPILKYVRGEHLSPDHWLDLFRLLGLPRGTSLEKLLFGDLLRVADTIVAKAADLKDLNSRAQGEVTIREALRELDLWGVGAVFTLIDYEDSQSRTMKLIKDWKDIVNQVGDNRCLLQSLKDSPYYKGFEDKVSIWERKLAELDEYLQNLNHIQRKWVYLEPIFGRGALPKEQTRFNRVDEDFRSIMTDIKKDNRVTTLTTHAGIRNSLLTILDQLQRCQKSLNEFLEEKRSAFPRFYFIGDDDLLEILGQSTNPSVIQSHLKKLFAGINSVCFDEKSKHITAMKSLEGEVVPFKNKVPLSNNVETWLNDLALEMKKTLEQLLKECVTTGRSSQGAVDPSLFPSQILCLAEQIKFTEDVENAIKDHSLHQIETQLVNKLEQYTNIDTSSEDPGNTESGILELKLKALILDIIHNIDVVKQLNQIQVHTTEDWAWKKQLRFYMKSDHTCCVQMVDSEFQYTYEYQGNASKLVYTPLTDKCYLTLTQAMKMGLGGNPYGPAGTGKTESVKALGGLLGRQVLVFNCDEGIDVKSMGRIFVGLVKCGAWGCFDEFNRLEESVLSAVSMQIQTIQDALKNHRTVCELLGKEVEVNSNSGIFITMNPAGKGYGGRQKLPDNLKQLFRPVAMSHPDNELIAEVILYSEGFKDAKVLSRKLVAIFNLSRELLTPQQHYDWGLRALKTVLRGSGNLLRQLNKSGTTQNANESHIVVQALRLNTMSKFTFTDCTRFDALIKDVFPGIELKEVEYDELSAALKQVFEEANYEIIPNQIKKALELYEQLCQRMGVVIVGPSGAGKSTLWRMLRAALCKTGKVVKQYTMNPKAMPRYQLLGHIDMDTREWSDGVLTNSARQVVREPQDVSSWIICDGDIDPEWIESLNSVLDDNRLLTMPSGERIQFGPNVNFVFETHDLSCASPATISRMGMIFLSDEETDLNSLIKSWLRNQPAEYRNNLENWIGDYFEKALQWVLKQNDYVVETSLVGTVMNGLSHLHGCRDHDEFIINLIRGLGGNLNMKSRLEFTKEVFHWARESPPDFHKPMDTYYDSTRGRLATYVLKKPEDLTADDFSNGLTLPVIQTPDMQRGLDYFKPWLSSDTKQPFILVGPEGCGKGMLLRYAFSQLRSTQIATVHCSAQTTSRHLLQKLSQTCMVISTNTGRVYRPKDCERLVLYLKDINLPKLDKWGTSTLVAFLQQVLTYQGFYDENLEWVGLENIQIVASMSAGGRLGRHKLTTRFTSIVRLCSIDYPEREQLQTIYGAYLEPVLHKNLKNHSIWGSSSKIYLLAGSMVQVYEQVRAKFTVDDYSHYFFTPCILTQWVLGLFRYDLEGGSSNHPLDYVLEIVAYEARRLFRDKIVGAKELHLFDIILTSVFQGDWGSDILDNMSDSFYVTWGARHNSGARAAPGQPLPPHGKPLGKLNSTDLKDVIKKGLIHYGRDNQNLDILLFHEVLEYMSRIDRVLSFPGGSLLLAGRSGVGRRTITSLVSHMHGAVLFSPKISRGYELKQFKNDLKHVLQLAGIEAQQVVLLLEDYQFVHPTFLEMINSLLSSGEVPGLYTLEELEPLLLPLKDQASQDGFFGPVFNYFTYRIQQNLHIVLIMDSANSNFMINCESNPALHKKCQVLWMEGWSNSSMKKIPEMLFSETGGGEKYNDKKRKEEKKKNSVDPDFLKSFLLIHESCKAYGATPSRYMTFLHVYSAISSSKKKELLKRQSHLQAGVSKLNEAKALVDELNRKAGEQSVLLKTKQDEADAALQMITVSMQDASEQKTELERLKHRIAEEVVKIEERKNKIDDELKEVQPLVNEAKLAVGNIKPESLSEIRSLRMPPDVIRDILEGVLRLMGIFDTSWVSMKSFLAKRGVREDIATFDARNISKEIRESVEELLFKNKGSFDPKNAKRASTAAAPLAAWVKANIQYSHVLERIHPLETEQAGLESNLKKTEDRKRKLEELLNSVGQKVSELKEKFQSRTSEAAKLEAEVSKAQETIKAAEVLINQLDREHKRWNAQVVEITEELATLPKRAQLAAAFITYLSAAPESLRKTCLEEWTKSAGLEKFDLRRFLCTESEQLIWKSEGLPSDDLSIENALVILQSRVCPFLIDPSSQATEWLKTHLKDSRLEVINQQDSNFITALELAVRFGKTLIIQEMDGVEPVLYPLLRRDLVAQGPRYVVQIGDKIIDYNEEFRLFLSTRNPNPFIPPDAASIVTEVNFTTTRSGLRGQLLALTIQHEKPDLEEQKTKLLQQEEDKKIQLAKLEESLLETLATSQGNILENKDLIESLNQTKASSALIQESLKESYKLQISLDQERDAYLPLAESASKMYFIISDLSKINNMYRFSLAAFLRLFQRALQNKQDSENTEQRIQSLISSLQHMVYEYICRCLFKADQLMFALHFVRGMHPELFQENEWDTFTGVVVGDMLRKADSQQKIRDQLPSWIDQERSWAVATLKIALPSLYQTLCFEDAALWRTYYNNSMCEQEFPSILAKKVSLFQQILVVQALRPDRLQSAMALFACKTLGLKEVSPLPLNLKRLYKETLEIEPILIIISPGADPSQELQELANAERSGECYHQVAMGQGQADLAIQMLKECARNGDWLCLKNLHLVVSWLPVLEKELNTLQPKDTFRLWLTAEVHPNFTPILLQSSLKITYESPPGLKKNLMRTYESWTPEQISKKDNTHRAHALFSLAWFHAACQERRNYIPQGWTKFYEFSLSDLRAGYNIIDRLFDGAKDVQWEFVHGLLENAIYGGRIDNYFDLRVLQSYLKQFFNSSVIDVFNQRNKKSIFPYSVSLPQSCSILDYRAVIEKIPEDDKPSFFGLPANIARSSQRMISSQVISQLRILGRSITAGSKFDREIWSNELSPVLNLWKKLNQNSNLIHQKVPPPNDRQGSPILSFIILEQFNAIRLVQSVHQSLAALSKVIRGTTLLSSEVQKLASALLNQKCPLAWQSKWEGPEDPLQYLRGLVARALAIQNWVDKAEKQALLSETLDLSELFHPDTFLNALRQETARAVGRSVDSLKFVASWKGRLQEAKLQIKISGLLLEGCSFDGNQLSENQLDSPSVSSVLPCFMGWIPQDACGPYSPDECISLPVYTSAERDRVVTNIDVPCGGNQDQWIQCGAALFLKNQ

SEQ ID NO: 117359 - protein, 504 aa, Artificial Sequence [sequence omitted]

SEQ ID NO: 117360 - DNA, 12924 bp, Artificial Sequence
  derived and/or modified sequence
atggccaacggcaccgccgatgtgcgaaagctcttcatttttaccacgacccagaactactttggactcatgagcgagctgtgggatcagcctctgctgtgcaattgtctggaaatcaataacttcctggatgacgggaaccagatgctgctcagggtacagcgcagcgacgccgggatttcttttagcaacacaatcgagttcggagatactaaggataaagtgctggtgttcttcaaactgcggccagaagttattaccgacgaaaatctccacgataacattttggtctctagcatgctggaatcccctatcagctccctctatcaagccgttaggcaggtgttcgcgcctatgctgctgaaggatcaggagtggagccgaaatttcgacccaaaactgcaaaatttactgagtgagctggaagctggactgggcatagtgctccggcggtctgacactaacctgaccaagctgaagttcaaggaagatgatactagaggcatcctcacacctagtgacgagttccagttttggatcgaacaggcccacaggggcaacaagcagattagcaaggagcgagcgaactattttaaagaactgttcgagacaattgcccgggaattttacaatctggacagtctctccttgctggaggtcgttgacttggtggagacaacacaggacgtggtcgacgacgtgtggcgtcaaaccgaacacgatcactaccctgagtcgcgtatgttgcacttgctggacattatcggtggatcattcggaagattcgtccagaagaagttagggacactaaatttgtgggaagacccctactatctggtgaaggagtcactcaaggccggaatctccatttgtgaacagtgggtgatcgtgtgcaaccaccttaccggacaggtgtggcagcggtatgtcccccatccttggaaaaacgaaaaatatttcccagaaacactcgacaaactgggtaagaggctggaggaagtactcgccatccggactattcacgagaagtttctttatttcctgcccgccagcgaagagaagataatctgtctcacgcgagtttttgaacccttcacgggcctgaatcccgtgcagtacaacccctacacggaaccattgtggaaggccgccgtgagccagtacgagaagattatagctcccgctgagcaaaagatcgccggcaagctaaagaactacatttcggagatccaggacagtccccagcagttgctgcaggcattccttaagtacaaggaactggtgaaaagacccacgatatcaaaggagctaatgctcgaaagagagacactgttggctcgtcttgtggactcaataaaggattttagattggacttcgagaacaggtgtcggggaatcccaggcgacgcctcaggtcctctgtccggaaagaacctgtcggaggtcgttaactccattgtgtgggtgaggcagctggagttgaaggtcgacgataccattaaaattgctgaagcgttactgagcgatctgcccggatttcgttgctttcaccaaagtgcaaaggatctgctggaccagctgaaactctacgaacaggaacaattcgatgactggagcagagacatccagagtgggctatctgactctaggtccggactgtgtatcgaggctagcagcagaattatggagttggactccaacgatgggcttctgaaggttcactattcggacaggcttgtgattctcttgcgggaggtcaggcagctgtccgccttaggttttgttatccccgctaaaattcaacaggtggctaacattgcccagaaattctgcaaacaggccatcatcctgaaacaagtggctcatttctataactccattgaccagcagatgatccagagtcaacgacctatgatgcttcaaagcgccctggcattcgaacagattataaaaaattctaaagctggatctggcgggaaaagtcagatcacttgggataacccaaaggaacttgaaggatacatccaaaaactacagaatgcagcagaaagactcgcaaccgagaacaggaagttgagaaagtggcacactactttttgtgagaaagttgtcgttctgatgaatatcgacctgctgaggcagcagcaaaggtggaaagacggactgcaggagttacgcaccggcctcgcaacagttgaagcccaaggcttccaggcctctgacatgcacgcttggaaacagcactggaatcaccagctttacaaggccttagagcaccaataccagatgggcctggaggctctcaatgagaatctacctgagataaacattgacctcacctataaacaagggaggttacagtttcggccaccctttgaagagatcagagccaagtactacagagaaatgaaaagatttatcgggatacctaatcagttcaaaggggtgggtgaggcaggcgacgagagcatcttctctatcatgatcgatcgcaacgccagtggattcctgactatctttagtaaagccgaagacctcttcaggaggcttagcgctgtcctgcatcaacataaggagtggatcgttatcggccaggtcgacatggaagcgttggtggagaagcaccttttcacagtacacgactgggaaaagaacttcaaagctctgaagatcaaggggaaggaggtcgagaggctgccctccgccgtgaaggtggactgtctgaatattaattgtaatccggtgaagacagtgattgatgaccttatccagaaactattcgatttgctcgtgctaagcctgaagaagtccatacaggcccacctccatgaaattgacactttcgttaccgaagcaatggaggttctgacgatcatgcctcaatcagtggaggagatcggagacgcaaacctacagtacagtaaactgcaggagcgcaagcccgagattctccctctgtttcaagaagctgaggacaaaaaccgcctgctccggactgtggccgggggcggcctggagacgatcagcaacttgaaggctaaatgggacaagtttgagctcatgatggagagccaccaattaatgattaaggaccagatcgaagtgatgaagggcaacgtcaagagccggcttcaaatttactatcaggagctggaaaagttcaaagctcgttgggaccagcttaagcctggagacgacgtgatcgagactggacagcataacacccttgacaagtccgcgaaactaatcaaagagaaaaaaattgaatttgacgacctcgaggtaacaaggaagaaattagtggacgattgtcatcactttcgccttgaggaacccaatttctccctggctagtagcatatctaaagatatagaatcatgtgctcaaatctgggccttttacgaagaatttcagcagggattccaggagatggccaacgaggactggattacatttcgaactaagacctacctgttcgaagagtttctgatgaactggcatgacagattaagaaaagtggaggaacactccgtcatgacggtcaaactgcagtccgaagtcgacaaatataagatcgtaatcccgatccttaaatatgtccggggagaacatttgtctccggatcactggctggacctctttaggcttctgggcttgccccgcggcaccagcctcgaaaaactgttgttcggagatttgctgcgcgtggcagatacaatcgtggcgaaagccgccgacctgaaagacctgaatagccgcgcccaaggcgaggtgaccatccgggaagccctgcgtgagctagatttgtggggcgtcggagccgtgtttaccctgatcgactacgaagattcccaaagtcggactatgaagttgatcaaagactggaaggacatcgttaaccaggtcggggacaatagatgcctcctgcaatctcttaaagacagcccctactataaggggtttgaggacaaagtctcgatttgggagcggaagctggctgagctcgatgagtacctgcaaaatctgaaccatatacaacgtaaatgggtttacctggagcccatatttggtaggggcgctctgcccaaggaacagacgcgcttcaatagggtggacgaggattttcggtccataatgactgacatcaaaaaggacaatcgcgtcaccaccctgacaacacatgctgggatcaggaatagcctcttgaccatcctggatcaacttcagaggtgtcagaagtctctcaatgagttcctggaggaaaaaaggtctgcatttccccggttctactttataggagatgatgacctgctggagatcctgggacagtcaaccaacccttcagtgattcagagccaccttaagaagctgtttgccggcatcaactcggtatgtttcgacgaaaaaagtaagcatattacggctatgaaaagtctggaaggggaagtagtgcctttcaaaaataaggttcctctctctaataacgtagagacctggctcaacgacctagctcttgagatgaagaagactttggaacaactgttgaaggaatgcgtcaccaccggccgaagcagtcaaggcgccgtggacccgagtctgtttcccagccaaatcctgtgcctggctgagcagatcaagttcacggaagatgtcgagaacgcaatcaaagaccattcactccatcaaatcgagacacagctcgttaataaactcgaacagtacacaaatatcgacaccagtagcgaggatcccggcaacaccgagagcggaatcctggagctaaagctgaaggcgctgattctcgatataattcacaacattgatgtggtcaaacagctgaaccaaatccaggtccatactaccgaggattgggcctggaaaaagcagctgcggttttacatgaaaagtgatcacacttgctgcgttcaaatggtcgactccgaatttcagtatacctatgaatatcagggaaatgccagtaaacttgtttacacgcctcttacagacaaatgttatctgacactgacccaggcaatgaagatggggctgggtggtaatccctatggccccgctggcacggggaaaaccgaaagtgttaaggccctgggcggcttactgggccgccaggtgctggtgttcaactgtgacgagggaattgacgttaaaagcatgggccgcatatttgttggacttgtaaagtgcggggcctggggatgttttgatgagtttaaccgcctggaagagagtgtgctgtcagctgttagtatgcaaatccagacaatccaagacgccttgaagaaccataggacagtttgtgagttgctgggcaaggaggtcgaggtgaatagcaatagcggcatttttataactatgaacccagccggcaaagggtatggagggcgccagaaacttcccgataacctgaagcagctgttccgcccagtggccatgagtcatccagacaacgagcttatagctgaggtgattctgtactcggaaggttttaaggacgccaaagttttgagccgcaaattagtggcgatctttaatctgagcagagagcttttgacaccacaacagcattacgattggggcttgagagcgttgaaaacagtcctgcgcggatcagggaacttgcttcgccagctgaacaaatccggcaccacgcagaatgctaacgagtcgcacatcgttgtgcaagcactcaggctaaacactatgtcaaagttcaccttcactgattgtacacgctttgacgctctgattaaagacgtattccctggcattgaattgaaagaggttgagtacgatgaattaagtgcagcattaaaacaggtgttcgaggaggctaactacgagatcattcctaatcagattaaaaaggcgctcgaactttacgaacagctctgccagcgaatgggagtcgtcattgtcgggccctcaggtgctggcaaaagcaccttgtggcgcatgcttagggcagctctgtgcaaaactggaaaagtggtgaaacaatatacaatgaatccgaaggcaatgcccaggtaccaactcctaggccatattgatatggacacgcgcgaatggtctgacggggttctgaccaatagcgctagacaggtggtaagggaacctcaagatgtatcctcgtggattatttgcgatggagatatcgacccagaatggatcgagtctttgaacagcgtgctcgatgacaaccgactgttaaccatgcctagcggcgagcgcatccagtttggcccaaatgttaatttcgttttcgaaactcacgacctctcctgtgcctcaccggctaccataagcagaatgggcatgatcttcctttccgacgaggagaccgacctcaattctctcataaagagctggttacgaaaccaaccagccgagtatagaaacaatttggagaactggataggagactactttgaaaaagctctgcagtgggtgctgaaacagaacgattatgtggtggaaacaagcctcgttggaaccgttatgaacggtttatcccacctccacggctgtcgcgaccatgacgagtttattatcaacttaatccgcggtctgggaggtaacctgaatatgaaatcccggcttgaatttactaaagaagtgtttcactgggcccgggagagtccccccgatttccacaagcccatggacacctattatgatagcacccgaggacggctggccacatatgtcttaaagaagcctgaggatcttacggctgatgactttagcaatggcttgacactacccgtgatccagacccctgacatgcagaggggattagactatttcaagccttggctgagcagcgatactaaacagcccttcatcttggtcggaccagaggggtgtggaaagggtatgctgctgagatatgcattctcccagttgcgaagcactcagatcgctacggtacactgcagtgcccaaacaacctctcgtcatttactgcagaaactgagccagacttgtatggtgatctctaccaatacaggccgcgtttaccggccaaaagactgcgaacgtctggttctctatctgaaagacatcaatctccccaagctggataaatggggaactagcacacttgtggcattcctacaacaagtgctgacctaccagggtttctacgatgagaacctggaatgggtggggcttgaaaatattcagatagtcgcgtccatgagtgcgggcggaaggcttggtcgacataaactaacaacacgttttactagtatcgttagactgtgcagtatcgattacccagagagagaacagctccagactatatatggagcctatctggagcctgtgcttcacaaaaacctgaagaaccactctatctggggatcctcctccaagatatacctccttgctgggtctatggtacaggtatatgagcaggtaagagcaaaattcacagtggatgactactcacactactttttcacaccatgcatccttacacaatgggtgctgggtttgtttaggtatgatctggagggggggagcagcaatcatcctctcgactatgtattagagattgtagcctacgaagcgcgtagactgtttagggacaagatcgtgggagccaaggaactgcatctgttcgacataatcctaacctcagtgtttcagggcgattggggtagtgacatcttggacaatatgagtgactccttttacgtaacatggggcgccaggcataattccggcgctcgagcagcacccgggcagccactgccccctcatggtaagcccttgggtaagctaaatagcacggatttgaaggacgtcattaaaaagggtctgattcactatggccgcgataaccaaaacctagatattctgctctttcacgaggtactggagtatatgtcgcgaattgaccgtgtgctgagcttccctggaggtagcttgctgctggctggccgaagcggcgtgggccgcagaacgataacctctctcgtgtcacatatgcacggggccgtgctgttttcccctaagatttccagaggctacgaattaaagcaattcaagaacgatctgaagcacgtactgcagctcgccggaattgaggcacagcaggtcgtcctgcttctggaggattaccagtttgtacatcctacttttctggaaatgattaacagtctattgagcagcggcgaggtacccgggctgtacacactggaggagctggagcctttgctcctgcccctgaaagatcaggcctcgcaagatggtttcttcggacccgtgttcaactatttcacatatagaatccagcagaacttgcacatagtgctaattatggactcggccaatagtaacttcatgattaactgtgagtctaacccagcacttcacaagaaatgccaggtcctatggatggaagggtggtctaatagctctatgaagaagattccggagatgcttttttcagaaacaggcggtggagaaaaatacaacgacaagaagcgcaaagaagagaagaaaaagaatagtgtggatcctgactttctgaagtcattcctcttgattcatgaatcttgtaaggcctacggcgccaccccatcccggtacatgaccttcctgcatgtctacagtgcaatatcatcctccaaaaaaaaagagctgcttaagaggcagagccacctccaagctggagtctctaaattaaatgaggcaaaagccttagtagacgaactgaatcgcaaagctggagagcagtctgtgctgttgaaaacgaaacaggacgaggctgacgctgcgttgcagatgattacagtatccatgcaagacgcaagcgagcagaagactgaacttgaacgtctcaagcaccgcatcgctgaggaggtagtgaagatcgaggagagaaagaataaaattgacgatgagctcaaggaagtccaaccactcgtgaatgaagccaagctggccgtggggaacattaagcctgagtctctcagcgaaattaggtccctgcggatgcccccggatgtgattagagatatccttgagggggtcctgcgactcatgggtattttcgatactagctgggtgagtatgaaatcgtttctggcgaaaaggggcgtaagggaggatatagctaccttcgacgctcggaacatttccaaagagatccgggagtccgtggaggaactactctttaagaataagggatcattcgaccctaagaacgctaaacgggccagtacagccgctgcccctctggccgcttgggtgaaagcgaacatacagtacagccacgttctcgaacgaatccatcctctcgaaacggagcaggccggcctggagtctaatctcaagaaaaccgaagatcggaagcgaaagctagaagaattgttgaattccgttggccagaaagttagcgaattgaaagaaaagtttcagagtcgcaccagtgaagcagctaagctcgaggccgaggtgtccaaggcacaagagactattaaggctgccgaggtgctgattaaccagcttgatcgtgagcataagagatggaatgcacaagtggttgagatcacggaagagctagccacgctgcctaagcgagctcagctagccgctgcattcattacctatctctctgccgcgcccgaatctctacggaaaacatgtctcgaagagtggacaaagagtgcgggactcgagaagtttgatctacgcaggtttttgtgcacagagtccgaacagctgatatggaaatcggaggggctcccctcagacgatctgtccattgagaacgcactggttattcttcagagcagggtgtgccctttcctgatcgatccctcctcccaagcaaccgagtggctcaaaactcacctcaaagattcccgcctcgaagtgatcaaccagcaggacagtaactttatcaccgccttagaattggcagtgaggtttggaaagacccttattatccaggagatggatggtgtggaacccgtcctttatcctctgctgcgccgggacctcgttgctcagggacccagatatgtggtgcagataggagacaagatcatcgactacaatgaagaatttagactcttcctgagcacccgcaatccaaacccattcatccccccggacgctgcctccatcgtgactgaggtcaatttcacaacgacacggtccggccttcgtggacaacttctggcattaactatccagcacgaaaagcccgacttggaggagcaaaaaaccaagctcttacagcaggaagaggacaaaaaaatccagttggccaaactggaggagagtctgcttgaaaccttggctacgtctcagggaaatattttagagaacaaggatctgatcgagagtctcaatcagacaaaggcgagtagcgccctcatccaggagtccctgaaggaaagttataaacttcagatttctctcgaccaggagagagatgcctacttacccttagccgaatcggcctccaagatgtatttcataatttcagacttatcaaaaattaataatatgtacagattctcattggcggccttcttgaggctattccagagagctttgcaaaataagcaggactctgagaacaccgagcagcgaatccagtcactcatatcctcactgcagcacatggtttatgagtacatctgcaggtgtctgttcaaggccgaccagctgatgttcgccctccacttcgttagggggatgcaccccgagctgtttcaggaaaatgaatgggacacatttacaggcgttgtcgtaggtgacatgctccgtaaggccgattcccagcagaagatccgagatcagctccccagctggattgatcaggaacggtcctgggccgtcgccactctgaaaatcgctttaccatccctataccagaccctgtgtttcgaagatgccgctctgtggcgcacctactacaataattcgatgtgcgaacaggagttcccttctatccttgccaagaaagtttccctgttccagcagatcctggtcgtgcaagcccttcgccctgacagactccagagtgcaatggcactctttgcttgtaagacactcggtttgaaagaggtctcaccactgccactgaacctgaaaaggctatataaggaaacgttagagattgaaccaattttgatcatcatttcaccgggtgcagatccctctcaagagctgcaggagctcgccaatgctgaacgcagcggggaatgttatcaccaagtggccatgggccaaggccaggctgatctggccattcaaatgcttaaggagtgtgccagaaatggggattggctttgtttaaaaaatctgcatctggtggtgtcatggttgcccgtgctggagaaggagctgaacactctgcaaccgaaggacacttttcgtctctggctgaccgccgaagttcaccctaatttcactccgattctgctgcagtcctctctgaagattacctacgagtctccccccggactgaaaaaaaatcttatgcgaacgtatgagagctggaccccagagcagatttcgaagaaggataatacccacagggcccacgctctgttctccttggcctggtttcatgcagcctgtcaagagcgccggaattacataccccaggggtggacaaaattctatgagttctctctgtctgacctgcgtgccggatataacattatcgaccgattatttgatggggcaaaagacgtccaatgggaatttgtccatggtttgttggagaatgccatctatggaggccgcatcgataactactttgatcttcgggtattacagtcttatctgaagcagtttttcaactcctcagtcatcgatgtgtttaatcaacggaataagaagtccatcttcccctacagtgtcagtctccctcagagttgttccatactggattatagggcagtcatagaaaagatccctgaggatgacaagccttcttttttcggcctgccagcaaatatcgcccgtagcagtcagagaatgatttcctcgcaagtgatttcgcagctcaggatccttggccgcagtattactgctggatccaagttcgatcgggagatctggtcaaacgaactctctcctgtcctaaacctttggaaaaaattaaatcagaattccaatctgatccatcagaaggtgccccccccaaacgaccgtcagggcagccctatcctgtcattcattatcctggaacagtttaacgcaattcggctggtgcagtcagtacaccagagtcttgccgctctttcgaaggtgatccggggaaccaccttgctgtcttcggaggttcagaagctagcctccgcacttctgaatcagaaatgtccgttagcctggcagtctaagtgggaggggcctgaggaccccctgcagtacctgcgtggccttgtggccagggcactcgctattcagaattgggtcgacaaggctgaaaagcaggcattgttgagtgagactttggacctgagtgagcttttccaccctgatacctttcttaacgcactgcgtcaggaaaccgcccgggctgtggggagaagcgtggactcgttgaagttcgtagcctcatggaaggggcgtttgcaggaggccaaactacagatcaagatctccgggttgctgctggagggttgctcattcgatggaaaccagctctcggaaaatcaacttgactcaccgtccgtttcatcagtcctcccatgcttcatgggttggattccacaggatgcttgcggcccttactctcctgacgaatgcattagcctcccagtatacacgtctgctgagcgggacagggtcgtgaccaacattgatgtcccttgtggaggtaaccaagatcagtggatccagtgtggcgccgcactgtttctgaagaatcagtag

SEQ ID NO: 117361 - DNA, 12924 bp, Artificial Sequence
  derived and/or modified sequence
atggccaatggaacagcagatgtgaggaagctgttcatcttcaccaccacccagaactacttcggcctgatgtctgagctgtgggaccagcccctgctgtgcaactgcctggagatcaacaacttcctggatgatggcaaccagatgctgctgcgggtgcagaggagtgatgctggcatctccttcagcaacaccatcgagtttggagacaccaaggacaaggtgctggtgttcttcaagctgcggcctgaggtgatcacagatgagaacctgcatgacaacatcctggtgtcctccatgctggagagccccatcagcagcctgtaccaggccgtgcggcaggtgtttgcccccatgctgctgaaggaccaggagtggagcaggaactttgaccccaagctgcagaacctgctgtctgagctggaggccggcctgggcatcgtgctgcggcggagtgacaccaacctgaccaagctgaagttcaaggaggatgacacccggggcatcctgacccccagtgatgagttccagttctggattgagcaggcccaccggggcaacaagcagatcagcaaggagcgggccaactacttcaaggagctgtttgagaccatcgcccgggagttctacaacctggacagcctgagcctgctggaggtggtggacctggtggagaccacccaggatgtggtggatgatgtgtggaggcagacagaacatgaccactacccagagagcaggatgctgcacctgctggacatcattggaggcagctttggccgctttgtgcagaagaagctgggcaccctgaacctgtgggaggacccctactacctggtgaaggagagcctgaaggccggcatcagcatctgtgagcagtgggtgattgtgtgcaaccacctgaccggccaggtgtggcagagatatgtgccccacccctggaagaatgagaagtacttccctgagaccctggacaagctgggcaagaggctggaggaggtgctggccatccgcaccatccacgagaagttcctgtacttcctgcctgccagcgaggagaagatcatctgcctgaccagggtgtttgagcccttcaccggcctgaaccctgtgcagtacaacccctacacagagcccctgtggaaggctgctgtgtcccagtatgagaagatcatcgccccagctgagcagaagattgctgggaagctgaagaactacatcagcgagatccaggacagcccccagcagctgctgcaggccttcctgaagtacaaggagctggtgaagaggcccaccatcagcaaggagctgatgctggagcgggagaccctgctggcccggctggtggacagcatcaaggacttccggctggactttgagaaccgctgccggggcatccctggagatgccagcggccccctgagcggcaagaacctgtctgaggtggtgaacagcatcgtgtgggtgcggcagctggagctgaaggtggatgacaccatcaagattgctgaggccctgctgagtgacctgcccggcttccgctgcttccaccagagcgccaaggacctgctggaccagctgaagctgtatgagcaggagcagtttgatgactggagccgggacatccagagcggcctgagtgacagccgcagcggcctgtgcatcgaggccagcagccgcatcatggagctggacagcaatgatggcctgctgaaggtgcactacagcgaccggctggtgatcctgctgcgggaggtgcggcagctgagcgccctgggcttcgtcatcccagccaagatccagcaggtggccaacatcgcccagaagttctgcaagcaggccatcatcctgaagcaggtggcccacttctacaacagcattgaccagcagatgatccagagccagaggcccatgatgctgcagagcgccctggcctttgagcagatcatcaagaacagcaaggccggcagcggcggcaagagccagatcacctgggacaaccccaaggagctggagggctacatccagaagctgcagaatgctgctgagcggctggccacagagaacaggaagctgaggaagtggcacaccaccttctgtgagaaggtggtggtgctgatgaacatcgacctgctgcggcagcagcagcgctggaaggatggcctgcaggagctgaggacaggcctggccaccgtggaggcccagggcttccaggccagtgacatgcacgcctggaagcagcactggaaccaccagctgtacaaggccctggagcaccagtaccagatgggcctggaggccctgaatgaaaacctgcctgagatcaacatcgacctgacctacaagcagggccgcctgcagttccggcccccatttgaggagatccgggccaagtactaccgggagatgaagcgcttcatcggcatccccaaccagttcaagggcgtgggggaggccggagatgagagcatcttcagcatcatgattgacagaaatgccagcggcttcctgaccatcttcagcaaggccgaggacctcttccggcggctgtctgctgtgctgcaccagcacaaggagtggatcgtgattggccaggtggacatggaggccctggtggagaagcacctgttcaccgtgcatgactgggagaagaacttcaaggccctgaagatcaagggcaaggaggtggagcggctgcccagcgctgtgaaggtggactgcctgaacatcaactgcaaccctgtgaagacagtgattgatgacctgatccagaagctgtttgacctgctggtgctgagcctgaagaagagcatccaggcccacctgcatgaaattgacacctttgtgacagaggccatggaggtgctgaccatcatgccccagagcgtggaggagattggagatgccaacctgcagtacagcaagctgcaggagaggaagccagagatcctgcccctcttccaggaggccgaggacaagaaccggctgctgaggacagtggccggcggcggcctggagaccatcagcaacctgaaggccaagtgggacaagtttgagctgatgatggagagccaccagctgatgatcaaggaccagatcgaggtgatgaagggaaatgtgaagagccggctgcagatctactaccaggagctggagaagttcaaggcccgctgggaccagctgaagccaggagatgatgtgattgagaccggccagcacaacaccctggacaagagcgccaagctgatcaaggagaagaagattgaatttgatgacctggaggtgaccaggaagaagctggtggatgactgccaccacttccggctggaggagcccaacttcagcctggccagcagcatcagcaaggacatcgagagctgtgcccagatctgggccttctatgaggagttccagcagggcttccaggagatggccaatgaagactggatcaccttccgcaccaagacctacctgtttgaggagttcctgatgaactggcatgaccggctgaggaaggtggaggagcacagcgtgatgacagtgaagctgcagagcgaggtggacaagtacaagatcgtcatccccatcctgaagtatgtgcggggggagcacctgagcccagaccactggctggacctcttccggctgctgggcctgccccggggcaccagcctggagaagctgctgtttggagacctgctgcgggtggccgacaccatcgtggccaaggctgctgacctgaaggacctgaacagccgggcccagggcgaggtgaccatccgggaggccctgcgggagctggacctgtggggcgtgggcgctgtgttcaccctgattgattatgaggacagccagagcaggaccatgaagctgatcaaggactggaaggacatcgtgaaccaggtgggggacaaccgctgcctgctgcagagcctgaaggacagcccctactacaagggctttgaggacaaggtgtccatctgggagaggaagctggccgagctggatgagtacctgcagaacctgaaccacatccagaggaagtgggtgtacctggagcccatcttcggccgcggggccctgcccaaggagcagacccgcttcaacagagtggatgaggacttccgcagcatcatgacagacatcaagaaggacaacagagtgaccaccctgaccacccatgctggcatccggaacagcctgctgaccatcctggaccagctgcagcgctgccagaagagcctgaatgagttcctggaggagaagaggtctgccttcccccgcttctacttcatcggagatgatgacctgctggagatcctgggccagagcaccaaccccagcgtcatccagagccacctgaagaagctgtttgctggcatcaacagcgtgtgctttgatgagaagagcaagcacatcacagccatgaagagcctggagggggaggtggtgcccttcaagaacaaggtgcccctgagcaacaacgtggagacctggctgaatgacctggccctggagatgaagaagaccctggagcagctgctgaaggaatgtgtgaccaccggccgcagcagccagggcgctgtggaccccagcctcttccccagccagatcctgtgcctggccgagcagatcaagttcacagaagatgtggagaatgccatcaaggaccacagcctgcaccagatcgagacccagctggtgaacaagctggagcagtacaccaacatcgacaccagcagcgaggaccccggcaacacagaaagtggcatcctggagctgaagctgaaggccctgatcctggacatcatccacaacattgatgtggtgaagcagctgaaccagatccaggtgcacaccacagaggactgggcctggaagaagcagctgcgcttctacatgaagagtgaccacacctgctgcgtgcagatggtggacagcgagttccagtacacctatgagtaccagggcaatgccagcaagctggtgtacacccccctgacagacaagtgctacctgaccctgacccaggccatgaagatgggcctgggcggcaacccctacggccctgctggcaccgggaagacagagagcgtgaaggccctgggcggcctgctgggccggcaggtgctggtgttcaactgtgatgagggcattgatgtgaagtccatgggccgcatctttgtgggcctggtgaagtgtggggcctggggctgctttgatgagttcaaccggctggaggagagcgtgctgtctgctgtgtccatgcagatccagaccatccaggatgccctgaagaaccacaggacagtgtgtgagctgctgggcaaggaggtggaggtgaacagcaacagcggcatcttcatcaccatgaacccagctgggaagggctacggcggccggcagaagctgcctgacaacctgaagcagctgttccggcctgtggccatgagccacccagacaatgagctgattgctgaggtgatcctgtacagcgagggcttcaaggatgccaaggtgctgagcaggaagctggtggccatcttcaacctgagccgggagctgctgaccccccagcagcactatgactggggcctgcgggccctgaagacagtgctgcggggcagcggcaacctgctgcggcagctgaacaagagcggcaccacccagaatgccaatgaaagccacatcgtggtgcaggccctgcggctgaacaccatgagcaagttcaccttcacagactgcaccaggtttgatgccctgatcaaggatgtgtttcctggcatcgagctgaaggaggtggagtatgatgagctgtctgctgccctgaagcaggtgtttgaggaggccaactatgagatcatccccaaccagatcaagaaggccctggagctgtatgagcagctgtgccagaggatgggcgtggtgattgtgggccccagcggggccggcaagagcaccctgtggaggatgctgcgggccgccctgtgcaagacaggcaaggtggtgaagcagtacaccatgaaccccaaggccatgccccgctaccagctgctgggccacatcgacatggacacccgggagtggagcgatggagtgctgaccaacagcgcccggcaggtggtgcgggagccccaggatgtgtcctcctggatcatctgtgatggagacatcgaccctgagtggattgagagcctgaacagcgtgctggatgacaaccggctgctgaccatgcccagcggggagcgcatccagtttggccccaacgtgaactttgtgtttgagacccatgacctgagctgtgccagccctgccaccatcagcaggatgggcatgatcttcctgagtgatgaggagacagacctgaacagcctcatcaagtcctggctgaggaaccagcctgctgagtacagaaacaacctggagaactggattggagactactttgagaaggccctgcagtgggtgctgaagcagaatgactatgtggtggagaccagcctggtgggcaccgtgatgaatggcctgagccacctgcacggctgccgggaccatgatgagttcatcatcaacctgatccggggcctgggcggcaacctgaacatgaagagccggctggagttcaccaaggaggtgttccactgggcccgggagagccccccagacttccacaagcccatggacacctactatgacagcacccggggccgcctggccacctacgtgctgaagaagccagaggacctgacagcagatgacttcagcaatggcctgaccctgcctgtgatccagaccccagacatgcagaggggcctggactacttcaagccctggctgagcagtgacaccaagcagcccttcatcctggtgggccctgagggctgtgggaagggcatgctgctgcgctatgccttcagccagctgcggagcacccagatcgccaccgtgcactgcagcgcccagaccaccagccgccacctgctgcagaagctgagccagacctgcatggtgatcagcaccaacacaggccgggtgtaccggcccaaggactgtgagcggctggtgctgtacctgaaggacatcaacctgcccaagctggacaagtggggcaccagcaccctggtggccttcctgcagcaggtgctgacctaccagggcttctatgatgagaacctggagtgggtgggcctggagaacatccagatcgtggcctccatgtctgctgggggccgcctgggccgccacaagctgaccacccgcttcaccagcatcgtgcggctgtgcagcattgactacccagagcgggagcagctgcagaccatctacggggcctacctggagcctgtgctgcacaagaacctgaagaaccacagcatctggggcagcagcagcaagatctacctgctggccggctccatggtgcaggtgtatgagcaggtgcgggccaagttcaccgtggatgactacagccactacttcttcaccccctgcatcctgacccagtgggtgctgggcctcttccgctatgacctggagggcggcagcagcaaccaccccctggactatgtgctggagatcgtggcctatgaggcccggcggctcttccgggacaagatcgtgggcgccaaggagctgcacctgtttgacatcatcctgaccagcgtcttccagggcgactggggcagtgacatcctggacaacatgtctgacagcttctacgtgacctggggcgcccggcacaacagcggggcccgggccgcccctggccagcccctgccccctcatggcaagcccctgggcaagctgaacagcacagacctgaaggatgtgatcaagaagggcctcatccactacggccgggacaaccagaacctggacatcctgctcttccacgaggtgctggagtacatgagcagaattgacagagtgctgtccttccctgggggcagcctgctgctggccggccgctctggagtgggccgccgcaccatcaccagcctggtgagccacatgcacggggctgtgctcttcagccccaagatcagccggggctatgagctgaagcagttcaagaatgacctgaagcacgtgctgcagctggccggcatcgaggcccagcaggtggtgctgctgctggaggactaccagtttgtgcaccccaccttcctggagatgatcaacagcctgctgagcagcggggaggtgcccggcctgtacaccctggaggagctggagcccctgctgctgcccctgaaggaccaggccagccaggacggcttctttggacctgtgttcaactacttcacctaccgcatccagcagaacctgcacatcgtgctgatcatggacagcgccaacagcaacttcatgatcaactgtgagagcaacccagccctgcacaagaagtgccaggtgctgtggatggagggctggagcaacagctccatgaagaagatccctgagatgctgttcagcgagactggaggaggagagaagtacaatgacaagaagaggaaggaggagaagaagaagaacagcgtggaccctgacttcctgaagagcttcctgctgattcatgagagctgcaaggcctatggagccacccccagccgctacatgaccttcctgcacgtgtacagcgccatcagcagcagcaagaagaaggagctgctgaagaggcagagccacctgcaggccggcgtgtccaagctgaatgaggccaaggccctggtggatgagctgaacaggaaggccggggagcagagcgtgctgctgaagaccaagcaggatgaagcagatgctgccctgcagatgatcaccgtgtccatgcaggatgccagcgagcagaagacagagctggagcggctgaagcacagaattgctgaggaggtggtgaagattgaggagaggaagaacaagattgatgatgagctgaaggaggtgcagcccctggtgaatgaggccaagctggccgtgggcaacatcaagccagagagcctgtctgagatccgcagcctgaggatgcccccagatgtgatccgggacatcctggagggcgtgctgcggctgatgggcatctttgacacctcctgggtgtccatgaagagcttcctggccaagaggggcgtgagagaagatattgccacctttgatgccaggaacatcagcaaggagatccgggagagcgtggaggagctgctcttcaagaacaagggcagctttgaccccaagaatgccaagagggccagcacagctgctgcccccctggccgcctgggtgaaggccaacatccagtacagccacgtgctggagcgcatccaccccctggagacagagcaggccggcctggagagcaacctgaagaagacagaggacaggaagaggaagctggaggagctgctgaacagcgtgggccagaaggtgtctgagctgaaggagaagttccagagcaggaccagcgaggccgccaagctggaggccgaggtgtccaaggcccaggagaccatcaaggctgctgaggtgctgatcaaccagctggaccgggagcacaagcgctggaatgcccaggtggtggagatcacagaggagctggccaccctgcccaagagggcccagctggccgccgccttcatcacctacctgtctgctgcccctgagagcctgaggaagacctgcctggaggagtggaccaagtctgctggcctggagaagtttgacctgcggcgcttcctgtgcacagagagcgagcagctgatctggaagtctgagggcctgcccagtgatgacctgagcattgaaaatgccctggtgatcctgcagagccgggtgtgccccttcctgattgaccccagcagccaggccacagagtggctgaagacccacctgaaggacagccggctggaggtgatcaaccagcaggacagcaacttcatcacagccctggagctggccgtgcgctttgggaagaccctcatcatccaggagatggatggagtggagcctgtgctgtaccccctgctgcggcgggacctggtggcccagggccccaggtatgtggtgcagattggagacaagatcatcgactacaatgaggagttccgcctcttcctgagcaccaggaaccccaaccccttcatccccccagatgctgccagcatcgtgacagaggtgaacttcaccaccaccaggagcggcctgcggggccagctgctggccctgaccatccagcacgagaagccagacctggaggagcagaagaccaagctgctgcagcaggaggaggacaagaagatccagctggccaagctggaggagagcctgctggagaccctggccaccagccagggcaacatcctggagaacaaggacctgattgagagcctgaaccagaccaaggccagcagcgccctgatccaggagagcctgaaggagagctacaagctgcagatcagcctggaccaggagagagatgcctacctgcccctggccgagagcgccagcaagatgtacttcatcatcagtgacctgagcaagatcaacaacatgtaccgcttcagcctggccgccttcctgcggctcttccagagggccctgcagaacaagcaggacagcgagaacacagagcagaggatccagagcctcatcagcagcctgcagcacatggtgtatgagtacatctgccgctgcctcttcaaggctgaccagctgatgtttgccctgcactttgtgcggggcatgcaccctgagctgttccaggagaatgagtgggacaccttcaccggggtggtggtgggggacatgctgaggaaggctgacagccagcagaagatccgggaccagctgcccagctggattgaccaggagaggtcctgggccgtggccaccctgaagatcgccctgcccagcctgtaccagaccctgtgctttgaagatgctgccctgtggaggacctactacaacaacagcatgtgtgagcaggagttccccagcatcctggccaagaaggtgtccctcttccagcagatcctggtggtgcaggccctgcggccagaccggctgcagagcgccatggccctgtttgcctgcaagaccctgggcctgaaggaggtgagccccctgcccctgaacctgaagaggctgtacaaggagaccctggagattgagcccatcctgatcatcatcagccctggagctgaccccagccaggagctgcaggagctggccaatgctgagaggtctggagagtgctaccaccaggtggccatgggccagggccaggccgacctggccatccagatgctgaaggaatgtgccagaaatggagactggctgtgcctgaagaacctgcacctggtggtgtcctggctgcctgtgctggagaaggagctgaacaccctgcagcccaaggacaccttccggctgtggctgacagctgaggtgcaccccaacttcacccccatcctgctgcagagcagcctgaagatcacctatgagagccccccaggcctgaagaagaacctgatgaggacctatgagagctggaccccagagcagatcagcaagaaggacaacacccaccgggcccacgccctcttcagcctggcctggttccacgccgcctgccaggagaggaggaactacatcccccagggctggaccaagttctatgagttcagcctgagtgacctgcgggccggctacaacatcatcgaccggctgtttgatggagccaaggatgtgcagtgggagtttgtgcacggcctgctggagaatgccatctatggaggaagaattgacaactactttgacctgcgggtgctgcagagctacctgaagcagttcttcaacagctctgtgattgatgtgttcaaccagaggaacaagaagagcatcttcccctacagcgtgtccctgccccagagctgcagcatcctggactaccgggccgtcatcgagaagatcccagaagatgacaagcccagcttcttcggcctgcctgccaacatcgcccggagcagccagaggatgatcagcagccaggtgatcagccagctgcgcatcctgggccgcagcatcacagctggcagcaagtttgaccgggagatctggagcaatgagctgagccctgtgctgaacctgtggaagaagctgaaccagaacagcaacctgatccaccagaaggtgcccccaccaaatgaccggcagggcagccccatcctgtccttcatcatcctggagcagttcaatgccatccggctggtgcagagcgtgcaccagagcctggccgccctgagcaaggtgatccggggcaccaccctgctgagcagcgaggtgcagaagctggccagcgccctgctgaaccagaagtgccccctggcctggcagagcaagtgggagggccctgaggaccccctgcagtacctgcggggcctggtggcccgggccctggccatccagaactgggtggacaaggccgagaagcaggccctgctgtctgagaccctggacctgtctgagctgttccacccagacaccttcctgaatgccctgcggcaggagacagcccgggctgtgggccgctctgtggacagcctgaagtttgtggcctcctggaagggccgcctgcaggaggccaagctgcagatcaagatcagcggcctgctgctggagggctgcagctttgatggcaaccagctgtctgagaaccagctggacagccccagcgtgtcctctgtgctgccctgcttcatgggctggatcccccaggatgcctgtggcccctacagcccagatgagtgcatcagcctgcctgtgtacaccagcgctgagcgggacagagtggtgaccaacattgatgtgccctgtggcggcaaccaggaccagtggatccagtgtggggccgccctcttcctgaagaaccagtag

SEQ ID NO: 117362 - DNA, 12924 bp, Artificial Sequence
  derived and/or modified sequence
atggccaacggcaccgccgacgtgcggaagctgttcatcttcaccactacccaaaactatttcgggctgatgtccgagttgtgggaccagccacttttgtgcaattgtcttgaaataaataatttcttagacgatggtaatcagatgctcctgagagttcaacggtcggacgcaggcatttctttctcaaacactattgagtttggagatacaaaggataaagtgttagtattctttaaactccgcccagaagtgataaccgatgagaacctacatgataacattctagtgtctagcatgctggagagcccgatttcaagcttgtatcaggcagttagacaggtcttcgctcctatgctgctgaaagatcaggagtggtcacgtaactttgaccccaaattgcagaacttgctctctgagctagaagctggactcggcatcgtgctgagaagatctgatactaacctgaccaaacttaaatttaaagaggacgatactcgtggaattctcaccccatccgatgaatttcagttctggattgaacaggcacaccggggtaacaagcagatctccaaggaaagagctaactactttaaggaactctttgaaaccatcgccagggagttttacaacctggactcgctgagcctgctggaagtggtagacctcgtggaaacgacccaggatgtcgtcgacgacgtctggagacagaccgagcacgaccactacccagagtcgcgaatgcttcatctgctagacatcattggcggctcctttgggcgctttgtgcagaagaagttggggaccctgaatctttgggaagacccgtactacctggtcaaagagtctctgaaggccggaatcagcatttgtgaacaatgggtaatagtgtgcaaccacctgactggccaggtgtggcagaggtatgttccgcacccatggaaaaacgaaaaatattttcccgagactctggacaagttagggaaaagactggaagaggtcctggctatccgaacgatacacgaaaagtttctgtacttcttgccagcctccgaggagaagatcatctgcctgacgcgagttttcgagcctttcactggacttaatccagtacagtacaacccttacactgagccactttggaaagcagccgtgagccagtacgaaaagatcatagcccccgctgaacaaaagatagccggcaaactgaagaattatatcagtgagattcaggactctccccagcagttacttcaggccttcctgaagtataaggagctagtcaagcggcctaccataagtaaagagttgatgctggagagggaaacactgctggcccgcttggtagactcaatcaaggatttccgtctggactttgagaatagatgcagaggtatcccgggcgatgcttcgggccctttgtctggaaaaaacctgagcgaagtggtgaactctattgtgtgggtaagacaattggagctgaaggtggatgacaccatcaaaatcgcggaggcactcctcagtgacttgcccggctttaggtgttttcaccagagtgctaaggacctactggaccagctgaagctgtacgagcaagagcagttcgacgattggagcagagacattcaatctggcttaagcgacagtagatcagggctttgtattgaggccagctcgaggatcatggagctcgattccaacgatgggctgctcaaggtgcactatagtgaccgactggtgattctcctgcgcgaggtgcgccaactgagcgccttgggcttcgtgatacccgccaaaattcagcaggtggctaacatcgctcaaaaattctgcaaacaggcaattatactgaagcaagtcgcacatttctataacagcatcgaccaacaaatgatccaatctcagcggccaatgatgcttcagtccgctctggcgttcgagcagattatcaagaactctaaggcaggcagcggtggaaaaagccagatcacttgggataaccccaaggagttagaaggctacattcagaaactgcagaatgcagcagaacgccttgctaccgaaaacaggaaattgagaaagtggcatacaactttctgcgagaaggtcgttgttctgatgaacatagacctcctgcgtcagcagcagagatggaaggacggtttgcaggagctccggaccggcttggcaacagtggaagcccagggattccaggcctcggacatgcacgcatggaaacagcactggaaccatcagctctataaggccctggaacaccagtaccagatgggcctggaagctctcaacgagaacctgcctgagataaatatcgacttgacgtacaagcagggcagactgcagttccgcccacccttcgaagagatcagggcaaaatactaccgtgagatgaagagatttattggaattcccaaccagtttaaaggcgtaggagaggccggggacgagtccattttttcaataatgatagatcggaatgcctctggtttcttgacaatcttttccaaagccgaagacctgtttcgccggcttagtgcagtgctgcatcaacacaaagagtggatagtgatcggacaggtggatatggaggccttagtggaaaaacacttgttcaccgtacacgattgggagaagaattttaaggctttgaaaattaaggggaaggaggtggaaagacttcctagcgccgttaaggttgactgtctgaacatcaattgcaatccggtaaagaccgtcattgacgaccttatccagaagctgtttgaccttctggtcctgagcctgaagaagtcaatccaagcccatctgcatgaaatagacacgttcgttactgaagcaatggaagtcctaactataatgcctcagagtgtggaggagatcggggacgcaaatctgcaatactcaaagctccaagaacgtaagcccgaaatattgcccctatttcaggaggctgaggataagaacaggctgttgagaaccgtggccggcgggggcctcgaaaccattagtaacttgaaggccaaatgggacaagtttgagctgatgatggagtcccaccagctgatgataaaggaccaaatagaggtcatgaaagggaacgtgaaatctcggctgcagatatactaccaagaactggaaaagtttaaggcaagatgggatcagttgaaacctggcgacgatgtcatagagactggccagcataacacgcttgataaatcagccaagctgataaaggaaaagaagatagaatttgacgacctggaagtgacccgtaagaagctggtggacgattgccaccacttccggcttgaagaacccaatttcagtctggcatccagcattagtaaggatatcgagtcttgcgcgcaaatatgggcgttctatgaggaattccagcaagggtttcaggagatggccaacgaagattggataaccttccgaaccaaaacatacctgttcgaggagtttttgatgaactggcatgatagattacgcaaggtcgaagagcacagcgtgatgactgtaaaattgcagtcagaagtagataagtataagatcgtgataccaatccttaagtacgtgcgcggagagcacctctcgccagaccattggctggatctttttcggctgctggggcttccgcgcggaacctcactggagaagctcctgttcggagatctgctccgggtggctgatacaatcgtcgccaaggcggccgatctaaaggacctgaacagcagggcacagggtgaagtgaccatacgggaggcactgcgggagctagatctgtggggggtcggtgctgtctttactttaattgactatgaagatagtcagtccaggaccatgaagttgatcaaagactggaaagacattgttaaccaggtaggagacaaccggtgcctgctccagagtctcaaggacagcccttattataagggcttcgaggataaagtgagcatctgggagagaaaattggccgaactcgacgagtatttacaaaatttgaaccacatacagagaaagtgggtgtatctggaaccgatatttggcagaggagcattaccgaaggagcagacccgctttaatcgggtcgatgaggacttcagatcaataatgaccgatataaaaaaggacaaccgggtaaccacactcaccactcacgccggtattcgcaatagcttgctgactatcctggatcagcttcagcgatgtcagaaatcccttaatgagtttctggaagagaagagatccgcattcccgagattctatttcatcggagatgacgatctgctggaaatccttggtcagagtacaaatccttccgtcatacagtctcacctcaagaaacttttcgccggaataaactcagtctgttttgacgaaaagagtaaacatatcaccgcgatgaaatcacttgaaggagaagtggtcccattcaagaacaaagtgccactgtcaaataacgtggaaacgtggttgaatgacttagccctcgagatgaaaaagaccctagagcagctgttgaaagagtgcgtgacgacgggacgatcttcacaaggagctgttgacccgagcctattcccaagccagatactgtgcctggcagaacagatcaaatttacagaggatgtcgaaaacgctattaaagaccatagcctgcaccagatagagactcagctcgtgaacaagctcgagcagtacaccaatattgatacgtcttccgaagatcctggaaataccgaatcgggtattctggaacttaagctgaaggccctcatccttgacataattcataatatcgacgtggtgaagcagctgaaccagatccaggtacataccaccgaagactgggcctggaagaagcaactgaggttttatatgaagagcgaccacacctgttgcgtgcagatggtagattcagaatttcaatacacttacgaataccagggcaacgcgtcaaagctggtgtatacacccctaaccgataagtgctatctgacattgacgcaggctatgaagatgggactcggtggaaacccgtatgggcccgccgggaccgggaagactgaaagcgtcaaggccctgggcgggctgcttggccggcaggtcctggtgttcaactgtgacgagggcattgatgtgaagtcaatgggacgaatatttgttgggctggttaagtgtggcgcttgggggtgctttgatgagttcaaccgcctcgaagaatcagttctgagcgcagtttccatgcaaattcaaacgatccaggatgccctgaaaaaccatagaaccgtttgcgaactactgggaaaagaagtggaggtgaactctaactctggtattttcattaccatgaacccagcaggaaagggatatggcgggcgacagaagctgccagataatctgaagcagctgtttagacccgttgctatgtcacatcccgacaatgaattgatcgccgaagtgatactgtattctgaaggcttcaaagatgccaaagtgctgtctcggaaactggtggccatttttaatctgtcaagggagcttctgacaccgcagcagcactatgactgggggctaagagccctaaaaaccgtgctacgggggagcggaaatctgctgcgacaactgaataagagtggaacaacccagaacgctaacgagagccacattgtggtccaagccctgagactcaacaccatgtctaagttcacctttaccgactgtacgcgtttcgacgctctcatcaaagacgtgttccctggaatcgaactaaaggaggttgagtacgatgagctctccgccgctcttaagcaggtgttcgaggaagcgaattacgagattattccaaaccagattaaaaaggcacttgaactctatgaacaactttgccagcgcatgggcgtagtgatagtagggccctccggcgcaggcaaatctactctctggcggatgctgcgtgctgcattgtgtaagacgggtaaagtggtgaagcagtatactatgaacccaaaggccatgcccaggtatcaacttctgggccacatcgatatggacacacgtgaatggagcgatggcgttctgacaaacagcgccaggcaggttgtgagggaaccccaggacgtctcatcttggattatatgtgacggtgatatcgatccggaatggattgaatcactgaacagtgtgctggacgacaataggctgctaaccatgccttccggggagaggatccaattcggccccaacgttaactttgtctttgaaacacacgacctcagttgcgcgtcccccgccaccattagccggatggggatgatttttctatctgatgaggagactgacctgaactcccttataaagtcttggttgaggaaccaaccggctgagtatcgcaacaacctggaaaactggatcggcgactatttcgagaaggctctgcaatgggtgctgaaacagaatgattatgtggtggagacctctttagttggaacagtaatgaacggcctgagccatctgcatgggtgcagggaccatgatgagtttataattaacctgattcgaggactcgggggcaatctcaacatgaagagtcgcctcgagtttaccaaggaggtgttccactgggcgagggaaagtccaccggattttcataagccaatggatacatactacgactcaacgagaggccgacttgctacctatgtgcttaaaaagcccgaagacttgacagccgacgatttttcaaacggccttacactgcccgtaatacaaacacctgatatgcagcggggacttgactacttcaaaccatggctatcgtccgacacaaagcaaccatttatactggttggaccggaggggtgtggaaagggtatgctgttgcgctatgcgtttagtcagctgagaagtactcagatcgcaactgtccattgctccgcccaaaccactagtaggcatttgctgcagaagctgagccagacctgcatggtgatctctacaaatacgggccgcgtgtacagacccaaagattgcgagcgtcttgttttgtatctcaaggacatcaacttacccaagctcgataagtggggcacttctacccttgtggcttttttgcaacaggtgctgacataccaaggcttttatgatgaaaatctcgagtgggtagggctggaaaacattcaaatcgtggcatccatgagtgcaggaggtcgcctcggcagacataaacttaccacccgatttacttccattgtgaggctttgctcgatcgactaccccgaaagggaacagctgcaaacaatctacggcgcttacctggagccagtactccacaagaaccttaagaaccattcaatctgggggagttctagcaaaatttatttgttagcaggcagcatggtccaggtctacgaacaggtgagggctaaattcactgtggatgactattctcactactttttcacaccttgcatcctgacacagtgggtcctaggcctctttaggtatgaccttgaaggtggaagctcaaaccatccacttgactacgtccttgaaatagtagcctatgaagcacgaaggctgttccgggacaagattgtgggcgctaaggaattgcatttgttcgatatcatcctcacctccgtgtttcagggcgattggggttccgatatcctcgacaacatgagcgactctttctatgtgacttggggagcgcgccacaacagtggggcccgggctgcccctggtcagcctcttcccccacatggcaagcctttgggaaagctgaattctaccgatctgaaggacgttataaagaagggcttaatccactacggccgggataatcagaacctggacatcttactgttccacgaggtgttagagtatatgagcaggatcgatagggtcttgagctttcccggaggaagtctgctgttagccggacggagtggagtcggccggcgaaccatcactagcctcgtcagtcacatgcacggcgcggtgctgttctcaccaaagatcagccgcggctatgaactgaagcagtttaagaacgacttaaagcacgtcctgcaactggctggtatcgaggcccagcaggtggtcctactgctggaagactatcagtttgtgcatccaacattcctggagatgattaatagtctgcttagctcaggggaggtgcccggtttatacacattggaggagctggagcccctgctgttaccccttaaagaccaggcttctcaagacggctttttcggaccggtgtttaattatttcacgtatcgcatccaacagaatctccatatagtgctgatcatggattctgcaaatagcaattttatgattaactgcgagagtaacccagctttgcacaaaaagtgccaggtactttggatggaaggctggagcaactcatcaatgaaaaagataccagagatgctgtttagtgaaacaggggggggcgaaaaatacaatgacaagaagagaaaggaggagaaaaagaagaactccgtcgaccctgacttccttaagtcctttcttctaatccatgagtcctgcaaagcttatggggcaactccctcaagatatatgaccttcttgcacgtgtatagtgccattagcagcagcaaaaagaaagagttgctgaagagacaatcacacttgcaggcaggagtttccaagctgaacgaagccaaagctctggtggatgagctaaatcgaaaggcaggagagcagtctgtgctgcttaaaactaagcaggatgaggcagacgccgcactgcaaatgatcactgtttccatgcaggatgcgagcgagcagaagactgagcttgagcggctgaagcacaggatcgccgaggaagtcgttaagattgaagaacgtaaaaacaaaatcgatgacgaactcaaggaggtccagcctcttgtgaacgaggccaagctggctgtcgggaacataaaaccagagtcgctgtcggagattagatccctccggatgcctccggacgtgataagggatatcctggaaggtgttctccgcttaatgggaatttttgataccagttgggtgagcatgaaaagctttttggctaaacgtggagtgagggaggatattgccacgttcgatgccaggaatatttccaaggagattcgcgagagcgttgaagaacttctattcaaaaataaaggcagcttcgaccctaagaacgcaaaaagggcctccaccgcagcggcacctctggctgcctgggtgaaggcgaacatccagtattcccatgtgttggagaggatccatcctctggagacagagcaggcgggcctcgagagcaacttaaagaagacggaggaccgcaagagaaaactcgaggaactcctgaattccgtgggtcagaaggtttctgagctgaaagagaagtttcaaagtaggacgtcagaggccgcaaaactcgaggccgaggtctcaaaggcccaggaaaccatcaaggcagctgaggtactgatcaaccagctggatcgggaacacaaaagatggaacgcacaggtggtggagattactgaggagctcgcaactttgcctaagagggcccagcttgccgccgccttcatcacctacctgagcgctgcccccgaatcacttcggaagacctgtctcgaggaatggactaaaagtgctgggctagaaaaattcgacctaagacgcttcctttgcacagagagcgaacaattgatttggaagtcagagggccttccaagcgatgacctgtctatagaaaatgcacttgtcatcctacagagccgtgtatgtccctttcttattgatcctagtagtcaggccactgagtggctgaagacccacctcaaggactcaagattggaagtcatcaaccagcaggattcaaattttatcactgcactggaactcgctgttaggttcggcaagactcttatcatccaggagatggacggagtcgagcctgtcttatatccactcctgaggagagatctagtggcacagggaccccgctacgtggtgcagatcggtgacaagattatagactacaatgaagaattcaggctgttcctatctaccaggaaccctaaccccttcattccgcccgatgctgccagcattgttacagaggtcaatttcaccaccacacgatccggcttaaggggccagttgctcgctctgacaatccagcatgagaagccagatctcgaagaacagaaaactaagttgctgcagcaggaggaagacaagaagatccagttggcaaagttggaggaatccctgctggagacactggccacttcccaggggaacatacttgagaacaaggatctgatcgaatctctgaatcagactaaggcttcatctgccctgatccaagagtctttaaaagagtcgtacaaactacagatctcactcgaccaagagagagatgcctatctgcccctggccgagtctgcaagcaaaatgtatttcattatctctgacctctcgaaaatcaataacatgtatagattttccctcgctgccttccttaggctgttccagcgcgcactgcagaacaagcaggattccgaaaacaccgagcagcgaatacagtccttgatctcatcactccaacacatggtttacgaatatatttgccgttgcctctttaaagcggatcagcttatgttcgccctgcactttgtgcggggcatgcatcccgagctttttcaggagaacgaatgggacacttttacaggtgtggtggtaggcgacatgctccgtaaggcagactcacagcagaagatccgagatcaattgcccagctggattgatcaggagaggagttgggctgtcgcgaccttgaagatagccctgccgtcgctatatcaaacattatgcttcgaagacgccgcactgtggaggacctactacaacaactctatgtgcgaacaagagtttccctctatccttgctaagaaggtgtccctgtttcagcagatactggtcgtgcaggccttgagaccggataggctgcagagcgccatggcactttttgcctgtaagacactcgggcttaaggaggtctctcctctgcccctgaacctcaagaggctctacaaagagacactcgagatcgagcccatccttattatcatctccccaggcgcagacccttcgcaggaactgcaggaactcgccaacgctgagcgtagtggcgaatgctatcaccaagtggctatgggccaagggcaggccgatcttgcgatccagatgttaaaggagtgcgcccgcaacggcgactggctgtgtctgaagaacctacatctggtcgtaagctggctaccggtcctggaaaaagaacttaacaccttgcagcccaaggacacgtttaggctctggctgacagcagaggttcaccctaacttcacgccaattttgctgcaatcatctcttaaaattacctacgaatcccccccgggtctgaaaaaaaatctgatgagaacgtatgaatcctggactcctgaacagatttccaagaaagacaacacacatcgcgcccacgctctgttctcgctagcttggtttcacgcagcctgtcaggagcggcgtaattatatccctcaggggtggactaagttttacgaattttccctgtcagatttaagggccggctacaacattatcgacaggctgttcgatggggcaaaggacgtgcagtgggagtttgttcatggacttttggagaatgctatctatgggggccgtattgacaactattttgacttacgggtactgcaatcatatctgaagcagttctttaattcttcagttatcgatgtgttcaatcagcggaataagaaaagtatattcccttattcagttagtctacctcagagttgtagtattcttgattaccgtgccgttatcgagaagatacctgaagatgacaagccttccttttttggtttgccagcaaacatcgcccgttcatcacagcgcatgatttcgtctcaagtcatctctcaattgagaattttaggccgatctattacagcaggctctaaattcgatcgggagatatggtccaacgagttatcccccgtactaaatctctggaagaagctgaatcaaaactctaatctgattcatcagaaggtacctcctcccaacgacagacagggatcaccaatactgtcttttattatcctcgagcaattcaacgccatccgcctagtgcaatccgtgcatcaatctcttgctgcactgtctaaagtcatccgcgggacgacgctcctgtctagcgaggtgcagaagctggcctcagccctgctgaaccaaaagtgccctctggcttggcaatccaagtgggaggggccagaagatccactgcaatatctcagggggctggttgcccgagcgctggctatccagaactgggtcgacaaggccgaaaaacaggccctccttagtgagacactcgatctctcggagctgttccatccagacacattcctcaatgcccttcggcaggagaccgctcgagctgtgggcagatctgtggattcactgaaatttgtggccagctggaagggcaggttgcaggaagccaagttgcagattaaaataagcggactgctgctagaaggttgctcttttgacggtaatcagctttctgagaaccaactcgatagtccatccgtgtcctcagttctcccatgctttatgggctggattccacaagacgcctgtggaccatactcgcccgatgagtgtattagtctcccggtgtacacgagcgcagaacgggatcgcgtagttactaatatagacgtgccttgtgggggtaatcaagaccagtggattcagtgtggtgctgctctgttcttgaaaaaccagtag

SEQ ID NO: 117363 - DNA, 12924 bp, Artificial Sequence
  derived and/or modified sequence
atggctaacggcacagcggatgtaaggaaactgttcattttcaccaccactcagaattacttcgggctcatgagtgagttgtgggatcagcctctgctctgtaattgcctggaaataaacaattttctcgatgatggtaaccagatgcttctcagggttcagagaagcgatgcagggatcagttttagcaatacaattgagttcggtgatactaaagataaagttttggtctttttcaagctgaggcctgaggtgatcactgacgaaaatctccacgacaatatcctagtcagctctatgttggagtctccaatttcttctctgtaccaagcggtgcggcaggtattcgcccctatgcttctcaaggatcaggaatggtcacggaactttgatccgaagctgcagaatctgttgagcgaactggaggccggactgggaatcgtgcttaggagatctgataccaatctcaccaaactgaagttcaaagaagacgatacccggggaattctaaccccatctgacgagttccagttctggattgaacaggcgcatcgtggcaataaacagatttctaaagagagggctaattacttcaaggaattattcgaaactatcgctcgcgagttctacaacctcgactctctgagtctgctggaagtggtggaccttgtggaaactacccaagatgtggtcgacgacgtgtggagacagactgagcatgaccactacccagagtcaagaatgcttcaccttctggacattattgggggtagttttggcaggtttgtccaaaagaagctcgggacacttaacctgtgggaagacccttactacctagttaaagaatcactaaaggctggcatcagtatctgcgagcagtgggtgattgtctgtaaccacctgacaggacaggtgtggcagcgttacgtgcctcacccttggaagaatgaaaagtattttccagaaactcttgataagctgggaaagcgactggaagaggttcttgccatccgcaccattcatgagaaattcctgtacttccttcccgcatctgaggagaaaattatttgtctcactcgggttttcgaaccgttcaccggcttgaatccagtccagtacaacccctatactgagcccctgtggaaagccgcagtctcacagtatgagaaaatcatagcgcctgctgagcagaaaattgcaggtaaactcaaaaattacatcagtgagatccaggactctcctcagcagctgctgcaggccttcctcaagtacaaagaattagtcaagcgtccaaccatatcaaaggagttgatgctggagcgcgaaaccctgctggctcggctggtggattctatcaaagactttaggctcgatttcgagaatagatgtaggggaatccccggtgatgcctctggacccctgtcgggtaagaatttgtccgaagtggtgaactctatcgtgtgggttcgacaactcgaacttaaagtcgatgacacaatcaaaatcgctgaggccctactgagcgatctgccaggctttcggtgctttcaccagtcagctaaggacctgttggatcagctgaagctttatgagcaggaacaatttgacgactggagccgggatatccagagcggcctaagtgatagccgctcgggcttgtgtattgaggcctcaagtagaatcatggagctggattcaaacgatggattgctcaaggtgcattacagcgaccgactggtgatcttgcttagggaggtccggcaactttctgccttagggtttgtgattcccgcaaaaatccagcaagtggccaatattgctcagaaattctgcaagcaggcaattatactgaagcaggtggcacacttttataacagcattgaccaacagatgatccagtcccagcgtccaatgatgctccaatccgccttagcattcgagcagatcataaaaaactctaaagcagggtctggcggtaaatcacagatcacgtgggataatcccaaggaactagaaggctacatacagaagttacagaatgccgcagagcggcttgcgaccgagaacaggaagctaagaaagtggcatactactttctgcgagaaggtagttgtcctcatgaacattgatcttctccgccaacagcaacgctggaaagatgggctccaggaattgcggacggggctcgcaacagtggaagcacagggctttcaagcctccgacatgcacgcatggaaacaacactggaatcatcaactatacaaggctctggagcaccagtaccagatggggttggaggcgctcaatgagaacttaccagagattaacatcgatctaacttataagcagggcagactgcagtttcgtcccccattcgaggagattagagccaagtattatcgtgagatgaagagattcatcggcattccaaatcaattcaaaggagtgggcgaagcaggggacgagagcatttttagtattatgattgacaggaatgcctcaggctttctgacaatcttctccaaagctgaagatcttttcaggaggttatccgcagtgcttcaccagcataaagagtggatcgtcattggtcaggtagacatggaagcactagtggagaagcacctcttcaccgtccacgactgggagaagaatttcaaagcactaaagatcaaaggcaaggaggttgagcggttgcctagtgccgtcaaagtcgattgcctgaatatcaactgtaatcctgtgaaaaccgttattgatgatttgatccagaagcttttcgatttactggtactgtcgctgaagaaatcaatacaagcccatctccatgaaattgataccttcgtgaccgaagctatggaggtgctaacaattatgccccagtcagtggaggagattggagatgctaacttacaatacagcaaattgcaggagcgcaagcctgagatcctcccgctcttccaggaggcagaggacaagaacaggttgcttaggacagtcgctggaggaggtctggagacaatcagtaacctaaaagctaaatgggacaaatttgaactgatgatggaatcccaccagttgatgataaaagatcaaattgaggtgatgaaaggtaatgtgaaaagccggctccaaatatattaccaggagctcgaaaagtttaaagccagatgggaccagctcaagcccggtgatgatgtgatagaaacggggcagcacaatactctggataagtcagccaagttgatcaaggaaaagaagatagaattcgatgatctcgaagtgacccggaagaagctcgtcgacgactgtcaccacttccggttggaggagccaaacttctcattggcctcttccatcagtaaggatattgaatcctgtgcccagatttgggccttttacgaagaattccagcagggtttccaggaaatggccaacgaggactggatcactttccggaccaaaacatacctcttcgaggagtttctgatgaattggcatgaccgactgaggaaggtggaggaacattccgtcatgaccgttaagttgcaaagcgaggttgacaagtataaaatcgtgattcccattttgaagtatgtacggggagagcacctctcccctgatcactggctcgatttgtttcgccttttgggactccccaggggcacgtccttggagaagttgctgtttggagacctgcttcgggtggccgatactattgtcgcaaaggcagcagatttaaaggatctgaactcacgtgcacagggagaggtgacaatccgcgaagcactgcgagagttagatttatggggggtgggtgccgtgttcacattgatcgattacgaagacagccagtctcgtacaatgaagcttatcaaggactggaaagacattgtcaaccaggtgggagacaatcgatgtcttctgcagtccttaaaagattcgccctattacaagggattcgaggataaagtctcaatttgggagaggaagctggccgagctggatgagtatctccagaacctcaatcatattcaacgcaagtgggtgtatctcgagcccatctttggacgaggggctctgcccaaggaacagaccaggtttaatcgggtcgatgaagatttcaggtctattatgaccgacatcaaaaaagataatagagtgactactttgaccacacacgccggtatacgcaactccctcctgaccatcctggatcagttgcagcgttgccagaagagcctgaatgaattcctggaagaaaagcgctcagcatttccgaggttctactttatcggggacgatgaccttcttgaaattcttggccaatccaccaatccctccgtcattcagagccacctgaagaagctgtttgcaggtatcaatagcgtgtgcttcgatgaaaaatccaagcacataacagccatgaagagcttagagggagaggtggtcccattcaaaaacaaagtgccactgagcaacaatgtagaaacctggctgaatgatctcgcactggaaatgaagaaaacactcgaacagttgttaaaagagtgtgtcacaacgggcaggagctcacagggcgcagtggacccgtcactcttcccctcgcagattctgtgcctggccgaacaaataaaatttaccgaggatgtggaaaacgccatcaaagatcactccctgcatcagatagagacccagctggtcaataaacttgagcagtatacaaacatcgacacctcttctgaagaccctggcaacactgaatccgggatcttggagctgaaactgaaggccctgattctggacattatccataatattgacgtggtgaaacagctgaaccagatccaggtccatacaactgaagattgggcctggaagaagcagcttcgattttatatgaagtccgaccacacgtgctgcgtgcaaatggtagattcagaatttcagtacacctacgagtaccaaggaaatgcttcaaaacttgtgtatacaccgctgactgacaagtgctatctgactctgacccaggctatgaaaatggggctgggcggtaatccttatggcccagccggaacagggaagactgagagcgtgaaggcccttggaggcctcttaggtaggcaagtgctggtgttcaactgtgacgagggcatcgacgtcaagtccatggggaggatttttgttggactggtgaagtgtggtgcatggggatgctttgacgagtttaatagactggaagaatccgtactcagtgctgtctcgatgcagatacagacaatccaggacgctttaaaaaaccatcgaaccgtgtgcgaactcctgggaaaggaagtcgaggtgaactctaactctggcatctttatcacaatgaacccagctggtaaagggtacggtgggagacagaaacttcctgataatctgaaacaattgtttcgcccagtggcaatgagtcatcctgataacgaattgatagcagaggtgatcctctattcagagggcttcaaagacgcaaaggttctgtcccggaagctcgtcgccatctttaatttatcacgtgaactccttaccccgcaacagcactacgactggggcctgcgagctcttaagacagttctgcgaggatccgggaatcttcttcggcaactcaacaaatctggaactacccagaacgctaacgaatcccacatagtcgtgcaggcccttagactgaacactatgtctaagtttaccttcaccgattgcacccgttttgatgcattgatcaaggacgtgtttcccggaatagagcttaaggaagttgagtatgatgagctgagcgcagcattaaagcaggtgtttgaagaagctaattacgagatcatcccaaatcagatcaagaaggccttggaactgtatgaacagctgtgccagcgtatgggtgttgtgatcgtgggacctagcggagccggaaaatcaaccctgtggaggatgctgagggccgcactgtgcaagactggtaaagttgtgaaacaatacacaatgaatcctaaggcaatgccccgttaccaactcctagggcatatcgacatggatacaagggagtggagcgatggagtcctgacgaacagcgcaagacaggtggttagagagccacaagacgtgtcatcatggattatctgtgatggtgacatcgatccagagtggattgagagtctcaattcagtgctggatgacaaccgactgctcactatgccctccggggagaggattcagttcgggcctaacgtgaatttcgtgttcgagacccacgacctgagttgcgcctctcccgcaacaatcagtcgcatgggcatgatatttctttccgacgaggagaccgatttaaactcacttattaagtcctggctgaggaaccaacctgcggaataccggaataatctggagaattggattggagactatttcgaaaaggctctgcagtgggtgctgaagcagaacgattacgtggtcgagacgagtctggttggcaccgtcatgaacggcctgtcgcatctgcacgggtgcagggatcatgatgaatttattattaacttgattaggggactgggtggtaacttgaatatgaaatcacgtctggagttcactaaagaggtctttcactgggcaagagagagccctccagatttccataaacctatggatacctactacgactcaacacggggacggctggctacttacgtgctgaaaaagccagaagacctgacggccgacgacttcagtaacggcttgactttgcccgtgatccagacgcccgatatgcagcggggtctcgactatttcaagccctggctgtcgtctgacaccaagcaaccgtttattcttgtgggacctgagggatgtggcaaaggtatgctcctgcgctacgcatttagtcaactgaggtccacgcagatcgccaccgttcactgttccgctcagactacatcacgacacctgctgcagaaactgagccagacatgcatggtcatcagcactaacaccggaagagtgtatcgtcccaaggattgtgagcggctggtcctctatctgaaagatatcaacctgccaaagcttgataaatggggaacctctactctcgtggctttcctccagcaagtcctcacatatcaaggattctacgacgagaatttggagtgggttggtctggaaaacattcagatagtggctagtatgtcagctggagggcgacttggcaggcacaagctgactacccggttcacatccatcgtgagattatgctccattgattacccagagcgtgagcagctccaaaccatctacggtgcctacttggaaccagtcctgcacaagaatctaaagaatcatagcatttggggctcttcatccaaaatctatttattggccggatctatggtgcaagtgtacgagcaagtccgagccaagttcacggtcgatgattacagtcattatttcttcacgccctgcatccttacccaatgggtcctgggcctgttcaggtatgatctggagggcggatcaagtaaccatcccctggactacgtgctggagattgtggcttacgaggctcggagactgtttcgcgacaagattgtgggagcgaaggagttgcacttgttcgatattatcctcacctcggtctttcagggagattgggggtctgacattcttgataatatgtccgattccttttatgttacttggggggctagacacaattcaggggcacgagccgcacctggtcagccactacctcctcatggcaagcccctggggaagctgaactctaccgacttgaaggacgtcatcaaaaaaggcctcattcactacggaagggataatcagaatttagatatcctgttgtttcacgaggtgcttgagtatatgtccagaattgacagggtgctgtcttttcccggaggttccctgctgctcgcaggcagatcgggggttggacgacgaaccattacatccctggtgagtcacatgcacggcgctgtgctgttttcgcccaagataagtcgtgggtatgagttgaagcagtttaaaaacgatctgaaacacgttctgcagctggccggaattgaagctcagcaggtggtgcttttacttgaggattaccagttcgtccatcccacgttcttggaaatgattaattcccttctgagctctggcgaagttccgggactatatactcttgaggaattagagccgcttctgctgcctcttaaggaccaggccagccaggacggcttttttggccctgtgtttaattactttacctaccgaatacagcaaaacttgcatatcgtcctgataatggattctgcaaatagcaacttcatgatcaactgtgagagtaatcctgcgctgcacaaaaaatgccaagtgctgtggatggaaggctggtcaaatagcagtatgaaaaaaataccagaaatgctgttttctgagaccggagggggagagaagtacaatgataaaaagaggaaagaagagaaaaagaagaactctgtcgacccggattttctgaagagcttcctgttgattcatgagtcctgtaaagcgtacggcgctacacccagtaggtacatgacattcttgcatgtctattcagccatcagttcttccaagaagaaagagcttctcaagcgacagtctcacttacaggcaggggtttccaagctgaacgaggcgaaagcactcgtagatgaactcaacagaaaagccggagagcaaagcgtcctgctcaaaactaaacaggacgaggccgatgccgctcttcagatgattaccgtgtccatgcaggacgcaagcgagcagaaaaccgagctcgagaggctcaaacatcgaatcgcagaggaagtcgttaaaatcgaagagaggaaaaataaaattgacgacgagcttaaggaggttcagccccttgtgaatgaagctaaactggcagtgggaaacattaagccagaatcgttgtccgagattcgcagcctccgaatgcctccagacgtgattagagatatcctggaaggtgtcttacgacttatgggaatctttgacacttcatgggtgtcaatgaagagttttcttgccaaaaggggcgtccgggaggacattgccactttcgacgccaggaatatcagtaaggaaatcagagaatctgttgaagagctgctgttcaagaacaagggctcttttgaccccaagaatgccaagagagcgtccactgcggctgccccacttgcagcatgggttaaggcaaatatccagtactctcacgttcttgaaagaatccaccctctggaaaccgagcaggctggtttggagagcaacctcaaaaagaccgaagatcgtaagaggaagctcgaagagttactgaactccgtgggacaaaaggtttcagaactcaaagaaaagtttcagtcacgtacgtctgaggccgcaaagcttgaggccgaggtgtccaaagctcaggagacaatcaaggcggctgaggtgctgattaatcagttagaccgagaacataagcggtggaatgctcaagtggtggaaattaccgaagagctcgctacacttccaaaacgtgcccagctcgcagcagcttttataacatacctgtcagctgcgccagagagccttcgcaagacttgtctggaggaatggacgaagtcagcaggattggagaaattcgacctcagaagattcttgtgtaccgagagcgagcaactgatctggaaatctgaggggctaccgagcgatgacctctccatcgagaatgccctggtcattttacaatcccgggtgtgccccttcctgatagacccctcctcgcaagccacggagtggttgaagacccacctgaaggactcaagactggaggtgattaatcaacaggatagtaactttattaccgctctggaactggccgtcagatttggcaaaactctcataatacaggagatggatggggtggaacctgtgctctaccccctactgcggagagatctggtcgcccaaggacccagatatgtcgtgcagatcggagacaaaatcattgactataatgaggagtttcggctttttctgagcactcgaaaccccaatcctttcatacccccagatgctgcctccattgtcacagaggtgaacttcaccactacaaggtccggccttagaggccaactgctcgcgttgacaatacaacacgagaaacccgacctcgaggagcagaagaccaagctgctgcagcaggaggaggacaaaaagattcagttggccaagttggaagagagcctgctcgaaaccctggctacgtcccagggaaacatcctggagaacaaagaccttattgagtctctgaatcagacgaaagcatcctctgcactcattcaagaatccctaaaggagagctacaagcttcagattagtctggaccaggagagagatgcctacctcccacttgccgaatcagcaagcaaaatgtactttattatttccgacctctcaaaaattaacaacatgtatcggttcagcttggccgcttttctgagacttttccagagagcactgcagaacaaacaggatagtgaaaatactgaacagcgtatccagtccttgatcagttccctccagcacatggtttatgagtacatctgcaggtgcctgttcaaggccgatcagttgatgttcgccctgcattttgtgaggggcatgcacccagaactatttcaagagaatgagtgggacacattcacaggcgtcgttgtcggagacatgcttaggaaggctgatagtcaacaaaaaattcgagaccagctgccaagctggatcgatcaagaacgtagttgggctgtggcaacactcaagatcgctctgccctctctgtatcagaccctgtgtttcgaagatgccgcactgtggcgcacatactataataattccatgtgcgagcaggagtttccttctattttggctaagaaggttagtctttttcagcagatcctggtcgtgcaggcactcagacctgatcgtctgcagagtgccatggccctgtttgcatgtaagaccctcggattgaaggaggtgagccccctgcctctcaacctcaagaggctgtacaaggaaactctggaaatcgaacccatcctgatcatcataagccctggggctgacccaagccaggagctacaagagctggcaaacgctgaacggtcaggggaatgctatcatcaagtagcgatgggacagggccaagccgatttggctattcaaatgttgaaggagtgtgctagaaacggcgattggctgtgtctgaagaaccttcatctcgtggtatcctggctgccagttttggagaaagaactgaacaccctgcagccaaaagatacatttagactgtggctgaccgccgaggtccacccaaattttactcctattctgctgcagtcaagcctcaaaatcacttacgagtcacctcccggactcaaaaaaaatctgatgcggacatatgagtcatggacacccgaacagatttcaaaaaaggacaatactcaccgcgctcatgccctgttcagtttggcatggtttcatgcggcttgccaggagcgtcgcaactatatccctcaaggttggactaagttttacgagttcagcttgagcgacctacgcgcaggatacaatatcatagatcggctgtttgacggcgctaaagacgtgcagtgggaatttgtccacggtctcctggaaaacgctatatacggtggcagaatcgataactactttgacttaagagtcctgcagagctacctcaaacagttctttaacagtagtgtgatcgatgtgttcaatcaaagaaacaagaaatctatttttccgtattccgtgagcctgccccagtcctgtagcatcctcgactaccgtgccgtgatagagaagattccagaagatgataagccatccttctttggcctgcccgcaaatatagcacgctcctcccagcggatgatctcctcacaggtgatttcgcagttgcgaatcctgggccgatctatcactgccggttctaaatttgaccgcgagatttggtctaacgaactgtcacccgttctcaacctctggaagaagctgaatcaaaactccaacctcatccaccaaaaggtgccccctcccaacgatcgccaggggtcacccattctgagctttattattctcgagcaattcaatgcaatccgcctcgtgcagtccgttcaccagtccctagctgctctatctaaagttatccgtgggacaactctgctctcttcagaagtacagaaactggcatctgccttgctgaatcagaagtgtcccttagcctggcagagcaagtgggaaggcccagaagatcccctgcagtatctaaggggtctggtcgctcgggcattggccatccaaaactgggtcgataaggccgagaaacaagcactccttagtgagacactagatctgtcggaactttttcacccagatacttttctgaatgccctgagacaggagacagcgagggctgtaggaaggtcagtggacagccttaagtttgtggcatcctggaagggacgcctccaagaggctaaactgcaaataaaaattagcggtctgctgctcgaaggttgcagttttgacggcaatcagctgtcagaaaatcagctggactctccttctgtaagcagcgtgctgccctgttttatgggatggatcccccaggatgcatgcggtccttattccccggacgaatgcatttctctgccggtgtatacgtctgcagaaagagatagagtggtcaccaatatagacgtgccctgtggaggaaaccaagatcaatggatccagtgcggcgcagccctatttctaaagaaccagtat

SEQ ID NO: 117364 - DNA, 12924 bp, Artificial Sequence
  derived and/or modified sequence
atggccaacggcaccgccgacgtgagaaagctgttcatcttcaccaccacccagaactacttcggcctgatgagcgagctgtgggaccagcccctgctgtgcaactgcctggagatcaacaacttcctggacgacggcaaccagatgctgctgagagtgcagagaagcgacgccggcatcagcttcagcaacaccatcgagttcggcgacaccaaggacaaggtgctggtgttcttcaagctgagacccgaggtgatcaccgacgagaacctgcacgacaacatcctggtgagcagcatgctggagagccccatcagcagcctgtaccaggccgtgagacaggtgttcgcccccatgctgctgaaggaccaggagtggagcagaaacttcgaccccaagctgcagaacctgctgagcgagctggaggccggcctgggcatcgtgctgagaagaagcgacaccaacctgaccaagctgaagttcaaggaggacgacaccagaggcatcctgacccccagcgacgagttccagttctggatcgagcaggcccacagaggcaacaagcagatcagcaaggagagagccaactacttcaaggagctgttcgagaccatcgccagagagttctacaacctggacagcctgagcctgctggaggtggtggacctggtggagaccacccaggacgtggtggacgacgtgtggagacagaccgagcacgaccactaccccgagagcagaatgctgcacctgctggacatcatcggcggcagcttcggcagattcgtgcagaagaagctgggcaccctgaacctgtgggaggacccctactacctggtgaaggagagcctgaaggccggcatcagcatctgcgagcagtgggtgatcgtgtgcaaccacctgaccggccaggtgtggcagagatacgtgccccacccctggaagaacgagaagtacttccccgagaccctggacaagctgggcaagagactggaggaggtgctggccatcagaaccatccacgagaagttcctgtacttcctgcccgccagcgaggagaagatcatctgcctgaccagagtgttcgagcccttcaccggcctgaaccccgtgcagtacaacccctacaccgagcccctgtggaaggccgccgtgagccagtacgagaagatcatcgcccccgccgagcagaagatcgccggcaagctgaagaactacatcagcgagatccaggacagcccccagcagctgctgcaggccttcctgaagtacaaggagctggtgaagagacccaccatcagcaaggagctgatgctggagagagagaccctgctggccagactggtggacagcatcaaggacttcagactggacttcgagaacagatgcagaggcatccccggcgacgccagcggccccctgagcggcaagaacctgagcgaggtggtgaacagcatcgtgtgggtgagacagctggagctgaaggtggacgacaccatcaagatcgccgaggccctgctgagcgacctgcccggcttcagatgcttccaccagagcgccaaggacctgctggaccagctgaagctgtacgagcaggagcagttcgacgactggagcagagacatccagagcggcctgagcgacagcagaagcggcctgtgcatcgaggccagcagcagaatcatggagctggacagcaacgacggcctgctgaaggtgcactacagcgacagactggtgatcctgctgagagaggtgagacagctgagcgccctgggcttcgtgatccccgccaagatccagcaggtggccaacatcgcccagaagttctgcaagcaggccatcatcctgaagcaggtggcccacttctacaacagcatcgaccagcagatgatccagagccagagacccatgatgctgcagagcgccctggccttcgagcagatcatcaagaacagcaaggccggcagcggcggcaagagccagatcacctgggacaaccccaaggagctggagggctacatccagaagctgcagaacgccgccgagagactggccaccgagaacagaaagctgagaaagtggcacaccaccttctgcgagaaggtggtggtgctgatgaacatcgacctgctgagacagcagcagagatggaaggacggcctgcaggagctgagaaccggcctggccaccgtggaggcccagggcttccaggccagcgacatgcacgcctggaagcagcactggaaccaccagctgtacaaggccctggagcaccagtaccagatgggcctggaggccctgaacgagaacctgcccgagatcaacatcgacctgacctacaagcagggcagactgcagttcagaccccccttcgaggagatcagagccaagtactacagagagatgaagagattcatcggcatccccaaccagttcaagggcgtgggcgaggccggcgacgagagcatcttcagcatcatgatcgacagaaacgccagcggcttcctgaccatcttcagcaaggccgaggacctgttcagaagactgagcgccgtgctgcaccagcacaaggagtggatcgtgatcggccaggtggacatggaggccctggtggagaagcacctgttcaccgtgcacgactgggagaagaacttcaaggccctgaagatcaagggcaaggaggtggagagactgcccagcgccgtgaaggtggactgcctgaacatcaactgcaaccccgtgaagaccgtgatcgacgacctgatccagaagctgttcgacctgctggtgctgagcctgaagaagagcatccaggcccacctgcacgagatcgacaccttcgtgaccgaggccatggaggtgctgaccatcatgccccagagcgtggaggagatcggcgacgccaacctgcagtacagcaagctgcaggagagaaagcccgagatcctgcccctgttccaggaggccgaggacaagaacagactgctgagaaccgtggccggcggcggcctggagaccatcagcaacctgaaggccaagtgggacaagttcgagctgatgatggagagccaccagctgatgatcaaggaccagatcgaggtgatgaagggcaacgtgaagagcagactgcagatctactaccaggagctggagaagttcaaggccagatgggaccagctgaagcccggcgacgacgtgatcgagaccggccagcacaacaccctggacaagagcgccaagctgatcaaggagaagaagatcgagttcgacgacctggaggtgaccagaaagaagctggtggacgactgccaccacttcagactggaggagcccaacttcagcctggccagcagcatcagcaaggacatcgagagctgcgcccagatctgggccttctacgaggagttccagcagggcttccaggagatggccaacgaggactggatcaccttcagaaccaagacctacctgttcgaggagttcctgatgaactggcacgacagactgagaaaggtggaggagcacagcgtgatgaccgtgaagctgcagagcgaggtggacaagtacaagatcgtgatccccatcctgaagtacgtgagaggcgagcacctgagccccgaccactggctggacctgttcagactgctgggcctgcccagaggcaccagcctggagaagctgctgttcggcgacctgctgagagtggccgacaccatcgtggccaaggccgccgacctgaaggacctgaacagcagagcccagggcgaggtgaccatcagagaggccctgagagagctggacctgtggggcgtgggcgccgtgttcaccctgatcgactacgaggacagccagagcagaaccatgaagctgatcaaggactggaaggacatcgtgaaccaggtgggcgacaacagatgcctgctgcagagcctgaaggacagcccctactacaagggcttcgaggacaaggtgagcatctgggagagaaagctggccgagctggacgagtacctgcagaacctgaaccacatccagagaaagtgggtgtacctggagcccatcttcggcagaggcgccctgcccaaggagcagaccagattcaacagagtggacgaggacttcagaagcatcatgaccgacatcaagaaggacaacagagtgaccaccctgaccacccacgccggcatcagaaacagcctgctgaccatcctggaccagctgcagagatgccagaagagcctgaacgagttcctggaggagaagagaagcgccttccccagattctacttcatcggcgacgacgacctgctggagatcctgggccagagcaccaaccccagcgtgatccagagccacctgaagaagctgttcgccggcatcaacagcgtgtgcttcgacgagaagagcaagcacatcaccgccatgaagagcctggagggcgaggtggtgcccttcaagaacaaggtgcccctgagcaacaacgtggagacctggctgaacgacctggccctggagatgaagaagaccctggagcagctgctgaaggagtgcgtgaccaccggcagaagcagccagggcgccgtggaccccagcctgttccccagccagatcctgtgcctggccgagcagatcaagttcaccgaggacgtggagaacgccatcaaggaccacagcctgcaccagatcgagacccagctggtgaacaagctggagcagtacaccaacatcgacaccagcagcgaggaccccggcaacaccgagagcggcatcctggagctgaagctgaaggccctgatcctggacatcatccacaacatcgacgtggtgaagcagctgaaccagatccaggtgcacaccaccgaggactgggcctggaagaagcagctgagattctacatgaagagcgaccacacctgctgcgtgcagatggtggacagcgagttccagtacacctacgagtaccagggcaacgccagcaagctggtgtacacccccctgaccgacaagtgctacctgaccctgacccaggccatgaagatgggcctgggcggcaacccctacggccccgccggcaccggcaagaccgagagcgtgaaggccctgggcggcctgctgggcagacaggtgctggtgttcaactgcgacgagggcatcgacgtgaagagcatgggcagaatcttcgtgggcctggtgaagtgcggcgcctggggctgcttcgacgagttcaacagactggaggagagcgtgctgagcgccgtgagcatgcagatccagaccatccaggacgccctgaagaaccacagaaccgtgtgcgagctgctgggcaaggaggtggaggtgaacagcaacagcggcatcttcatcaccatgaaccccgccggcaagggctacggcggcagacagaagctgcccgacaacctgaagcagctgttcagacccgtggccatgagccaccccgacaacgagctgatcgccgaggtgatcctgtacagcgagggcttcaaggacgccaaggtgctgagcagaaagctggtggccatcttcaacctgagcagagagctgctgaccccccagcagcactacgactggggcctgagagccctgaagaccgtgctgagaggcagcggcaacctgctgagacagctgaacaagagcggcaccacccagaacgccaacgagagccacatcgtggtgcaggccctgagactgaacaccatgagcaagttcaccttcaccgactgcaccagattcgacgccctgatcaaggacgtgttccccggcatcgagctgaaggaggtggagtacgacgagctgagcgccgccctgaagcaggtgttcgaggaggccaactacgagatcatccccaaccagatcaagaaggccctggagctgtacgagcagctgtgccagagaatgggcgtggtgatcgtgggccccagcggcgccggcaagagcaccctgtggagaatgctgagagccgccctgtgcaagaccggcaaggtggtgaagcagtacaccatgaaccccaaggccatgcccagataccagctgctgggccacatcgacatggacaccagagagtggagcgacggcgtgctgaccaacagcgccagacaggtggtgagagagccccaggacgtgagcagctggatcatctgcgacggcgacatcgaccccgagtggatcgagagcctgaacagcgtgctggacgacaacagactgctgaccatgcccagcggcgagagaatccagttcggccccaacgtgaacttcgtgttcgagacccacgacctgagctgcgccagccccgccaccatcagcagaatgggcatgatcttcctgagcgacgaggagaccgacctgaacagcctgatcaagagctggctgagaaaccagcccgccgagtacagaaacaacctggagaactggatcggcgactacttcgagaaggccctgcagtgggtgctgaagcagaacgactacgtggtggagaccagcctggtgggcaccgtgatgaacggcctgagccacctgcacggctgcagagaccacgacgagttcatcatcaacctgatcagaggcctgggcggcaacctgaacatgaagagcagactggagttcaccaaggaggtgttccactgggccagagagagcccccccgacttccacaagcccatggacacctactacgacagcaccagaggcagactggccacctacgtgctgaagaagcccgaggacctgaccgccgacgacttcagcaacggcctgaccctgcccgtgatccagacccccgacatgcagagaggcctggactacttcaagccctggctgagcagcgacaccaagcagcccttcatcctggtgggccccgagggctgcggcaagggcatgctgctgagatacgccttcagccagctgagaagcacccagatcgccaccgtgcactgcagcgcccagaccaccagcagacacctgctgcagaagctgagccagacctgcatggtgatcagcaccaacaccggcagagtgtacagacccaaggactgcgagagactggtgctgtacctgaaggacatcaacctgcccaagctggacaagtggggcaccagcaccctggtggccttcctgcagcaggtgctgacctaccagggcttctacgacgagaacctggagtgggtgggcctggagaacatccagatcgtggccagcatgagcgccggcggcagactgggcagacacaagctgaccaccagattcaccagcatcgtgagactgtgcagcatcgactaccccgagagagagcagctgcagaccatctacggcgcctacctggagcccgtgctgcacaagaacctgaagaaccacagcatctggggcagcagcagcaagatctacctgctggccggcagcatggtgcaggtgtacgagcaggtgagagccaagttcaccgtggacgactacagccactacttcttcaccccctgcatcctgacccagtgggtgctgggcctgttcagatacgacctggagggcggcagcagcaaccaccccctggactacgtgctggagatcgtggcctacgaggccagaagactgttcagagacaagatcgtgggcgccaaggagctgcacctgttcgacatcatcctgaccagcgtgttccagggcgactggggcagcgacatcctggacaacatgagcgacagcttctacgtgacctggggcgccagacacaacagcggcgccagagccgcccccggccagcccctgcccccccacggcaagcccctgggcaagctgaacagcaccgacctgaaggacgtgatcaagaagggcctgatccactacggcagagacaaccagaacctggacatcctgctgttccacgaggtgctggagtacatgagcagaatcgacagagtgctgagcttccccggcggcagcctgctgctggccggcagaagcggcgtgggcagaagaaccatcaccagcctggtgagccacatgcacggcgccgtgctgttcagccccaagatcagcagaggctacgagctgaagcagttcaagaacgacctgaagcacgtgctgcagctggccggcatcgaggcccagcaggtggtgctgctgctggaggactaccagttcgtgcaccccaccttcctggagatgatcaacagcctgctgagcagcggcgaggtgcccggcctgtacaccctggaggagctggagcccctgctgctgcccctgaaggaccaggccagccaggacggcttcttcggccccgtgttcaactacttcacctacagaatccagcagaacctgcacatcgtgctgatcatggacagcgccaacagcaacttcatgatcaactgcgagagcaaccccgccctgcacaagaagtgccaggtgctgtggatggagggctggagcaacagcagcatgaagaagatccccgagatgctgttcagcgagaccggcggcggcgagaagtacaacgacaagaagagaaaggaggagaagaagaagaacagcgtggaccccgacttcctgaagagcttcctgctgatccacgagagctgcaaggcctacggcgccacccccagcagatacatgaccttcctgcacgtgtacagcgccatcagcagcagcaagaagaaggagctgctgaagagacagagccacctgcaggccggcgtgagcaagctgaacgaggccaaggccctggtggacgagctgaacagaaaggccggcgagcagagcgtgctgctgaagaccaagcaggacgaggccgacgccgccctgcagatgatcaccgtgagcatgcaggacgccagcgagcagaagaccgagctggagagactgaagcacagaatcgccgaggaggtggtgaagatcgaggagagaaagaacaagatcgacgacgagctgaaggaggtgcagcccctggtgaacgaggccaagctggccgtgggcaacatcaagcccgagagcctgagcgagatcagaagcctgagaatgccccccgacgtgatcagagacatcctggagggcgtgctgagactgatgggcatcttcgacaccagctgggtgagcatgaagagcttcctggccaagagaggcgtgagagaggacatcgccaccttcgacgccagaaacatcagcaaggagatcagagagagcgtggaggagctgctgttcaagaacaagggcagcttcgaccccaagaacgccaagagagccagcaccgccgccgcccccctggccgcctgggtgaaggccaacatccagtacagccacgtgctggagagaatccaccccctggagaccgagcaggccggcctggagagcaacctgaagaagaccgaggacagaaagagaaagctggaggagctgctgaacagcgtgggccagaaggtgagcgagctgaaggagaagttccagagcagaaccagcgaggccgccaagctggaggccgaggtgagcaaggcccaggagaccatcaaggccgccgaggtgctgatcaaccagctggacagagagcacaagagatggaacgcccaggtggtggagatcaccgaggagctggccaccctgcccaagagagcccagctggccgccgccttcatcacctacctgagcgccgcccccgagagcctgagaaagacctgcctggaggagtggaccaagagcgccggcctggagaagttcgacctgagaagattcctgtgcaccgagagcgagcagctgatctggaagagcgagggcctgcccagcgacgacctgagcatcgagaacgccctggtgatcctgcagagcagagtgtgccccttcctgatcgaccccagcagccaggccaccgagtggctgaagacccacctgaaggacagcagactggaggtgatcaaccagcaggacagcaacttcatcaccgccctggagctggccgtgagattcggcaagaccctgatcatccaggagatggacggcgtggagcccgtgctgtaccccctgctgagaagagacctggtggcccagggccccagatacgtggtgcagatcggcgacaagatcatcgactacaacgaggagttcagactgttcctgagcaccagaaaccccaaccccttcatcccccccgacgccgccagcatcgtgaccgaggtgaacttcaccaccaccagaagcggcctgagaggccagctgctggccctgaccatccagcacgagaagcccgacctggaggagcagaagaccaagctgctgcagcaggaggaggacaagaagatccagctggccaagctggaggagagcctgctggagaccctggccaccagccagggcaacatcctggagaacaaggacctgatcgagagcctgaaccagaccaaggccagcagcgccctgatccaggagagcctgaaggagagctacaagctgcagatcagcctggaccaggagagagacgcctacctgcccctggccgagagcgccagcaagatgtacttcatcatcagcgacctgagcaagatcaacaacatgtacagattcagcctggccgccttcctgagactgttccagagagccctgcagaacaagcaggacagcgagaacaccgagcagagaatccagagcctgatcagcagcctgcagcacatggtgtacgagtacatctgcagatgcctgttcaaggccgaccagctgatgttcgccctgcacttcgtgagaggcatgcaccccgagctgttccaggagaacgagtgggacaccttcaccggcgtggtggtgggcgacatgctgagaaaggccgacagccagcagaagatcagagaccagctgcccagctggatcgaccaggagagaagctgggccgtggccaccctgaagatcgccctgcccagcctgtaccagaccctgtgcttcgaggacgccgccctgtggagaacctactacaacaacagcatgtgcgagcaggagttccccagcatcctggccaagaaggtgagcctgttccagcagatcctggtggtgcaggccctgagacccgacagactgcagagcgccatggccctgttcgcctgcaagaccctgggcctgaaggaggtgagccccctgcccctgaacctgaagagactgtacaaggagaccctggagatcgagcccatcctgatcatcatcagccccggcgccgaccccagccaggagctgcaggagctggccaacgccgagagaagcggcgagtgctaccaccaggtggccatgggccagggccaggccgacctggccatccagatgctgaaggagtgcgccagaaacggcgactggctgtgcctgaagaacctgcacctggtggtgagctggctgcccgtgctggagaaggagctgaacaccctgcagcccaaggacaccttcagactgtggctgaccgccgaggtgcaccccaacttcacccccatcctgctgcagagcagcctgaagatcacctacgagagcccccccggcctgaagaagaacctgatgagaacctacgagagctggacccccgagcagatcagcaagaaggacaacacccacagagcccacgccctgttcagcctggcctggttccacgccgcctgccaggagagaagaaactacatcccccagggctggaccaagttctacgagttcagcctgagcgacctgagagccggctacaacatcatcgacagactgttcgacggcgccaaggacgtgcagtgggagttcgtgcacggcctgctggagaacgccatctacggcggcagaatcgacaactacttcgacctgagagtgctgcagagctacctgaagcagttcttcaacagcagcgtgatcgacgtgttcaaccagagaaacaagaagagcatcttcccctacagcgtgagcctgccccagagctgcagcatcctggactacagagccgtgatcgagaagatccccgaggacgacaagcccagcttcttcggcctgcccgccaacatcgccagaagcagccagagaatgatcagcagccaggtgatcagccagctgagaatcctgggcagaagcatcaccgccggcagcaagttcgacagagagatctggagcaacgagctgagccccgtgctgaacctgtggaagaagctgaaccagaacagcaacctgatccaccagaaggtgcccccccccaacgacagacagggcagccccatcctgagcttcatcatcctggagcagttcaacgccatcagactggtgcagagcgtgcaccagagcctggccgccctgagcaaggtgatcagaggcaccaccctgctgagcagcgaggtgcagaagctggccagcgccctgctgaaccagaagtgccccctggcctggcagagcaagtgggagggccccgaggaccccctgcagtacctgagaggcctggtggccagagccctggccatccagaactgggtggacaaggccgagaagcaggccctgctgagcgagaccctggacctgagcgagctgttccaccccgacaccttcctgaacgccctgagacaggagaccgccagagccgtgggcagaagcgtggacagcctgaagttcgtggccagctggaagggcagactgcaggaggccaagctgcagatcaagatcagcggcctgctgctggagggctgcagcttcgacggcaaccagctgagcgagaaccagctggacagccccagcgtgagcagcgtgctgccctgcttcatgggctggatcccccaggacgcctgcggcccctacagccccgacgagtgcatcagcctgcccgtgtacaccagcgccgagagagacagagtggtgaccaacatcgacgtgccctgcggcggcaaccaggaccagtggatccagtgcggcgccgccctgttcctgaagaaccagtag

SEQ ID NO: 117365 - DNA, 13678 bp, Artificial Sequence
  derived and/or modified sequence
gactacccctggcaaccgcgaagctctgcggtcccgcggtcgggctacgggtttgagcaaagctcctctcttcccttcacttccctccggactggtttcttcttccttcccccttcccccaacttccctccaccccttccaatcatggcgaacgggactgcggacgttcggaagctcttcatcttcactactacccagaattacttcgggttgatgtctgaactctgggatcagccactgttgtgcaactgtcttgaaatcaacaacttcttggatgacggcaaccagatgctcctcagggtgcagcgatccgacgcaggaatctccttttccaacacgattgagtttggtgacacaaaagataaagtgctggtgtttttcaagctgcgacctgaagtaattactgatgagaatctacatgataacattcttgtttcatctatgttagagtcacctattagttctctttaccaagcagtacggcaagtattcgcaccaatgttgttaaaggatcaggaatggagcagaaactttgatcccaaacttcagaatcttttgagtgaactagaagctgggttgggtatagttctacgaagatcagacactaacttaacaaaattgaaatttaaggaagatgacacacgaggtatccttacaccaagcgatgagttccagttttggatagaacaagctcaccgtggaaataaacagattagtaaagaaagagccaattattttaaagaattatttgaaacaattgcaagagagttttataacttggacagtctatccttactagaagttgttgacttggtggagactactcaggatgttgtagatgatgtgtggagacaaacagaacatgatcattatcctgagtcacgaatgttgcatctcttagacatcataggtggttcatttggaaggtttgttcagaaaaagttgggaactttgaacctgtgggaagatccttattatcttgtgaaagaaagtctgaaagctggtatttcaatttgtgaacagtgggtgatagtctgtaatcatctaacaggtcaggtgtggcagcgctatgttcctcatccatggaaaaatgaaaaatattttccagaaacacttgacaaacttggcaaacgccttgaagaggtcttggctattagaacaattcatgagaagtttctctattttctacctgccagtgaagagaaaatcatatgcctcactcgagtatttgaaccttttactggcctgaatcctgtgcaatataatccatatactgagcccttgtggaaagctgcggtgtctcaatatgaaaagattattgcacctgcggaacaaaaaatagcaggaaaattgaaaaattatatttcagaaattcaagacagtccacagcagcttcttcaagcattcctgaaatataaagagttggtaaagcgtccaactataagcaaagaattgatgttagaaagagaaactttactggcaagacttgtggactcaattaaagattttcgattagactttgagaatcggtgccgaggaattcctggtgatgcatctggaccactttctggcaaaaatctttcagaagttgtcaacagtatagtttgggttcgccagttggaattgaaggtagatgatactatcaagattgcagaggctcttttatctgacttgccaggatttcgatgtttccatcaaagtgccaaagatctcttagaccagcttaaactatatgaacaggaacaatttgatgattggtccagggatattcaatcaggtttatctgattccagatctggtttgtgtattgaggctagtagtcgaattatggaattggattctaatgatggattactaaaagtgcattattcagatcgtttggtgattcttctgagagaagttcgtcagctctctgcacttggctttgttattcctgccaaaatacagcaagttgcaaacattgcacagaaattctgcaagcaagcaattattcttaaacaagtggcacatttttataattctattgatcaacaaatgattcaaagtcagaggccaatgatgttacaatctgccttagcatttgaacagataattaagaattcaaaagcaggaagtggagggaaatcacagataacttgggataatcctaaagaattagaaggctatatccaaaaactccaaaatgctgctgaacggcttgccactgaaaatagaaaactgagaaaatggcacactacattttgtgaaaaggtggttgttcttatgaatattgatctgcttcggcagcaacagcgctggaaagatggattacaagaattgagaactggcttagcaactgtagaagcacagggattccaagcaagtgacatgcatgcatggaaacaacactggaatcatcaactgtacaaagctctggagcatcagtaccagatgggcttagaagcacttaatgagaatttgccagaaataaatatagacttaacttacaaacagggacgattacaattcaggcccccttttgaagaaatccgggctaaatattatagagaaatgaagagattcatcggcattccaaatcagtttaagggagtgggtgaggcaggagatgaatctattttttctattatgattgatagaaatgcaagtggatttttgacgattttcagcaaagcagaagatctgtttagaagattgtcagctgttttacaccaacataaggaatggattgtaattgggcaagttgatatggaagctctggtggaaaagcatctttttactgtacatgattgggagaaaaattttaaagcattaaaaataaaggggaaagaagtagaacgacttccaagtgctgtcaaggtagattgtttaaatattaattgcaaccctgtgaagactgtgattgatgatctcatccagaagttatttgatctgcttgttctttctttgaagaagtccatacaggctcatttacatgaaattgatacatttgttactgaggctatggaagtcttaacaattatgccccagtctgtggaagaaattggtgatgcaaatctacaatatagtaagttacaagaacggaagccagagattttgcccttatttcaagaagctgaagacaaaaacagacttttacgaactgtggctggtggaggtttagaaacaattagtaatttgaaagccaagtgggataaatttgagttaatgatggaaagtcaccaacttatgattaaagaccagattgaagtgatgaaaggaaatgtgaaatcacgtcttcagatctattatcaagaactggaaaaatttaaagctcgttgggaccaactaaagcctggtgatgatgttattgaaactggccaacataatactcttgataaaagtgcaaagttaataaaagagaaaaaaattgagtttgatgatcttgaagtcacaagaaaaaagctggttgatgattgccatcattttagactggaagagcctaatttctccctggcaagtagtatctctaaagatatcgagagctgtgcccaaatttgggccttttatgaagagtttcaacaaggatttcaggaaatggccaatgaagactggatcacttttcggactaagacatacctgtttgaggaatttttgatgaactggcatgacagattaaggaaggttgaagaacattcagtgatgacagtgaaattacaatcagaggttgacaaatataaaatcgtaattcctatcttgaaatatgtgagaggggagcatctttctccagatcactggcttgacctttttcgtctccttggacttcctagggggactagtctagagaaactactgtttggtgatttgctcagagtagctgatacaattgtagccaaagctgccgaccttaaagatttaaatagtcgggcacaaggtgaagttacaatcagagaagctttacgtgaacttgatctttggggagttggagcagtgtttacattaattgattatgaagacagccaaagtcgaactatgaagctgattaaagactggaaagatatagtaaatcaggttggagataatagatgccttctccaatccttaaaggattctccttattataaaggatttgaagataaagtatcaatttgggaaagaaaacttgcagagttagatgaatacctgcagaatttaaatcatattcagagaaagtgggtgtatttggaacccattttcggccgtggagcattgccaaaagaacagacacgcttcaacagagttgatgaagattttagatcaataatgactgatatcaagaaagacaatagagtcacaacattaactactcatgctggaataagaaattctctactaacaatacttgatcagcttcaaagatgtcagaaatcattaaatgaatttttggaggaaaaacgctcagcattcccaagattttattttattggtgatgatgacttattagaaatattgggccagtctaccaacccatcagtgattcagtctcacctgaagaagctttttgctggtattaacagtgtttgctttgatgagaaatcaaaacatataactgcaatgaaatctttagagggagaagttgtaccttttaaaaataaagttcctctatcaaataatgtagagacatggttgaatgatttggccttagaaatgaagaaaactttggaacagttgttgaaggaatgtgttactactgggcgaagttctcaaggtgcagttgacccatctctgttcccttcacagattttatgcttggcggagcagattaaattcactgaagatgtagaaaatgctattaaagatcatagtcttcatcagattgaaacacaactggtgaataagttagagcaatatactaacattgatacaagttctgaggatccagggaatactgaatcgggcatcctggagcttaaacttaaagccctaattcttgacattatccataatattgatgtggtaaagcagttaaaccaaattcaggttcatacaactgaagactgggcttggaaaaaacaacttagattctatatgaaaagtgatcatacatgttgtgttcaaatggtggattctgaatttcagtatacttatgaatatcagggtaatgcttccaaactggtttatactccactgacagacaagtgctacttaactctcactcaagccatgaagatgggacttggaggaaatccttatggaccagctggaactgggaaaacggaatcagtaaaggctttaggtggacttcttggaagacaagttttagtctttaattgtgatgagggcatcgatgtgaagtcaatgggacgaatatttgttggtttggtgaagtgtggggcctggggttgttttgatgaatttaataggctggaagaatctgtactgtcagcagtttctatgcaaatccagacaattcaagatgctttgaagaatcatagaactgtatgtgaactgcttggcaaggaggtagaagtaaattctaattctggaatttttatcactatgaatcctgctggaaaaggttatggaggaagacaaaaactgcctgataatcttaaacagcttttcaggcccgtagctatgtctcatccagacaatgagcttattgcagaagttattctctattcggaaggctttaaagacgctaaagtattgagcagaaaattggtagctattttcaatctatctagggaacttttgacacctcagcaacattatgattggggtttgagagctttgaagacagttctgagaggaagtggaaatctccttagacagctaaacaaaagtggcactacacagaatgctaatgaaagtcatattgtggtacaagcactgaggcttaataccatgtcaaagtttacgtttactgattgcacccggtttgatgcactgataaaagatgtctttccgggaattgaattgaaagaagtggaatatgatgaactaagtgctgcattaaagcaggtctttgaagaggccaattatgaaattatacccaatcagatcaaaaaggctttagaattgtatgaacagttatgccagaggatgggagttgttattgttggtccaagtggtgctggaaaatcaacgctttggagaatgttaagggctgcgctttgtaaaactggcaaagtagtgaaacaatatactatgaatcccaaagctatgcctcgatatcaattattaggccatattgacatggacacaagagaatggtctgatggtgttttgacaaatagtgctcgtcaagtggttcgggaacctcaagatgtcagctcatggataatctgtgatggtgatattgaccctgaatggatagaatctctgaattctgttctggatgataatcgactgctgactatgcccagtggagaaaggattcagtttggcccaaatgttaactttgtatttgaaactcatgatttaagttgtgcatcaccagccacaatatctagaatgggaatgatctttcttagtgatgaagagacagatcttaattctctgataaaatcttggttgaggaatcagcctgctgaatatagaaataatcttgaaaattggattggagattattttgaaaaggctttacaatgggttctaaagcagaatgactatgtggtagaaacaagtttggttgggactgtgatgaatggtttgtcacatctacatggttgcagagatcatgacgaattcattattaatctcataaggggacttggtggaaatctgaatatgaagtcacgtttggaatttaccaaagaggtttttcattgggcacgagaatctcctccagactttcacaaacctatggatacctactatgactctactaggggtcgattagcaacatatgtgcttaagaagccagaagacttgactgctgatgatttcagtaacggcttaactcttccagtcattcagactcctgacatgcaacgaggtctagattatttcaaaccatggttaagttctgatactaaacagccctttattctggtaggaccagaaggatgtggcaaagggatgctgctcaggtacgcattttcacaactccggtccactcaaattgctacagttcactgtagtgcacaaaccacttctcgacatctcctgcagaaactgagccagacttgcatggtaatcagtactaatactggtcgtgtatacagaccaaaagactgtgaaagacttgttctgtacttaaaagatatcaacctacctaaacttgataaatgggggaccagtactttggtagcattcctacaacaggtattgacgtatcaaggattttatgatgaaaatttggaatgggttggtctagaaaatattcaaattgtggcttctatgtcagctggaggaagactgggaagacataaacttactaccagatttacttccatcgttcgtctttgttctatagattacccagaaagagagcagttacaaacgatttatggagcatatttggaaccagttctacataaaaatctgaagaatcattctatttggggttcttcatcaaaaatttatcttttagcaggatctatggtacaagtgtatgaacaggtgcgagccaaatttacagttgatgattatagtcactatttctttactccttgcattcttacccaatgggttcttggcttatttagatatgatttagaaggaggatcctcaaaccatccactagattatgtgttagaaattgtagcatatgaggcacggcgcttatttcgtgacaaaattgttggtgcaaaggaacttcatttatttgacatcattttaacatcagtgtttcaaggagattggggctcagacatattagacaatatgtcagatagtttctacgttacatggggagctcggcataattcaggagcaagggcagccccaggacaaccattacctccacatggaaaaccacttggaaaactaaactctactgatctcaaggatgttattaaaaagggtcttattcattatggacgagataaccagaatttagacattttacttttccacgaagtcttggagtatatgtctaggatagatagagtgctgagtttccctggaggttcacttctattagcaggacgcagtggtgtaggtcgtcggaccatcacttctttagtcagtcacatgcatggagcggtcctgttttctccaaagatttccagaggatatgaactgaagcagttcaaaaatgatctcaaacatgtgctgcaacttgcaggaattgaagcacaacaggtagttttacttcttgaggattaccagtttgtacatcctacatttttggagatgatcaatagccttttgtcttcaggtgaagttcctggactctatactcttgaagaattagagcccttgctgttaccacttaaggatcaagcttcacaagatggtttttttggaccagtcttcaattacttcacatatagaattcagcaaaacttgcatattgtcttgataatggattctgcaaattcaaacttcatgataaactgtgagagtaatccagctttgcataagaaatgccaggtgttgtggatggagggttggtccaatagcagtatgaagaaaatacctgaaatgttattcagtgaaacaggtggtggagaaaaatacaatgataaaaaacgaaaagaagaaaagaaaaaaaattcagttgatcctgattttctaaaatcatttttattaatccatgaatcttgtaaagcatatggtgctacaccaagccgatacatgacctttttacatgtgtattctgccattagtagtagcaagaaaaaggaattattaaaaagacaaagtcatttgcaggctggtgtatctaaactaaatgaagctaaagctcttgtggatgaactgaacagaaaagctggagaacaaagtgtgttacttaaaacgaagcaagatgaagcagatgctgcccttcaaatgatcacagtgtcaatgcaggatgctagtgagcaaaaaacagaacttgaaagactgaagcacagaatagcagaagaagttgttaaaattgaagaaagaaaaaataaaattgatgatgaattaaaagaagtacaacctttagtcaatgaagctaaactagcagttggaaacattaagcccgaatcactttcagaaattcgctcactacgcatgccacctgatgtaattagagatattcttgaaggagttttaaggttgatgggtatctttgatacatcttgggtgagcatgaaaagtttccttgcaaaaagaggtgtaagagaagacatagcaacctttgatgcccgaaatatttcaaaggaaataagagagagtgttgaagaacttctttttaaaaataaaggctcttttgatccaaagaatgctaagcgtgccagtactgcagctgcacctttggctgcctgggtgaaagccaatattcagtattcccatgtcttggaacgaattcatcctttggaaactgaacaggcaggattagaatcgaatctgaagaaaactgaagacagaaaaaggaaactagaggagcttcttaattctgttggtcaaaaggtatcagaactcaaagaaaaatttcagagcaggacttcagaagctgccaaacttgaggctgaagtaagcaaggcacaagaaacaatcaaagctgcagaagtcttaattaatcagcttgacagagaacataagagatggaatgcacaggttgtagagataacagaggaattagctactcttcctaaaagagctcaacttgctgctgcatttattacatatctttctgctgctcctgaatctctgagaaaaacctgtttggaagaatggaccaagtcagctggtcttgagaaatttgatctgaggagatttctttgtactgaaagtgagcagttaatttggaaaagtgaaggcctaccatcagatgacctttccatagaaaatgctcttgtaatattacagagtcgagtgtgcccatttcttatagatccttcttcccaagctacagagtggttaaaaacacatttgaaagactcacgtttagaagttatcaatcagcaggatagtaactttatcacagctcttgaattagcagtacgttttgggaaaacccttattatacaagagatggatggtgtagaacctgttctttatccattattgagacgagatctggttgctcaaggaccacgttatgtggtacaaataggtgacaaaattattgactacaatgaagaattccgcctctttttgtcaacaagaaacccaaatccttttattccaccggatgcagcttccattgttactgaggttaactttactacaacaagaagtggattacgagggcagcttttagctttaaccattcagcatgagaaacctgatttagaagaacagaaaacaaaactattacaacaggaagaagataagaaaatacagctagccaagctcgaagaatctcttctagagacacttgccacatctcaaggcaatattttggaaaataaggatttgattgagtctttgaatcagacaaaagcaagcagtgcacttattcaagagtcacttaaagaatcttacaaactccaaatttcccttgatcaagaacgggatgcctatctccccctggctgagagtgccagcaagatgtacttcattatttctgatttgtccaaaattaataacatgtaccgttttagtttggctgcttttctccgacttttccaacgagctctacaaaacaaacaggattctgaaaatacagaacagagaatccagtcacttatcagctcattacaacatatggtatatgaatatatatgtcgttgtctatttaaggctgatcagttgatgttcgctttgcattttgttcgaggcatgcatcctgaactttttcaagaaaatgaatgggatacgtttacaggtgtggttgttggagacatgttacggaaagctgactctcaacaaaaaatacgtgatcagcttccgtcttggatagatcaggaacgaagctgggccgtggcaacattaaagattgctctccccagtctttatcagaccctctgctttgaagatgcagctctgtggcgtacttattataataattcaatgtgtgagcaagagtttccatctatccttgcaaagaaagtttccttatttcagcagattcttgtagtacaggcgctaagaccggacagattgcaaagtgccatggctctttttgcatgtaaaactctgggactgaaagaggtgtccccactgcctctaaatctcaaacgtttatacaaagagacactggaaattgaacccatcttgataattatttctccgggtgctgatccttctcaggaacttcaagaactagctaatgctgaaagaagcggagagtgttatcaccaggttgccatgggtcaaggtcaagctgatttagcaattcaaatgctaaaagaatgtgcccgcaatggagactggctctgtttgaagaacttacatcttgtggtatcttggctgccagttctggaaaaggaattgaatactcttcaacctaaagatacctttcgtctttggctcactgcagaagttcatcccaactttactcctattttactacagtcaagtctgaagataacatatgagtcacctccaggtttaaagaagaatttaatgcgtacttatgagtcttggactcctgagcaaattagcaaaaaagataatacacatcgagctcatgctctcttcagtcttgcatggtttcatgctgcatgtcaagaaagaagaaactatattcctcagggttggacaaagttttatgaattttctttatcagatcttcgggctgggtacaacattattgacagactttttgatggtgccaaagatgtacaatgggaatttgtacatggtttacttgaaaatgctatttatggaggacgtatagacaactattttgaccttagagttcttcagtcatacctgaagcagttttttaattcttcagttattgatgtattcaaccaaaggaacaagaaaagcatttttccatattccgtatctctaccacaatcctgcagcattttggactatcgtgctgtcattgagaaaattccagaggacgacaaacctagtttctttggtctgcctgccaatatcgctcgctcatctcagcgcatgatcagttctcaggttatttcacagttgaggattttgggcagatccataacagctggttccaaatttgatagagaaatctggtctaatgaactttctcctgtcctcaatctctggaagaaactaaaccagaattcaaacctaatacatcagaaagtgcctcctcctaacgatcgacaaggatctccaatactgtcattcatcattcttgaacaatttaatgctattcgtttagtacaaagtgtccaccagtctcttgctgctctcagcaaagtcatcagaggaactactttactgagttcagaagtacaaaaattggcaagtgctttattaaaccaaaagtgtcctctcgcatggcagagcaagtgggaaggcccagaagatcccttacaatacctgagaggtcttgttgcccgtgcccttgcaatacagaactgggtagataaagctgaaaaacaggctcttctctctgaaacacttgacctatcagaacttttccatccagacacatttcttaatgctcttcgccaggaaactgcaagggcagtgggtcgttctgtggatagccttaaatttgtagcctcatggaaaggtcgactgcaagaagcaaagctacaaattaagatcagtggcttgttactagaaggatgtagttttgatggaaatcaactttctgaaaatcagcttgattctcccagcgtgtcatcagtgctcccttgttttatgggctggattccacaggatgcatgtggtccatattctccggatgagtgcatctctttgcctgtttacacaagtgctgaaagggatcgtgtggttaccaatattgatgttccatgtgggggcaaccaagaccagtggattcagtgtggagcagctctattcctaaaaaatcagtagaatctaatgacaacaaaagccatcttcacaaaagggaacattgattctttaagctttaaatcaaacatgtggtcagtctacatttgaaatgttagttcaaaatattaacatatagttatgttgttgatgtcactgaaattttaatgtgtaaaagcagcactgtgcatcttttaaagtaataaattaatggagttattgttaaaacagagtattcttttgacaacattaaatatttctgtgagaaagttcacttttccagtggctcaaaaatttgttttaggtcagagattttaagtggtatattaaccaataataaatattttggctgtcatttgtgtcataattatttaataaaagagcattcataatttttgcagtcttcccatgactctttttacatactgaagaatgtattataaagttataatgaatgtataaaagtatcaacatgaatataattatactatgctaattataatatacaaatatataattattgtcataattatatacttataactaatatcttaaggtaattcaaataggaataattcaggtgacataataatggaggataaattctggttattaaacattcagcttttttgtg

SEQ ID NO: 117366 - protein, 638 aa, Artificial Sequence
  derived and/or modified sequence
MSDKSELKAELERKKQRLAQIREEKKRKEEERKKKETDQKKEAVAPVQEESDLEKKRREAEALLQSMGLTPESPIVFSEYWVPPPMSPSSKSVSTPSEAGSQDSGDGAVGSRTLHWDTDPSVLQLHSDSDLGRGPIKLGMAKITQVDFPPREIVTYTKETQTPVMAQPKEDEEEDDDVVAPKPPIEPEEEKTLKKDEENDSKAPPHELTEEEKQQILHSEEFLSFFDHSTRIVERALSEQINIFFDYSGRDLEDKEGEIQAGAKLSLNRQFFDERWSKHRVVSCLDWSSQYPELLVASYNNNEDAPHEPDGVALVWNMKYKKTTPEYVFHCQSAVMSATFAKFHPNLVVGGTYSGQIVLWDNRSNKRTPVQRTPLSAAAHTHPVYCVNVVGTQNAHNLISISTDGKICSWSLDMLSHPQDSMELVHKQSKAVAVTSMSFPVGDVNNFVVGSEEGSVYTACRHGSKAGISEMFEGHQGPITGIHCHAAVGAVDFSHLFVTSSFDWTVKLWTTKNNKPLYSFEDNADYVYDVMWSPTHPALFACVDGMGRLDLWNLNNDTEVPTASISVEGNPALNRVRWTHSGREIAVGDSEGQIVIYDVGEQIAVPRNDEWARFGRTLAEINANRADAEEEAATRIPA

SEQ ID NO: 117367 - protein, 637 aa, Artificial Sequence
  derived and/or modified sequence
MSDKSELKAELERKKQRLAQIREEKKRKEEERKKKETDQKKEAVAPVQEESDLEKKRREAEALLQSMGLTPESPIVFSEYWVPPPMSPSSKSVSTPSEAGSQDSGDGAVGSRTLHWDTDPSVLQLHSDSDLGRGPIKLGMAKITQVDFPPREIVTYTKETQTPVMAQPKEDEEEDDDVVAPKPPIEPEEEKTLKKDEENDSKAPPHELTEEEKQQILHSEEFLSFFDHSTRIVERALSEQINIFFDYSGRDLEDKEGEIQAGAKLSLNRQFFDERWSKHRVVSCLDWSSQYPELLVASYNNNEDAPHEPDGVALVWNMKYKKTTPEYVFHCQSAVMSATFAKFHPNLVVGGTYSGQIVLWDNRSNKRTPVQRTPLSAAAHTHPVYCVNVVGTQNAHNLISISTDGKICSWSLDMLSHPQDSMELVHKQSKAVAVTSMSFPVGDVNNFVVGSEEGSVYTACRHGSKAGISEMFEGHQGPITGIHCHAAVGAVDFSHLFVTSSFDWTVKLWTTKNNKPLYSFEDNADYVYDVMWSPTHPALFACVDGMGRLDLWNLNNDTEVPTASISVEGNPALNRVRWTHSGREIAVGDSEGQIVIYDVGEIAVPRNDEWARFGRTLAEINANRADAEEEAATRIPA

SEQ ID NO: 117368 - protein, 638 aa, Artificial Sequence
  derived and/or modified sequence
MSDKSELKAELERKKQRLAQIREEKKRKEEERKKKETDQKKEAVAPVQEESDLEKKRREAEALLQSMGLTPESPIDIAEYLVPPPMSPSSKSVSTPSEAGSQDSGDGAVGSRTLHWDTDPSVLQLHSDSDLGRGPIKLGMAKITQVDFPPREIVTYTKETQTPVMAQPKEDEEEDDDVVAPKPPIEPEEEKTLKKDEENDSKAPPHELTEEEKQQILHSEEFLSFFDHSTRIVERALSEQINIFFDYSGRDLEDKEGEIQAGAKLSLNRQFFDERWSKHRVVSCLDWSSQYPELLVASYNNNEDAPHEPDGVALVWNMKYKKTTPEYVFHCQSAVMSATFAKFHPNLVVGGTYSGQIVLWDNRSNKRTPVQRTPLSAAAHTHPVYCVNVVGTQNAHNLISISTDGKICSWSLDMLSHPQDSMELVHKQSKAVAVTSMSFPVGDVNNFVVGSEEGSVYTACRHGSKAGISEMFEGHQGPITGIHCHAAVGAVDFSHLFVTSSFDWTVKLWTTKNNKPLYSFEDNADYVYDVMWSPTHPALFACVDGMGRLDLWNLNNDTEVPTASISVEGNPALNRVRWTHSGREIAVGDSEGQIVIYDVGEQIAVPRNDEWARFGRTLAEINANRADAEEEAATRIPA

SEQ ID NO: 117369 - DNA, 1917 bp, Artificial Sequence
  derived and/or modified sequence
atgagcgataagtccgagttaaaggctgagctagagaggaagaagcaaaggttggctcagatccgagaggaaaagaagcgaaaagaggaggaaagaaagaaaaaggagaccgaccagaagaaggaggcggtggcccctgttcaggaggaaagtgacctggaaaagaaaagaagagaagccgaagcacttctccaatcaatgggcctgactccagagagtcccatcgtgttcagcgaatactgggtgcccccacctatgtcccccagctcaaaaagcgtgtcgaccccatccgaggctggcagtcaagattcaggtgatggggctgtcgggtcaagaaccctccactgggatactgatccctcagtgcttcagctacactcagattccgatcttggaaggggcccaataaagctgggcatggccaagatcacacaagtggacttcccacccagggagattgtgacctatacaaaagagacacagacccctgtcatggcccagcccaaagaagatgaagaggaggatgacgacgtggtcgcccccaagccgcctatcgaacctgaagaggaaaaaaccctgaagaaggacgaagagaacgacagtaaagcacccccacatgagctgactgaggaggagaaacagcaaatcctgcatagcgaggaattcttgtcctttttcgaccattccacacgaatcgtggaaagggcgttgtctgagcaaatcaatatattctttgattatagtggtagagatctggaggacaaagagggcgagattcaggctggggcaaaactcagcctgaacaggcaattcttcgacgaacgatggagcaagcatcgcgtggtgagttgcctcgattggagttcacaataccctgaactgcttgtcgcgtcatacaataataatgaggacgcaccccatgagccggacggggtcgctctggtctggaacatgaaatacaagaagaccactcccgaatatgtcttccattgtcagtccgccgtaatgagtgctacttttgccaaatttcacccgaatctagtggtcgggggcacttatagtgggcaaatcgtgctttgggacaaccggtcaaataagaggacaccggttcagagaacaccactctcggccgccgctcatacacatcctgtctactgcgtgaatgtggtaggcacacaaaacgctcataatttgatttctatttcaactgacgggaagatctgttcctggtctctcgacatgctgtcccaccctcaagactctatggaactggtgcataaacagagtaaagccgtggctgtaacctcaatgtctttccccgtcggcgacgtaaataattttgttgttggcagcgaagaaggaagtgtctacacagcttgtaggcacggaagtaaagcagggatctccgaaatgttcgaagggcaccagggccctatcacaggcattcattgccatgccgccgtgggcgccgtggactttagccatttattcgtcacgtcttcctttgactggacagtaaagctgtggacgaccaagaacaataagccactatactcatttgaagataacgcagactatgtttacgacgtgatgtggagccccacacatcccgcactctttgcctgcgtagacggtatgggtaggctggatttatggaacttgaacaacgacactgaagtcccaaccgcctcaatatcagtggaaggcaatcctgctctgaaccgcgtccggtggacacactccggtcgcgaaattgccgtgggcgactcggaggggcaaatcgtaatctacgatgtgggtgagcaaattgctgtgcctcggaatgatgaatgggcacggttcggaaggaccctggcagagattaacgctaacagagctgatgcagaagaggaggctgccacacgaatcccagcctag

SEQ ID NO: 117370 - DNA, 1914 bp, Artificial Sequence
  derived and/or modified sequence
atgtccgataaatcagaactcaaagctgaactggagcgtaagaaacaaaggctggctcagataagggaagagaagaagaggaaggaggaagagcggaagaagaaggaaaccgaccaaaaaaaagaagctgtggctccggtgcaagaggaatcagatctagagaaaaagaggagggaggccgaggcactgctgcagagcatgggcctgactcctgagagccctatagtgttctccgagtactgggtgccaccacccatgagcccttcgtccaagagcgtgtctacgcccagcgaggctgggtcacaggactcaggggacggggccgtgggatcacggacacttcattgggacacagacccttcagtcttgcagctccattctgattcggacttaggtaggggacctatcaagctggggatggcgaagattacacaggtggatttccctcccagagagatagtcacatatactaaagagacacagacgcctgtcatggcccagccaaaggaggatgaggaggaagatgatgacgtagtggcgcctaagcccccaatcgagcctgaggaggagaagactttgaagaaagacgaggaaaacgacagtaaggcgccacctcatgagctgaccgaggaggagaagcagcaaatccttcactcagaggaatttctgtcattcttcgatcactctactagaatcgtagagagagccctgagtgaacagatcaacatcttcttcgattattcagggcgcgatctcgaagataaagagggagaaatccaggccggcgccaagctgagtctgaaccgccagttttttgatgagagatggtccaaacacagagtggtgagctgcctggactggagtagccagtaccccgagctgttggttgcgtcgtacaacaataacgaggacgccccacatgagcccgatggagtggctctcgtctggaatatgaagtacaaaaagactacccccgagtacgtattccattgccagagcgccgtgatgagtgccactttcgcgaaattccaccccaatcttgtggtcggcggaacctactcaggacagattgtcttgtgggataaccgttcaaataaacgcacgcccgtccagagaacccctttaagtgccgctgctcacacacacccagtgtactgtgtgaatgttgtgggcacacagaatgcacataacctcatctccatctccacagacggaaagatttgttcttggtcgttggacatgctatcgcaccctcaggactccatggagctcgtgcacaaacaaagcaaggctgtcgcggtgactagtatgtcttttcccgtgggcgacgtgaacaatttcgtagtgggctccgaggagggaagtgtgtacaccgcctgcaggcacgggtctaaggcaggaatttctgagatgttcgagggacaccaggggcccatcacagggatccactgtcacgcagccgtcggggctgtggatttttcccatctgttcgtgaccagcagcttcgattggacagtaaaactttggacgacgaagaataataagcccttatattcattcgaagataacgccgattacgtgtacgatgtcatgtggagccccactcaccctgctcttttcgcttgcgttgatggcatgggtcggctggatctctggaaccttaacaatgacacggaagtgcctactgcaagtatttcagtggaaggcaatcccgcattgaatcgtgttcggtggacacattcagggagggagatcgcagtgggggatagtgagggtcagattgtaatctatgacgtgggtgaaatcgccgtgcctcgtaacgacgagtgggctaggtttggtagaaccctcgcagaaatcaatgctaatagggccgacgccgaggaggaggcagccactcgcatccctgcctag

SEQ ID NO: 117371 - DNA, 1917 bp, Artificial Sequence
  derived and/or modified sequence
atgagcgacaagtccgagctgaaggctgagttggagcgcaaaaagcagaggctggcccaaatcagggaagaaaaaaagcggaaggaggaggagcggaaaaaaaaagaaaccgaccagaaaaaggaggctgtggcacctgtgcaagaggaatccgacctggaaaagaagcggagggaggcggaagccctgctccagagtatgggactgacaccggagtcgcctattgtgttcagcgagtactgggtgccgcctcctatgtcaccgtcgagcaaatccgtttcgaccccaagcgaggcagggtcccaggacagcggcgacggcgcggttggttccagaaccttgcactgggatacagacccatctgttttacaactccattccgattctgatctgggccgcggccccatcaaactgggaatggctaaaattacacaagtggacttcccccctcgtgaaatcgtcacctacaccaaggaaacccagacccctgtcatggcacagcccaaagaggatgaggaagaggacgacgatgtggtggcacctaagccccctatcgagccagaggaagaaaaaacactcaagaaggatgaggaaaacgattctaaggctcctccacacgagctgacagaggaggagaagcaacaaattctgcactctgaggaattcctgagtttttttgatcactctactcgaatcgtagagagggcgctgagtgagcaaattaacatcttttttgactattcaggcagagacctggaggacaaagagggggagattcaagcaggagctaagctctccctgaaccgccagttcttcgacgagaggtggtccaagcatagggtcgtttcttgtctcgactggtcatctcagtatcctgagctcctggttgcatcttacaacaacaacgaggatgctcctcacgaacccgatggcgtggctctagtctggaatatgaagtataagaaaacaacgccagaatatgtgttccattgtcagtccgctgttatgagcgccacttttgctaagttccaccccaaccttgtcgttggagggacatattctggccagatcgtcctctgggataataggtccaacaagcgtactcccgtgcagcgcacccccttatcagcagctgcccatacacaccccgtgtactgcgtgaacgtagtggggacgcagaacgcacataatctcatctctatatccacagatggtaaaatctgttcatggtcgctggatatgctcagtcacccccaggactctatggagctcgtgcacaagcagagcaaggctgtggctgttacttcaatgagcttccccgtcggagatgtgaataactttgttgtggggagtgaggaaggatccgtgtatacagcctgcaggcacgggtccaaggcaggcatttccgagatgttcgaaggccaccaggggcccatcactgggatccactgtcacgcggcagtcggggccgtggacttctcacacctctttgtcacttcctcctttgactggacagttaagttatggacaacaaaaaataataaacctttatattcatttgaagacaatgctgattatgtttatgatgtgatgtggtcccccacccatcccgccctgttcgcatgcgtcgacggaatgggacggctggatctgtggaaccttaataacgacacagaggtaccaaccgcctccatatcagttgaaggtaaccccgcgttaaaccgcgtgcggtggacccactcaggccgcgagatcgctgttggagacagtgaaggccagatcgtcatctatgacgtgggagagcagatcgcggtgcctcggaacgacgagtgggcccggtttggacgcaccctcgccgaaattaacgcgaatcgtgcagacgctgaagaggaagcagcgaccagaattcccgcatag

SEQ ID NO: 117372 - DNA, 1917 bp, Artificial Sequence
  derived and/or modified sequence
atgtctgacaaatctgaattaaaagccgagctggaacggaagaaacagcggttggcacaaatacgggaagagaagaaaagaaaagaggaggaaagaaaaaaaaaagagactgaccaaaagaaggaggctgtagctcccgtccaggaggaatcagatctggaaaagaagcggagggaagcagaagcattactacagagcatgggactgacacccgagtcaccaatcgacatcgccgaataccttgttcctcctccaatgagcccgtcctctaagtcagtcagcacccccagcgaggcaggttcacaggacagcggagatggggccgtaggatccaggactctccactgggatacagaccctagcgttctacagttacacagcgacagtgatctagggaggggcccgattaaactggggatggcaaaaatcacacaggttgacttcccacctagggagatcgtgacttacacaaaagagacgcagacaccagttatggcgcagccaaaggaggacgaagaagaagatgatgacgtcgtggcaccgaagcccccgatagaacctgaagaggaaaaaacgctcaaaaaggatgaagaaaatgactcgaaggctccaccgcatgaactcacagaggaagaaaagcagcagatccttcatagcgaggaattcctatccttttttgaccatagcactagaatagtggagcgtgctctcagtgagcagatcaatattttctttgactattccggcagggacctggaagataaggagggtgaaatacaagccggggctaagttgtctctgaatcggcagtttttcgatgagagatggtccaagcatcgggtggtgtcatgcttggattggtcctcacagtaccccgaactcctggtggcttcttacaacaataacgaggatgctcctcatgaaccagatggagtagccttggtttggaatatgaagtataagaagacgactcctgaatacgtcttccactgtcagagcgccgtgatgagcgcgacatttgccaagttccaccccaacctcgttgtcggggggacatattccggccagatcgtattgtgggacaaccggtccaacaagaggacccctgtccaaagaacacctctgagcgccgcagctcatactcatcccgtctattgtgtcaatgtagttggaactcaaaatgctcacaatctgattagcatttctacagacggcaaaatctgcagctggagcctggacatgctttcccatccgcaagattcaatggagctggtacacaagcagagcaaggccgtggccgtaacgagcatgtcctttccagttggagacgtgaacaattttgtggtaggcagtgaggaaggttccgtttatacagcatgtcgacatggttcgaaagctgggatatccgaaatgtttgagggacaccagggccctatcactggtatccattgtcacgcagctgtgggtgccgtcgatttttcacacctgttcgttacatcctctttcgactggacagtgaagttatggacgacaaaaaacaataaacctttgtacagctttgaggacaatgctgactacgtgtacgacgttatgtggtctcccacacatcccgccctttttgcatgtgtagacggaatgggacggctggacctttggaaccttaataacgatactgaagtcccgacagccagtatatccgtggaagggaaccccgccctgaaccgcgtacggtggacacatagcggacgtgaaatagctgtgggcgattccgagggacaaatagtcatatacgatgtgggagagcagatcgccgtcccacgcaatgatgagtgggctaggtttggacggaccctcgctgagatcaacgctaacagagcagacgctgaagaggaggctgccacgcgcattcctgcgtag

SEQ ID NO: 117373 - DNA, 1917 bp, Artificial Sequence
  derived and/or modified sequence
atgtctgacaagtctgagctgaaggccgagctggagaggaagaagcagaggctggcccagatccgggaggagaagaagaggaaggaggaggagaggaagaagaaggagacagaccagaagaaggaggccgtggcccctgtgcaggaggagagtgacctggagaagaagagaagagaggccgaggccctgctgcagagcatgggcctgaccccagagagccccatcgtgttcagcgagtactgggtgcccccacccatgagccccagcagcaagtctgtgtccaccccatctgaggccggcagccaggacagcggagatggagctgtgggcagcaggaccctgcactgggacacagaccccagcgtgctgcagctgcacagcgacagcgacctgggccggggccccatcaagctgggcatggccaagatcacccaggtggacttccccccccgggagatcgtgacctacaccaaggagacccagacccctgtgatggcccagcccaaggaggatgaggaggaggatgatgatgtggtggcccccaagccacccatcgagcctgaggaggagaagaccctgaagaaggatgaggagaatgacagcaaggcccctcctcatgagctgacagaggaggagaagcagcagatcctgcacagcgaggagttcctgtccttctttgaccacagcacccgcatcgtggagcgggccctgtctgagcagatcaacatcttctttgactacagcggccgggacctggaggacaaggagggggagatccaggccggggccaagctgagcctgaaccggcagttctttgatgagcgctggagcaagcaccgggtggtgtcctgcctggactggagcagccagtacccagagctgctggtggccagctacaacaacaatgaagatgcccctcatgagccagatggagtggccctggtgtggaacatgaagtacaagaagaccaccccagaatatgtgttccactgccagagcgctgtgatgtctgccacctttgccaagttccaccccaacctggtggtgggcggcacctacagcggccagatcgtgctgtgggacaacagaagcaacaagaggacccctgtgcagaggacccccctgtctgctgctgcccacacccaccctgtgtactgtgtgaatgtggtgggcacccagaatgcccacaacctgatcagcatcagcacagatggcaagatctgctcctggagcctggacatgctgagccacccccaggacagcatggagctggtgcacaagcagagcaaggctgtggccgtgacctccatgtccttccctgtgggagatgtgaacaactttgtggtgggcagcgaggagggctctgtgtacacagcctgccgccacggcagcaaggccggcatcagcgagatgtttgagggccaccagggccccatcaccggcatccactgccacgccgctgtgggcgctgtggacttcagccacctgtttgtgaccagcagctttgactggacagtgaagctgtggaccaccaagaacaacaagcccctgtacagctttgaagataatgctgactatgtgtatgatgtgatgtggagccccacccacccagccctgtttgcctgtgtggatggcatgggccgcctggacctgtggaacctgaacaatgacacagaggtgcccacagccagcatctctgtggagggcaacccagccctgaacagagtgcgctggacccacagcggccgggagattgctgtgggggacagcgagggccagatcgtcatctatgatgtgggggagcagattgctgtgcccagaaatgatgagtgggcccgcttcggccgcaccctggccgagatcaatgccaacagagcagatgctgaggaggaggccgccacccgcatcccagcctag

SEQ ID NO: 117374 - DNA, 1914 bp, Artificial Sequence
  derived and/or modified sequence
atgtctgacaagtctgagctgaaggccgagctggagaggaagaagcagaggctggcccagatccgggaggagaagaagaggaaggaggaggagaggaagaagaaggagacagaccagaagaaggaggccgtggcccctgtgcaggaggagagtgacctggagaagaagagaagagaggccgaggccctgctgcagagcatgggcctgaccccagagagccccatcgtgttcagcgagtactgggtgcccccacccatgagccccagcagcaagtctgtgtccaccccatctgaggccggcagccaggacagcggagatggagctgtgggcagcaggaccctgcactgggacacagaccccagcgtgctgcagctgcacagcgacagcgacctgggccggggccccatcaagctgggcatggccaagatcacccaggtggacttccccccccgggagatcgtgacctacaccaaggagacccagacccctgtgatggcccagcccaaggaggatgaggaggaggatgatgatgtggtggcccccaagccacccatcgagcctgaggaggagaagaccctgaagaaggatgaggagaatgacagcaaggcccctcctcatgagctgacagaggaggagaagcagcagatcctgcacagcgaggagttcctgtccttctttgaccacagcacccgcatcgtggagcgggccctgtctgagcagatcaacatcttctttgactacagcggccgggacctggaggacaaggagggggagatccaggccggggccaagctgagcctgaaccggcagttctttgatgagcgctggagcaagcaccgggtggtgtcctgcctggactggagcagccagtacccagagctgctggtggccagctacaacaacaatgaagatgcccctcatgagccagatggagtggccctggtgtggaacatgaagtacaagaagaccaccccagaatatgtgttccactgccagagcgctgtgatgtctgccacctttgccaagttccaccccaacctggtggtgggcggcacctacagcggccagatcgtgctgtgggacaacagaagcaacaagaggacccctgtgcagaggacccccctgtctgctgctgcccacacccaccctgtgtactgtgtgaatgtggtgggcacccagaatgcccacaacctgatcagcatcagcacagatggcaagatctgctcctggagcctggacatgctgagccacccccaggacagcatggagctggtgcacaagcagagcaaggctgtggccgtgacctccatgtccttccctgtgggagatgtgaacaactttgtggtgggcagcgaggagggctctgtgtacacagcctgccgccacggcagcaaggccggcatcagcgagatgtttgagggccaccagggccccatcaccggcatccactgccacgccgctgtgggcgctgtggacttcagccacctgtttgtgaccagcagctttgactggacagtgaagctgtggaccaccaagaacaacaagcccctgtacagctttgaagataatgctgactatgtgtatgatgtgatgtggagccccacccacccagccctgtttgcctgtgtggatggcatgggccgcctggacctgtggaacctgaacaatgacacagaggtgcccacagccagcatctctgtggagggcaacccagccctgaacagagtgcgctggacccacagcggccgggagattgctgtgggggacagcgagggccagatcgtcatctatgatgtgggggagattgctgtgcccagaaatgatgagtgggccaggtttggaagaaccctggccgagatcaatgccaacagagcagatgctgaggaggaggccgccacccgcatcccagcctag

SEQ ID NO: 117375 - DNA, 1917 bp, Artificial Sequence
  derived and/or modified sequence
atgtctgacaagtctgagctgaaggccgagctggagaggaagaagcagaggctggcccagatccgggaggagaagaagaggaaggaggaggagaggaagaagaaggagacagaccagaagaaggaggccgtggcccctgtgcaggaggagagtgacctggagaagaagagaagagaggccgaggccctgctgcagagcatgggcctgaccccagagagccccattgatattgctgagtacctggtgcccccacccatgagccccagcagcaagtctgtgtccaccccatctgaggccggcagccaggacagcggagatggagctgtgggcagcaggaccctgcactgggacacagaccccagcgtgctgcagctgcacagcgacagcgacctgggccggggccccatcaagctgggcatggccaagatcacccaggtggacttccccccccgggagatcgtgacctacaccaaggagacccagacccctgtgatggcccagcccaaggaggatgaggaggaggatgatgatgtggtggcccccaagccacccatcgagcctgaggaggagaagaccctgaagaaggatgaggagaatgacagcaaggcccctcctcatgagctgacagaggaggagaagcagcagatcctgcacagcgaggagttcctgtccttctttgaccacagcacccgcatcgtggagcgggccctgtctgagcagatcaacatcttctttgactacagcggccgggacctggaggacaaggagggggagatccaggccggggccaagctgagcctgaaccggcagttctttgatgagcgctggagcaagcaccgggtggtgtcctgcctggactggagcagccagtacccagagctgctggtggccagctacaacaacaatgaagatgcccctcatgagccagatggagtggccctggtgtggaacatgaagtacaagaagaccaccccagaatatgtgttccactgccagagcgctgtgatgtctgccacctttgccaagttccaccccaacctggtggtgggcggcacctacagcggccagatcgtgctgtgggacaacagaagcaacaagaggacccctgtgcagaggacccccctgtctgctgctgcccacacccaccctgtgtactgtgtgaatgtggtgggcacccagaatgcccacaacctgatcagcatcagcacagatggcaagatctgctcctggagcctggacatgctgagccacccccaggacagcatggagctggtgcacaagcagagcaaggctgtggccgtgacctccatgtccttccctgtgggagatgtgaacaactttgtggtgggcagcgaggagggctctgtgtacacagcctgccgccacggcagcaaggccggcatcagcgagatgtttgagggccaccagggccccatcaccggcatccactgccacgccgctgtgggcgctgtggacttcagccacctgtttgtgaccagcagctttgactggacagtgaagctgtggaccaccaagaacaacaagcccctgtacagctttgaagataatgctgactatgtgtatgatgtgatgtggagccccacccacccagccctgtttgcctgtgtggatggcatgggccgcctggacctgtggaacctgaacaatgacacagaggtgcccacagccagcatctctgtggagggcaacccagccctgaacagagtgcgctggacccacagcggccgggagattgctgtgggggacagcgagggccagatcgtcatctatgatgtgggggagcagattgctgtgcccagaaatgatgagtgggcccgcttcggccgcaccctggccgagatcaatgccaacagagcagatgctgaggaggaggccgccacccgcatcccagcctag

SEQ ID NO: 117376 - DNA, 1917 bp, Artificial Sequence
  derived and/or modified sequence
atgagcgacaagagcgagctgaaggccgagctggagcggaagaagcaacgattagctcagattcgggaagagaagaagaggaaggaggaagagaggaaaaaaaaggagacagaccagaaaaaagaggctgtagccccagttcaggaagagagtgatctggagaagaaaagacgagaagccgaggcactgctgcagtctatgggcctgaccccggaaagcccaatagtcttttcagaatactgggtaccacctccaatgtctcccagtagtaagtctgtgagcacaccttctgaagccggttcccaggattctggtgacggagccgttggatcaagaacattgcactgggacaccgatcctagcgtcttgcaactgcattcagattccgaccttggtcggggccctattaaactcggcatggccaaaatcacccaagttgactttccacctagagagattgtcacttatacgaaagagacacagactccggtcatggcccagcccaaagaagatgaggaggaggatgacgacgtggtggctcccaaaccacccatcgaaccagaagaagagaagaccctgaagaaagatgaggagaacgattctaaggccccaccccatgagcttacagaagaggaaaaacaacaaattttgcatagtgaggagttcctgtctttcttcgatcattctacaagaatcgtcgaacgtgccctctccgaacagattaacatcttttttgattactccggcagagatctggaagacaaggagggtgaaatccaggcaggagccaagctgtcccttaatcgacaattttttgatgagcgatggtctaaacatagagtagtgtcctgcctggattggtcttcccagtaccctgagctactagtggcctcctacaataacaacgaggatgccccgcacgagcctgatggcgtcgcactagtgtggaacatgaagtataagaaaaccacaccggaatacgtgtttcactgccagtccgcagtgatgtcggccacatttgctaagttccatcctaacctggtcgtgggcggtacgtactccggccagatcgttctgtgggataatcgctcaaacaaacggacccctgtgcagcgaactccgctgtcagctgctgcgcacactcacccagtctactgtgtcaacgttgttggcacccagaacgcacataacctgatatctatttcgactgatggtaaaatatgctcttggtccctggatatgttatcacaccctcaagacagtatggagctggttcacaaacagtcaaaggctgtggccgtcacatcaatgtcgttccccgtgggggacgtgaataattttgtcgtggggtccgaagaaggttctgtgtacactgcttgtagacacggaagtaaagccggaatcagtgagatgtttgaaggccaccaaggacctatcacaggcatccactgccatgcagccgtcggagctgtggacttcagtcacctgtttgtgacctcaagcttcgattggaccgtgaagctgtggactaccaaaaataataagcccttatacagttttgaagataatgctgactacgtatatgacgttatgtggagccctacccaccccgcactttttgcctgtgtggacgggatgggcagactggacctgtggaatctgaacaatgacacagaagtacctaccgcatccatatcagttgagggcaaccccgcccttaaccgtgtcaggtggacacatagcggccgagagattgcagtgggagactcagaggggcaaatcgtgatctatgatgttggggagcagatcgccgtccccaggaacgatgagtgggcccgctttgggcgcactctggccgagatcaacgccaaccgggccgacgccgaagaggaggctgccacaaggatccccgcttag

SEQ ID NO: 117377 - DNA, 1914 bp, Artificial Sequence
  derived and/or modified sequence
atgagcgacaagagcgagctgaaggccgagctggagcggaagaagcagaggctggctcagatccgcgaggaaaaaaagcgaaaggaagaagagaggaaaaaaaaggagacagatcaaaaaaaagaagcggttgcccctgtccaggaggaaagcgatctcgagaagaaacggcgggaggccgaggcactgctacagtcaatggggctgacccccgagtcacccatcgttttctccgaatactgggttcccccccctatgagtcctagctcaaagtccgtctccacaccatcagaggccggatcccaggacagcggcgacggggcagtgggctcgcggactctccactgggataccgatccctctgtcctgcaactacacagtgattccgacttgggccgaggaccaataaagcttggaatggccaaaatcacccaggtggactttccacccagggagatagtgacatacacaaaagagacccagacgcccgtaatggctcagcccaaggaggatgaagaggaggatgatgatgtagttgcccctaagccgcccatcgagccggaggaagagaaaaccctcaaaaaagacgaagaaaatgatagcaaagcccccccgcacgagcttactgaggaagaaaagcagcaaatcctacattccgaggagttcctgagctttttcgaccatagcacaagaatcgttgagagagcactctcagaacagataaacattttcttcgactactcgggccgcgatctggaggacaaagagggggagattcaagctggagcaaaactgagcctgaatcgccagtttttcgatgaacgttggagcaaacaccgcgttgtctcatgcctcgactggagctctcaataccccgaactgttggttgccagctataacaacaatgaagatgctccccacgagcccgatggcgtcgccttagtatggaacatgaagtacaagaaaacaaccccagagtacgttttccattgtcaatccgccgttatgagtgctaccttcgcgaagttccacccaaatctggtggttggcgggacgtattctggccagatcgtgctctgggataatagatcgaacaaacgcactccagtacagaggacacctttgtctgccgctgcccacacccatccggtgtactgcgttaacgtggttgggacccagaatgcacacaatctgatcagtatatctacagatggcaaaatttgcagttggagcctggacatgttatcacatccgcaggacagtatggagttggtgcataagcagagtaaagccgtcgccgttacatcaatgtccttccccgtgggggatgtcaacaacttcgtcgtgggtagtgaggagggatctgtctataccgcctgtagacacggctctaaggctggcatctccgagatgttcgaggggcaccagggacccatcaccggtatccactgtcacgcagccgtgggtgctgtcgacttctcccatttgttcgtcacctcatcattcgactggacagtaaagctgtggactacgaagaacaataagccactgtattccttcgaggataacgctgactatgtctacgatgtgatgtggagccccactcatccagcgctgttcgcgtgcgtcgatggaatgggacgacttgatctttggaatttaaacaacgatactgaagtgccgacagcctcaatatcagtggagggtaaccccgcattaaacagggtgagatggactcactctgggcgcgagatcgcggttggtgactcagaaggacagatagtgatctacgacgtcggcgaaattgctgtgccgaggaacgacgagtgggcccgtttcggtaggacgctggccgaaatcaacgccaatcgcgctgacgccgaagaggaagctgccacccggattcccgcttag

SEQ ID NO: 117378 - DNA, 1917 bp, Artificial Sequence
  derived and/or modified sequence
atgagcgacaagagcgagctgaaggccgagctggagcggaagaagcagcggctggctcagatccgggaagagaagaaaaggaaggaggaggagcggaagaaaaaagaaactgatcagaagaaagaggcggttgccccagtccaggaggagtccgatctggagaagaagaggagagaggccgaagccctgctgcaaagcatgggattaacgcccgaatccccgatcgtcttcagcgaatactgggtgcctccccccatgtctccgtccagcaaaagtgtgtctacaccctcagaggctgggtcacaggactctggtgatggcgcagttggcagccgaacactgcactgggataccgacccaagtgtccttcaactgcatagtgactcagatctcggcagagggccgattaaattaggcatggcaaaaattacgcaggtagacttccctccaagggagatcgtgacgtacacaaaggagacacagacacctgttatggcacagcctaaagaagatgaagaggaggacgatgacgtcgtcgctccaaagccacctatcgagcctgaagaggaaaagactctgaaaaaagatgaagaaaacgacagcaaagcgccaccgcatgaactcaccgaggaggagaagcaacagattcttcactctgaagagtttctgtcatttttcgaccactccacacggatcgttgagagagctttgagtgagcagattaacatctttttcgattactcaggccgggacctcgaggataaggagggggaaatccaggccggggcaaagctgtctttgaatagacagttctttgatgagaggtggagtaagcaccgcgtggtgagctgtctcgattggagctcccaatacccagagctgctcgtggcttcctacaacaacaacgaagacgctcctcatgaacctgacggggttgcgctggtatggaacatgaaatataaaaagactacgcccgagtacgtgttccattgccagagcgctgttatgagtgcgaccttcgcaaaatttcaccccaatctcgtggttggcggcacctatagcgggcagattgtgctctgggataataggtcaaataaacgtactcctgtacagagaacaccgctgagtgcagctgcccacacgcaccctgtctactgtgtcaacgtggtaggcacacaaaatgcccacaatctgatctcaataagcacagatgggaaaatctgctcctggtccctagacatgctgagtcaccctcaggacagcatggaactggtgcacaaacagagcaaggcagtggccgtaaccagcatgagttttccagtcggggatgtgaataactttgtcgtggggtctgaagagggatctgtgtacaccgcttgtagacatgggtctaaggccgggatatcagagatgtttgagggacaccaaggcccgatcacagggattcattgccatgctgccgtcggtgctgtcgatttttctcatctgttcgtcacctcatcattcgactggactgtcaagctgtggaccactaagaacaacaagccgttgtatagcttcgaagataatgcggactatgtttatgatgtcatgtggagccctacacatcccgccctcttcgcatgcgtggacggcatgggacgactggatttgtggaacctgaataatgacacagaggtacctactgcctctatctcagtggaaggcaatccagctttgaatagggtgcgttggacccactccggacgcgagattgcagtaggggattctgagggtcaaattgtcatatacgatgtcggtgaacagatcgcagtacctcgaaacgacgaatgggcccgtttcggcaggaccttggccgagatcaacgcaaacagagcagacgcagaggaagaggccgcaaccagaattccagcctag

SEQ ID NO: 117379 - DNA, 1917 bp, Artificial Sequence
  derived and/or modified sequence
atgagcgacaagagcgagctgaaggccgagctggagcggaagaagcaacggcttgctcaaattagggaagaaaaaaagcggaaggaagaggagaggaagaaaaaggaaaccgatcagaagaaggaggcagtggcacccgtgcaggaagagtccgacttggaaaaaaagaggagagaggctgaggctcttctgcagtccatgggcctgacccccgagagcccaatcgatatcgctgaataccttgtcccccctccgatgtcacccagcagtaagtctgtgagtactccgtccgaggctggttctcaggattcaggggacggggccgtgggatctcgcacactgcattgggatacagacccttccgttttacagttacactcggatagcgacctgggaaggggcccaatcaagctgggaatggctaagataacacaggtggattttccaccaagagagatagtgacctacacaaaagaaactcagacccctgttatggctcagccgaaagaggacgaagaagaagatgatgatgtggttgcacctaagccccccatcgagccggaggaagaaaagacactaaaaaaggacgaagagaacgactcgaaagctcctcctcatgaactaaccgaggaggagaaacagcagatcctgcactcggaggaatttttgtcattcttcgaccactccacacggattgtggaacgcgccctctcggaacagattaatatatttttcgactactctggtcgggacttagaagacaaagagggcgaaatccaggctggcgccaagctatccctcaacaggcagttcttcgacgagcggtggtctaagcaccgagttgtgagctgtttggattggtccagtcagtatccagagctattggtggccagttataacaataacgaggatgcacctcatgaacccgatggagtggcgctggtgtggaatatgaaatataagaagaccacgcccgaatacgtatttcactgtcagtccgccgtaatgtccgcaacctttgctaagttccaccctaacttagttgtaggcggcacctattcaggacagattgtgctctgggataataggagcaataaacgaacaccagttcagagaacccctctcagcgccgctgcccatactcatccagtttattgcgtcaatgttgtgggcacacagaatgctcacaacctgatatcaatttctacagatggcaaaatctgtagttggagcctggacatgctaagccaccctcaggactctatggagctcgttcacaaacagagcaaagcagtcgctgtgacctccatgtcgttcccagtgggcgatgtgaataatttcgtcgtagggagcgaggagggctctgtctatacagcctgtcggcacggttcaaaggccggcatttcagagatgtttgaaggccatcaaggacccatcactggaattcattgccacgccgctgtgggggccgtggattttagccatctgttcgtgacatcctcattcgattggacagtcaaactttggactacaaagaacaataagccgctgtattccttcgaggataatgcagattatgtttacgacgtcatgtggtcgccaacacacccagctctgtttgcttgtgtggacggaatgggtaggctcgacctgtggaatctgaataatgatacggaggtccccactgctagcatctcagttgagggaaatcctgccctgaaccgagtccgctggactcattctgggcgcgagattgcagtgggcgactctgagggccagatcgtaatctacgatgtgggagagcagatagcggtgccgagaaacgatgaatgggcccgttttggaagaaccctagcggagataaacgccaatagggccgatgctgaggaggaggcagctacaagaataccagcctag

SEQ ID NO: 117380 - DNA, 1917 bp, Artificial Sequence
  derived and/or modified sequence
atgtccgacaaatctgaactgaaagccgagctcgaaagaaaaaagcagcgacttgctcagatcagggaagagaagaagaggaaggaagaggaacggaaaaaaaaagagactgaccagaagaaggaggctgtggcaccagttcaggaagagtcggacctggagaagaaaagaagggaggcagaagcgctgctgcagtcaatgggcctgacacctgaatccccaattgtgtttagtgaatactgggtccccccaccaatgtccccttcctccaagagcgtttctacaccgtctgaagcaggctcgcaagatagtggtgatggagcggttggtagccgtactctccattgggacacggatccttctgtcttacagttacacagtgattccgatcttggcagaggaccaataaagctggggatggctaagattacccaggtggacttcccacccagagagatagtcacgtacactaaagaaactcagacacccgtcatggcacagcctaaagaggatgaagaggaagacgatgatgtcgtggcccctaagccccctatcgaacctgaggaagagaagactctgaaaaaagacgaagaaaatgatagcaaagctccacctcatgagctcactgaagaagagaaacaacagatactgcattctgaagagtttctctctttttttgatcattctactcgcattgtggagagggcactgagcgagcagatcaacattttcttcgattactccggacgcgacctcgaggataaagagggagaaattcaggccggtgccaagctcagtttgaacaggcagttttttgacgaacgctggtcaaagcaccgtgtcgtaagttgcttagattggtctagtcaatatcctgagctcctggtcgcatcatataataataacgaggatgcaccacacgaaccggacggggtcgccctggtgtggaatatgaagtacaagaagaccacacctgagtatgtgttccattgccagagcgcggtgatgtccgctacattcgccaaattccatcccaatctggttgtaggcggtacatacagcgggcagatcgtgctatgggataatcgatccaataagcgcaccccagtgcagcggacaccactttcggccgcagcccatacccaccctgtgtactgtgttaacgtggtagggacgcaaaacgcacacaatcttatatcaatatcgaccgacggcaaaatctgtagttggtcacttgacatgctgagtcacccgcaggacagcatggaactggtgcataagcaaagcaaagcagtagctgtcacctcgatgtccttccctgtaggcgatgtgaataattttgtggtaggcagcgaagagggcagtgtgtacaccgcctgtcgacacgggtcgaaggcgggtatatccgagatgtttgagggccaccagggcccaattactggcattcactgtcacgccgctgtgggagccgtagactttagtcacctgttcgtgacctcatcctttgactggaccgtcaagctgtggaccaccaagaataataagcccttgtattcctttgaagacaatgccgactacgtctatgatgtcatgtggagccctacccaccctgcactctttgcttgcgtggatgggatgggaagactagatttatggaacctaaacaatgacaccgaggtgccaacagccagtatctctgtggagggtaaccccgcactgaatagggtcagatggacgcatagcgggagagagattgccgtcggcgattcagagggccagattgtgatttatgacgtgggggaacagatcgctgttcccaggaacgatgagtgggcccgttttggcaggaccctggctgagatcaacgcaaaccgtgctgatgctgaggaggaagccgctacccgcatcccggcttag

SEQ ID NO: 117381 - DNA, 1914 bp, Artificial Sequence
  derived and/or modified sequence
atgtctgacaagagcgagctcaaggcggagcttgagcgaaagaaacagcgacttgcacagataagagaagaaaagaagcgcaaggaggaggagagaaaaaagaaagagacagaccagaaaaaggaagccgtcgcaccagtgcaggaggagtcagatctggaaaaaaagcgaagggaggcagaagccctgttacagagcatgggtctgactcctgagtcaccgatagttttctctgagtattgggtgcctccaccgatgagcccctcaagtaagtccgtgagcaccccaagcgaggctggatcccaggactccggggacggcgctgtgggctcaaggacgctgcattgggacactgacccctctgtcctgcagttgcatagcgattccgacttgggacggggtcccataaagttggggatggccaagattacccaagtggacttcccaccgcgtgagatcgtaacatacaccaaggagacccagacacccgttatggcacagcccaaggaggatgaggaggaggatgacgacgttgtagctcccaagcctccaatcgagccagaagaggagaagaccctgaagaaggatgaggaaaacgacagcaaggcacctccccatgagttgaccgaagaggagaagcagcaaatcctgcactctgaggaatttctgagcttcttcgaccactctacccggatcgttgagcgagcgctctctgaacagatcaacattttcttcgactattctggacgcgacctggaagacaaagaaggcgaaatccaggctggcgcaaaactttctttgaacaggcaattctttgacgagcggtggtcaaaacatcgggttgtgtcgtgtctggactggtctagtcagtaccccgaactcctcgtggcttcatacaacaacaacgaggacgcccctcacgaaccagatggcgtggctcttgtgtggaatatgaagtataagaaaactaccccagagtacgtttttcactgtcagagcgcagttatgagcgctacgtttgcaaagttccaccccaatctcgtggtggggggaacatatagcggtcagatcgtgctttgggacaatcgtagcaacaagaggacccctgtccagaggaccccgctcagtgcagcagcacatacacatcctgtgtactgcgtgaacgtggttggcacccagaatgcccataacctcatatccatcagtacagatggcaaaatatgttcttggtcgttagacatgctaagtcaccctcaggattctatggaactagtccacaagcagtccaaggctgtagccgtaacctccatgtcctttccggtcggcgacgtcaataacttcgtagttggttctgaggaaggctcagtgtacacagcctgccgccacggctctaaagcagggatcagcgagatgttcgaaggtcatcagggtccgatcacaggtatccattgtcatgccgcagtgggcgcagtagacttttcccacctgttcgtcacttccagtttcgactggactgtaaagctgtggacgaccaaaaacaacaagcccctgtattccttcgaggataacgcagactatgtgtatgacgtgatgtggagccctactcaccccgcactatttgcctgtgtggatggtatgggaaggctggacctttggaatctgaataatgacactgaggtgccgaccgctagcatctccgtggagggcaacccggctcttaatcgtgtcaggtggacccactctggtagagagatagctgtcggtgatagcgagggtcagatagtgatatacgacgtaggagaaatcgccgtgccacgaaacgatgagtgggcgcgtttcggccgtactctggcagagataaacgccaatcgcgcagacgcggaggaggaggcggcaacgagaatccctgcttag

SEQ ID NO: 117382 - DNA, 1917 bp, Artificial Sequence
  derived and/or modified sequence
atgagcgataaatctgaactcaaggccgagttggagcgcaagaagcagagactagcacaaattagggaggagaagaaacgaaaagaggaggagcggaagaaaaaagaaactgaccagaaaaaagaggccgtggcccctgtgcaggaggagtcagacctagagaagaagagacgcgaagccgaagcccttctccagtcaatggggctcacccctgaaagtcctattgtgttttccgagtactgggtgccaccaccaatgagtccatcatctaagagcgtttccacacctagtgaggctgggtcacaggactcgggggacggcgcagtgggtagtagaacattacactgggacaccgatccctctgtgctacaattgcatagcgacagcgacctgggcagggggcctataaagttaggcatggccaaaatcactcaggttgattttcccccacgagagatagtgacatataccaaggagacgcaaacccccgtgatggctcagcctaaagaggacgaggaggaggacgatgacgtggtggcccctaagcccccaatcgagccggaagaggagaaaacactcaaaaaagacgaggagaatgattcaaaggcgccacctcatgagctcacggaagaagagaagcaacagattctacactcagaagagttcctgtcattctttgaccacagcactagaatcgtcgagagagcccttagcgaacaaattaatatttttttcgactattccggaagggacctggaagataaagagggtgaaatacaggcaggagcgaaattaagtttaaaccggcagttttttgatgaaaggtggagcaagcatagggtggtctcatgtctcgactggagtagtcaatatcccgagctccttgtcgcgtcatataataataacgaggatgcccctcatgaacctgacggagtggccctagtttggaatatgaagtataaaaaaactacaccggaatacgtgtttcattgccagtctgctgttatgtccgcgaccttcgctaagttccatcccaacttggtggtgggcggaacgtactctggccagattgtgctgtgggataaccggtctaacaagaggacacccgtacagaggacccccctgagcgcagctgctcacacacatccggtgtattgcgtgaacgttgtgggaactcagaacgcacataatcttatttcaataagcaccgacggcaagatctgctcatggagcctagacatgctctctcatccccaggacagcatggagttagtgcataaacaaagcaaagcggttgccgtcacatcaatgagcttcccagtgggtgatgtgaacaactttgtcgttggttccgaggagggtagcgtgtacaccgcatgcaggcatggctccaaggcaggcatctctgagatgtttgagggacaccaaggacccataaccggaattcactgccacgccgcagtgggtgcagtggacttttctcatctctttgtgacaagtagctttgattggaccgtcaagctgtggacaactaagaataacaaacccttgtatagcttcgaagataacgccgactatgtctatgacgttatgtggtcccccactcatcctgcactctttgcctgtgtcgatggaatgggacgcttagacctgtggaacctgaacaatgacaccgaagtgcccactgcgtctatttccgtggaaggcaacccagctttaaaccgcgtgaggtggacacattccggaagagagatagcagtaggtgattccgagggacagatcgtaatttatgacgtcggagagcagatcgctgttcccaggaacgatgagtgggccagatttgggcgaaccttagcagaaattaacgcgaatagggctgacgccgaggaagaagcagctactcggattcccgcatag

SEQ ID NO: 117383 - DNA, 1917 bp, Artificial Sequence
  derived and/or modified sequence
atgagcgataagtctgaactgaaggccgagcttgagcgcaagaagcagaggctggctcaaatcagggaggagaaaaagcgcaaggaggaagaacgcaagaagaaggaaactgatcagaagaaagaagccgtggcacctgttcaggaggagtccgatttagagaagaagcggagagaagccgaggcattgttgcagagtatggggctgacaccagaaagtccaatcgacatcgcagagtacttagttccacccccaatgagtccaagttcaaaatctgtgtcgactccatccgaagctggctcccaggattctggggacggggctgttggtagccggactctccattgggataccgacccctctgtgttacagctgcattcagactccgatctcggccgagggccaatcaagctcggcatggccaagatcactcaggttgatttcccgcctcgtgagatcgtgacttatacaaaggaaacccagacacctgtgatggctcagcccaaagaagatgaagaagaagacgacgatgtcgtggctccaaaacccccaatcgaacccgaggaagaaaagaccttaaaaaaggatgaagagaacgatagcaaggctcctccccacgagttaactgaagaggaaaagcagcagatcctccatagtgaggaatttctgtcgttcttcgaccactcgacacggatagtggagagagcactatccgagcagatcaacatatttttcgactacagcggccgagacctcgaggacaaagaaggggagatccaagccggagccaaattgtccctgaatagacagttctttgacgaacggtggagtaagcacagagttgtctcctgcctggattggtcaagccagtaccctgagctcctggttgctagctacaataataacgaagatgcccctcatgaaccagatggggtggccttagtctggaacatgaagtacaagaaaactacccctgaatacgtgttccactgccaaagcgccgttatgtcagccacctttgccaaattccacccaaacctggtagttggtggaacatattcaggccagatcgtcctttgggataatcggagtaataaaaggaccccagtacagcgcacacccctatccgctgctgctcacactcacccggtgtattgcgttaacgttgtcggtacacagaacgcccacaatttgatatccatttctactgatgggaaaatatgttcctggtctttagacatgctttctcacccccaagacagtatggaactggtacacaaacagagcaaagcagtcgccgtaaccagcatgtcattccccgtgggagatgtgaacaatttcgtggtgggaagtgaggagggtagcgtgtacaccgcctgcaggcacggctcaaaagctggaataagcgagatgttcgaggggcatcagggacctatcaccggcatacattgccatgcggctgtgggcgctgttgatttctctcatctctttgttacttcttcctttgattggaccgtgaaattatggactaccaagaataacaaaccactgtacagttttgaggataatgccgattacgtttacgacgtgatgtggtcccctacacacccggcactgtttgcctgtgtcgatgggatggggagactcgacctgtggaatcttaacaacgataccgaggtgcccaccgcttctattagcgttgaaggaaaccctgcgctgaatcgggttcgctggactcactcaggtagggaaatagccgtcggcgattctgaaggtcagatcgttatctacgatgtgggcgagcagatcgccgtgcccagaaacgacgagtgggctaggtttggccgaacattggctgagattaacgctaatagggccgacgctgaagaagaagcagccaccagaatccccgcatag

SEQ ID NO: 117384 - DNA, 1917 bp, Artificial Sequence
  derived and/or modified sequence
atgagcgacaagagcgagctgaaggccgagctggagagaaagaagcagagactggcccagatcagagaggagaagaagagaaaggaggaggagagaaagaagaaggagaccgaccagaagaaggaggccgtggcccccgtgcaggaggagagcgacctggagaagaagagaagagaggccgaggccctgctgcagagcatgggcctgacccccgagagccccatcgtgttcagcgagtactgggtgcccccccccatgagccccagcagcaagagcgtgagcacccccagcgaggccggcagccaggacagcggcgacggcgccgtgggcagcagaaccctgcactgggacaccgaccccagcgtgctgcagctgcacagcgacagcgacctgggcagaggccccatcaagctgggcatggccaagatcacccaggtggacttcccccccagagagatcgtgacctacaccaaggagacccagacccccgtgatggcccagcccaaggaggacgaggaggaggacgacgacgtggtggcccccaagccccccatcgagcccgaggaggagaagaccctgaagaaggacgaggagaacgacagcaaggcccccccccacgagctgaccgaggaggagaagcagcagatcctgcacagcgaggagttcctgagcttcttcgaccacagcaccagaatcgtggagagagccctgagcgagcagatcaacatcttcttcgactacagcggcagagacctggaggacaaggagggcgagatccaggccggcgccaagctgagcctgaacagacagttcttcgacgagagatggagcaagcacagagtggtgagctgcctggactggagcagccagtaccccgagctgctggtggccagctacaacaacaacgaggacgccccccacgagcccgacggcgtggccctggtgtggaacatgaagtacaagaagaccacccccgagtacgtgttccactgccagagcgccgtgatgagcgccaccttcgccaagttccaccccaacctggtggtgggcggcacctacagcggccagatcgtgctgtgggacaacagaagcaacaagagaacccccgtgcagagaacccccctgagcgccgccgcccacacccaccccgtgtactgcgtgaacgtggtgggcacccagaacgcccacaacctgatcagcatcagcaccgacggcaagatctgcagctggagcctggacatgctgagccacccccaggacagcatggagctggtgcacaagcagagcaaggccgtggccgtgaccagcatgagcttccccgtgggcgacgtgaacaacttcgtggtgggcagcgaggagggcagcgtgtacaccgcctgcagacacggcagcaaggccggcatcagcgagatgttcgagggccaccagggccccatcaccggcatccactgccacgccgccgtgggcgccgtggacttcagccacctgttcgtgaccagcagcttcgactggaccgtgaagctgtggaccaccaagaacaacaagcccctgtacagcttcgaggacaacgccgactacgtgtacgacgtgatgtggagccccacccaccccgccctgttcgcctgcgtggacggcatgggcagactggacctgtggaacctgaacaacgacaccgaggtgcccaccgccagcatcagcgtggagggcaaccccgccctgaacagagtgagatggacccacagcggcagagagatcgccgtgggcgacagcgagggccagatcgtgatctacgacgtgggcgagcagatcgccgtgcccagaaacgacgagtgggccagattcggcagaaccctggccgagatcaacgccaacagagccgacgccgaggaggaggccgccaccagaatccccgcctag

SEQ ID NO: 117385 - DNA, 1914 bp, Artificial Sequence
  derived and/or modified sequence
atgagcgacaagagcgagctgaaggccgagctggagagaaagaagcagagactggcccagatcagagaggagaagaagagaaaggaggaggagagaaagaagaaggagaccgaccagaagaaggaggccgtggcccccgtgcaggaggagagcgacctggagaagaagagaagagaggccgaggccctgctgcagagcatgggcctgacccccgagagccccatcgtgttcagcgagtactgggtgcccccccccatgagccccagcagcaagagcgtgagcacccccagcgaggccggcagccaggacagcggcgacggcgccgtgggcagcagaaccctgcactgggacaccgaccccagcgtgctgcagctgcacagcgacagcgacctgggcagaggccccatcaagctgggcatggccaagatcacccaggtggacttcccccccagagagatcgtgacctacaccaaggagacccagacccccgtgatggcccagcccaaggaggacgaggaggaggacgacgacgtggtggcccccaagccccccatcgagcccgaggaggagaagaccctgaagaaggacgaggagaacgacagcaaggcccccccccacgagctgaccgaggaggagaagcagcagatcctgcacagcgaggagttcctgagcttcttcgaccacagcaccagaatcgtggagagagccctgagcgagcagatcaacatcttcttcgactacagcggcagagacctggaggacaaggagggcgagatccaggccggcgccaagctgagcctgaacagacagttcttcgacgagagatggagcaagcacagagtggtgagctgcctggactggagcagccagtaccccgagctgctggtggccagctacaacaacaacgaggacgccccccacgagcccgacggcgtggccctggtgtggaacatgaagtacaagaagaccacccccgagtacgtgttccactgccagagcgccgtgatgagcgccaccttcgccaagttccaccccaacctggtggtgggcggcacctacagcggccagatcgtgctgtgggacaacagaagcaacaagagaacccccgtgcagagaacccccctgagcgccgccgcccacacccaccccgtgtactgcgtgaacgtggtgggcacccagaacgcccacaacctgatcagcatcagcaccgacggcaagatctgcagctggagcctggacatgctgagccacccccaggacagcatggagctggtgcacaagcagagcaaggccgtggccgtgaccagcatgagcttccccgtgggcgacgtgaacaacttcgtggtgggcagcgaggagggcagcgtgtacaccgcctgcagacacggcagcaaggccggcatcagcgagatgttcgagggccaccagggccccatcaccggcatccactgccacgccgccgtgggcgccgtggacttcagccacctgttcgtgaccagcagcttcgactggaccgtgaagctgtggaccaccaagaacaacaagcccctgtacagcttcgaggacaacgccgactacgtgtacgacgtgatgtggagccccacccaccccgccctgttcgcctgcgtggacggcatgggcagactggacctgtggaacctgaacaacgacaccgaggtgcccaccgccagcatcagcgtggagggcaaccccgccctgaacagagtgagatggacccacagcggcagagagatcgccgtgggcgacagcgagggccagatcgtgatctacgacgtgggcgagatcgccgtgcccagaaacgacgagtgggccagattcggcagaaccctggccgagatcaacgccaacagagccgacgccgaggaggaggccgccaccagaatccccgcctag

SEQ ID NO: 117386 - DNA, 1917 bp, Artificial Sequence
  derived and/or modified sequence
atgagcgacaagagcgagctgaaggccgagctggagagaaagaagcagagactggcccagatcagagaggagaagaagagaaaggaggaggagagaaagaagaaggagaccgaccagaagaaggaggccgtggcccccgtgcaggaggagagcgacctggagaagaagagaagagaggccgaggccctgctgcagagcatgggcctgacccccgagagccccatcgacatcgccgagtacctggtgcccccccccatgagccccagcagcaagagcgtgagcacccccagcgaggccggcagccaggacagcggcgacggcgccgtgggcagcagaaccctgcactgggacaccgaccccagcgtgctgcagctgcacagcgacagcgacctgggcagaggccccatcaagctgggcatggccaagatcacccaggtggacttcccccccagagagatcgtgacctacaccaaggagacccagacccccgtgatggcccagcccaaggaggacgaggaggaggacgacgacgtggtggcccccaagccccccatcgagcccgaggaggagaagaccctgaagaaggacgaggagaacgacagcaaggcccccccccacgagctgaccgaggaggagaagcagcagatcctgcacagcgaggagttcctgagcttcttcgaccacagcaccagaatcgtggagagagccctgagcgagcagatcaacatcttcttcgactacagcggcagagacctggaggacaaggagggcgagatccaggccggcgccaagctgagcctgaacagacagttcttcgacgagagatggagcaagcacagagtggtgagctgcctggactggagcagccagtaccccgagctgctggtggccagctacaacaacaacgaggacgccccccacgagcccgacggcgtggccctggtgtggaacatgaagtacaagaagaccacccccgagtacgtgttccactgccagagcgccgtgatgagcgccaccttcgccaagttccaccccaacctggtggtgggcggcacctacagcggccagatcgtgctgtgggacaacagaagcaacaagagaacccccgtgcagagaacccccctgagcgccgccgcccacacccaccccgtgtactgcgtgaacgtggtgggcacccagaacgcccacaacctgatcagcatcagcaccgacggcaagatctgcagctggagcctggacatgctgagccacccccaggacagcatggagctggtgcacaagcagagcaaggccgtggccgtgaccagcatgagcttccccgtgggcgacgtgaacaacttcgtggtgggcagcgaggagggcagcgtgtacaccgcctgcagacacggcagcaaggccggcatcagcgagatgttcgagggccaccagggccccatcaccggcatccactgccacgccgccgtgggcgccgtggacttcagccacctgttcgtgaccagcagcttcgactggaccgtgaagctgtggaccaccaagaacaacaagcccctgtacagcttcgaggacaacgccgactacgtgtacgacgtgatgtggagccccacccaccccgccctgttcgcctgcgtggacggcatgggcagactggacctgtggaacctgaacaacgacaccgaggtgcccaccgccagcatcagcgtggagggcaaccccgccctgaacagagtgagatggacccacagcggcagagagatcgccgtgggcgacagcgagggccagatcgtgatctacgacgtgggcgagcagatcgccgtgcccagaaacgacgagtgggccagattcggcagaaccctggccgagatcaacgccaacagagccgacgccgaggaggaggccgccaccagaatccccgcctag

SEQ ID NO: 117387 - DNA, 2604 bp, Artificial Sequence
  derived and/or modified sequence
ttctcgatcgtgtcagtttgtaaggcgagggcggaagttggattcctggcctgagaatattaggcgtagttttccagtttttggcaaagcggaaatacttaaggcccctgggttgactgggttctttgttttatctaccggcttctgctttacgacaggtcacaaacatgtcagacaaaagtgaattaaaggctgagttggaacgtaagaagcagcgactggcccaaatcagagaggaaaagaagagaaaagaagaagaaaggaaaaaaaaagaaacagaccagaagaaggaagctgttgctcctgtgcaagaagaatcagatcttgaaaaaaaaaggagagaagctgaagcattgcttcaaagcatggggctaactccagaatcccccattgttttttctgaatactgggtccctcctcctatgtctccatcctccaaatctgtgagcactccaagtgaagctggaagccaagactctggagatggcgccgtgggatctaggacgctgcattgggatacagatccatcagttcttcagcttcactcagattccgatttgggacgaggacctattaaacttggaatggctaaaatcacgcaagtcgactttcctcctcgagaaattgtcacgtatacaaaggaaactcagactccagttatggctcaacccaaagaagatgaagaggaagatgatgatgtagtggctcctaaaccacctattgaacctgaagaagagaaaactttaaagaaagatgaggaaaatgatagtaaagctccccctcatgagctgactgaagaagaaaagcaacaaatcttgcactctgaggaatttttaagtttctttgaccattctacaagaattgtagaaagagctctttctgagcagattaacatcttctttgactatagtgggagagatttggaagacaaagaaggagagattcaagcaggtgctaaactgtcattaaatcgacaattttttgacgaacgttggtcaaagcatcgggtggttagttgtttggattggtcatctcagtatccggagttactcgtggcttcctataacaacaatgaagatgcccctcatgagcctgatggtgtggcccttgtatggaatatgaaatacaaaaaaactaccccagagtatgtgtttcactgccagtcagctgtgatgtctgccacatttgcaaaatttcatccaaatcttgttgttggtggtacatattcaggccaaattgtgctttgggataaccgtagcaataaaagaactccagtgcaaagaactccactgtcagcagctgcacacacacaccctgtatattgtgtaaatgttgttggaacacaaaatgctcacaatctgattagcatctctactgatggaaaaatttgttcatggagtctggacatgctttcccatccacaggatagcatggagttggttcataaacagtcaaaagcagtagctgtgacatctatgtccttccctgttggagatgtcaacaactttgttgttgggagtgaagaaggttctgtgtacacagcatgccgccatggcagcaaagctggaatcagtgagatgtttgaggggcatcaaggaccaatcactggcatccattgtcatgcagctgttggagcagtagacttctcacatctttttgtcacttcatcgtttgactggacagtaaagctttggacaactaagaataacaagcctttgtattcatttgaagataatgcagactatgtttatgatgttatgtggtcacctacccacccagccctgtttgcctgtgtggatggcatggggagattggatttgtggaatctcaataatgacacagaggtaccaactgccagcatttctgtggagggtaatcctgctcttaatcgtgtgagatggacccattctggcagagagattgctgtgggtgattctgaaggacagattgttatatacgatgtgggagagcagattgctgttccccgcaatgatgaatgggcacggtttggccgaacacttgcagaaattaatgcaaaccgagctgatgcagaggaggaagcagctacccgaatacctgcttagttcctgaaaaggggagtgtaactagtggatttgggaaaggttcttaagtagatcctgagactatttgcatgcttctgtctaaatgataattaaaaggaaatttcatggattaaaccatgggtttaatgcagcaaggaaacttacaatgtccctttatatataacatgcatcttgttttggatttgtgtcattttttaatatagctgattgacttcacagaaagcagcttttttgaattctaatacataggtgtatatttggtattagttattttgagttcttttcaacttataacactgtatacagttatttctaaagcacagatgaaataagttctgcatatttttaaataatcacagttccctgttatacagataatgttctcactacccataatatgtaggaacattgtttctccttagccgtagtatgcatacacctatccatgttcattctgacatcctttgttgtctttataattcatgtggtagttacctataaataaaaacaaatatgcgtt

SEQ ID NO: 117388 - DNA, 2552 bp, Artificial Sequence
  derived and/or modified sequence
agctggtggtggctacagttggtgttgggggcttaggcgagggacgttaccgggaagttgcaggcgggaggactcttccccatccagtcacctgacaggtcacaaacatgtcagacaaaagtgaattaaaggctgagttggaacgtaagaagcagcgactggcccaaatcagagaggaaaagaagagaaaagaagaagaaaggaaaaaaaaagaaacagaccagaagaaggaagctgttgctcctgtgcaagaagaatcagatcttgaaaaaaaaaggagagaagctgaagcattgcttcaaagcatggggctaactccagaatcccccattgttttttctgaatactgggtccctcctcctatgtctccatcctccaaatctgtgagcactccaagtgaagctggaagccaagactctggagatggcgccgtgggatctaggacgctgcattgggatacagatccatcagttcttcagcttcactcagattccgatttgggacgaggacctattaaacttggaatggctaaaatcacgcaagtcgactttcctcctcgagaaattgtcacgtatacaaaggaaactcagactccagttatggctcaacccaaagaagatgaagaggaagatgatgatgtagtggctcctaaaccacctattgaacctgaagaagagaaaactttaaagaaagatgaggaaaatgatagtaaagctccccctcatgagctgactgaagaagaaaagcaacaaatcttgcactctgaggaatttttaagtttctttgaccattctacaagaattgtagaaagagctctttctgagcagattaacatcttctttgactatagtgggagagatttggaagacaaagaaggagagattcaagcaggtgctaaactgtcattaaatcgacaattttttgacgaacgttggtcaaagcatcgggtggttagttgtttggattggtcatctcagtatccggagttactcgtggcttcctataacaacaatgaagatgcccctcatgagcctgatggtgtggcccttgtatggaatatgaaatacaaaaaaactaccccagagtatgtgtttcactgccagtcagctgtgatgtctgccacatttgcaaaatttcatccaaatcttgttgttggtggtacatattcaggccaaattgtgctttgggataaccgtagcaataaaagaactccagtgcaaagaactccactgtcagcagctgcacacacacaccctgtatattgtgtaaatgttgttggaacacaaaatgctcacaatctgattagcatctctactgatggaaaaatttgttcatggagtctggacatgctttcccatccacaggatagcatggagttggttcataaacagtcaaaagcagtagctgtgacatctatgtccttccctgttggagatgtcaacaactttgttgttgggagtgaagaaggttctgtgtacacagcatgccgccatggcagcaaagctggaatcagtgagatgtttgaggggcatcaaggaccaatcactggcatccattgtcatgcagctgttggagcagtagacttctcacatctttttgtcacttcatcgtttgactggacagtaaagctttggacaactaagaataacaagcctttgtattcatttgaagataatgcagactatgtttatgatgttatgtggtcacctacccacccagccctgtttgcctgtgtggatggcatggggagattggatttgtggaatctcaataatgacacagaggtaccaactgccagcatttctgtggagggtaatcctgctcttaatcgtgtgagatggacccattctggcagagagattgctgtgggtgattctgaaggacagattgttatatacgatgtgggagagattgctgttccccgcaatgatgaatgggcacggtttggccgaacacttgcagaaattaatgcaaaccgagctgatgcagaggaggaagcagctacccgaatacctgcttagttcctgaaaaggggagtgtaactagtggatttgggaaaggttcttaagtagatcctgagactatttgcatgcttctgtctaaatgataattaaaaggaaatttcatggattaaaccatgggtttaatgcagcaaggaaacttacaatgtccctttatatataacatgcatcttgttttggatttgtgtcattttttaatatagctgattgacttcacagaaagcagcttttttgaattctaatacataggtgtatatttggtattagttattttgagttcttttcaacttataacactgtatacagttatttctaaagcacagatgaaataagttctgcatatttttaaataatcacagttccctgttatacagataatgttctcactacccataatatgtaggaacattgtttctccttagccgtagtatgcatacacctatccatgttcattctgacatcctttgttgtctttataattcatgtggtagttacctataaataaaaacaaatatgcgttaacttttcaaa

SEQ ID NO: 117389 - DNA, 2583 bp, Artificial Sequence
  derived and/or modified sequence
catccctctttgtgtgctttggaaagccgcggagctggtggtggctacagttggtgttgggggcttaggcgagggacgttaccgggaagttgcaggcgggaggactcttccccatccagtcacctgacaggtcacaaacatgtcagacaaaagtgaattaaaggctgagttggaacgtaagaagcagcgactggcccaaatcagagaggaaaagaagagaaaagaagaagaaaggaaaaaaaaagaaacagaccagaagaaggaagctgttgctcctgtgcaagaagaatcagatcttgaaaaaaaaaggagagaagctgaagcattgcttcaaagcatggggctaactccagaatcccccattgttttttctgaatactgggtccctcctcctatgtctccatcctccaaatctgtgagcactccaagtgaagctggaagccaagactctggagatggcgccgtgggatctaggacgctgcattgggatacagatccatcagttcttcagcttcactcagattccgatttgggacgaggacctattaaacttggaatggctaaaatcacgcaagtcgactttcctcctcgagaaattgtcacgtatacaaaggaaactcagactccagttatggctcaacccaaagaagatgaagaggaagatgatgatgtagtggctcctaaaccacctattgaacctgaagaagagaaaactttaaagaaagatgaggaaaatgatagtaaagctccccctcatgagctgactgaagaagaaaagcaacaaatcttgcactctgaggaatttttaagtttctttgaccattctacaagaattgtagaaagagctctttctgagcagattaacatcttctttgactatagtgggagagatttggaagacaaagaaggagagattcaagcaggtgctaaactgtcattaaatcgacaattttttgacgaacgttggtcaaagcatcgggtggttagttgtttggattggtcatctcagtatccggagttactcgtggcttcctataacaacaatgaagatgcccctcatgagcctgatggtgtggcccttgtatggaatatgaaatacaaaaaaactaccccagagtatgtgtttcactgccagtcagctgtgatgtctgccacatttgcaaaatttcatccaaatcttgttgttggtggtacatattcaggccaaattgtgctttgggataaccgtagcaataaaagaactccagtgcaaagaactccactgtcagcagctgcacacacacaccctgtatattgtgtaaatgttgttggaacacaaaatgctcacaatctgattagcatctctactgatggaaaaatttgttcatggagtctggacatgctttcccatccacaggatagcatggagttggttcataaacagtcaaaagcagtagctgtgacatctatgtccttccctgttggagatgtcaacaactttgttgttgggagtgaagaaggttctgtgtacacagcatgccgccatggcagcaaagctggaatcagtgagatgtttgaggggcatcaaggaccaatcactggcatccattgtcatgcagctgttggagcagtagacttctcacatctttttgtcacttcatcgtttgactggacagtaaagctttggacaactaagaataacaagcctttgtattcatttgaagataatgcagactatgtttatgatgttatgtggtcacctacccacccagccctgtttgcctgtgtggatggcatggggagattggatttgtggaatctcaataatgacacagaggtaccaactgccagcatttctgtggagggtaatcctgctcttaatcgtgtgagatggacccattctggcagagagattgctgtgggtgattctgaaggacagattgttatatacgatgtgggagagcagattgctgttccccgcaatgatgaatgggcacggtttggccgaacacttgcagaaattaatgcaaaccgagctgatgcagaggaggaagcagctacccgaatacctgcttagttcctgaaaaggggagtgtaactagtggatttgggaaaggttcttaagtagatcctgagactatttgcatgcttctgtctaaatgataattaaaaggaaatttcatggattaaaccatgggtttaatgcagcaaggaaacttacaatgtccctttatatataacatgcatcttgttttggatttgtgtcattttttaatatagctgattgacttcacagaaagcagcttttttgaattctaatacataggtgtatatttggtattagttattttgagttcttttcaacttataacactgtatacagttatttctaaagcacagatgaaataagttctgcatatttttaaataatcacagttccctgttatacagataatgttctcactacccataatatgtaggaacattgtttctccttagccgtagtatgcatacacctatccatgttcattctgacatcctttgttgtctttataattcatgtggtagttacctataaataaaaacaaatatgcgttaactttt

SEQ ID NO: 117390 - DNA, 2605 bp, Artificial Sequence
  derived and/or modified sequence
cttctcgatcgtgtcagtttgtaaggcgagggcggaagttggattcctggcctgagaatattaggcgtagttttccagtttttggcaaagcggaaatacttaaggcccctgggttgactgggttctttgttttatctaccggcttctgctttacgacaggtcacaaacatgtcagacaaaagtgaattaaaggctgagttggaacgtaagaagcagcgactggcccaaatcagagaggaaaagaagagaaaagaagaagaaaggaaaaaaaaagaaacagaccagaagaaggaagctgttgctcctgtgcaagaagaatcagatcttgaaaaaaaaaggagagaagctgaagcattgcttcaaagcatggggctaactccagaatcccccattgacatagctgagtatttagtccctcctcctatgtctccatcctccaaatctgtgagcactccaagtgaagctggaagccaagactctggagatggcgccgtgggatctaggacgctgcattgggatacagatccatcagttcttcagcttcactcagattccgatttgggacgaggacctattaaacttggaatggctaaaatcacgcaagtcgactttcctcctcgagaaattgtcacgtatacaaaggaaactcagactccagttatggctcaacccaaagaagatgaagaggaagatgatgatgtagtggctcctaaaccacctattgaacctgaagaagagaaaactttaaagaaagatgaggaaaatgatagtaaagctccccctcatgagctgactgaagaagaaaagcaacaaatcttgcactctgaggaatttttaagtttctttgaccattctacaagaattgtagaaagagctctttctgagcagattaacatcttctttgactatagtgggagagatttggaagacaaagaaggagagattcaagcaggtgctaaactgtcattaaatcgacaattttttgacgaacgttggtcaaagcatcgggtggttagttgtttggattggtcatctcagtatccggagttactcgtggcttcctataacaacaatgaagatgcccctcatgagcctgatggtgtggcccttgtatggaatatgaaatacaaaaaaactaccccagagtatgtgtttcactgccagtcagctgtgatgtctgccacatttgcaaaatttcatccaaatcttgttgttggtggtacatattcaggccaaattgtgctttgggataaccgtagcaataaaagaactccagtgcaaagaactccactgtcagcagctgcacacacacaccctgtatattgtgtaaatgttgttggaacacaaaatgctcacaatctgattagcatctctactgatggaaaaatttgttcatggagtctggacatgctttcccatccacaggatagcatggagttggttcataaacagtcaaaagcagtagctgtgacatctatgtccttccctgttggagatgtcaacaactttgttgttgggagtgaagaaggttctgtgtacacagcatgccgccatggcagcaaagctggaatcagtgagatgtttgaggggcatcaaggaccaatcactggcatccattgtcatgcagctgttggagcagtagacttctcacatctttttgtcacttcatcgtttgactggacagtaaagctttggacaactaagaataacaagcctttgtattcatttgaagataatgcagactatgtttatgatgttatgtggtcacctacccacccagccctgtttgcctgtgtggatggcatggggagattggatttgtggaatctcaataatgacacagaggtaccaactgccagcatttctgtggagggtaatcctgctcttaatcgtgtgagatggacccattctggcagagagattgctgtgggtgattctgaaggacagattgttatatacgatgtgggagagcagattgctgttccccgcaatgatgaatgggcacggtttggccgaacacttgcagaaattaatgcaaaccgagctgatgcagaggaggaagcagctacccgaatacctgcttagttcctgaaaaggggagtgtaactagtggatttgggaaaggttcttaagtagatcctgagactatttgcatgcttctgtctaaatgataattaaaaggaaatttcatggattaaaccatgggtttaatgcagcaaggaaacttacaatgtccctttatatataacatgcatcttgttttggatttgtgtcattttttaatatagctgattgacttcacagaaagcagcttttttgaattctaatacataggtgtatatttggtattagttattttgagttcttttcaacttataacactgtatacagttatttctaaagcacagatgaaataagttctgcatatttttaaataatcacagttccctgttatacagataatgttctcactacccataatatgtaggaacattgtttctccttagccgtagtatgcatacacctatccatgttcattctgacatcctttgttgtctttataattcatgtggtagttacctataaataaaaacaaatatgcgtt

SEQ ID NO: 117391 - protein, 1616 aa, Artificial Sequence
  derived and/or modified sequence
MPARTAPARVPTLAVPAISLPDDVRRRLKDLERDSLTEKECVKEKLNLLHEFLQTEIKNQLCDLETKLRKEELSEEGYLAKVKSLLNKDLSLENGAHAYNREVNGRLENGNQARSEARRVGMADANSPPKPLSKPRTPRRSKSDGEAKPEPSPSPRITRKSTRQTTITSHFAKGPAKRKPQEESERAKSDESIKEEDKDQDEKRRRVTSRERVARPLPAEEPERAKSGTRTEKEEERDEKEEKRLRSQTKEPTPKQKLKEEPDREARAGVQADEDEDGDEKDEKKHRSQPKDLAAKRRPEEKEPEKVNPQISDEKDEDEKEEKRRKTTPKEPTEKKMARAKTVMNSKTHPPKCIQCGQYLDDPDLKYGQHPPDAVDEPQMLTNEKLSIFDANESGFESYEALPQHKLTCFSVYCKHGHLCPIDTGLIEKNIELFFSGSAKPIYDDDPSLEGGVNGKNLGPINEWWITGFDGGEKALIGFSTSFAEYILMDPSPEYAPIFGLMQEKIYISKIVVEFLQSNSDSTYEDLINKIETTVPPSGLNLNRFTEDSLLRHAQFVVEQVESYDEAGDSDEQPIFLTPCMRDLIKLAGVTLGQRRAQARRQTIRHSTREKDRGPTKATTTKLVYQIFDTFFAEQIEKDDREDKENAFKRRRCGVCEVCQQPECGKCKACKDMVKFGGSGRSKQACQERRCPNMAMKEADDDEEVDDNIPEMPSPKKMHQGKKKKQNKNRISWVGEAVKTDGKKSYYKKVCIDAETLEVGDCVSVIPDDSSKPLYLARVTALWEDSSNGQMFHAHWFCAGTDTVLGATSDPLELFLVDECEDMQLSYIHSKVKVIYKAPSENWAMEGGMDPESLLEGDDGKTYFYQLWYDQDYARFESPPKTQPTEDNKFKFCVSCARLAEMRQKEIPRVLEQLEDLDSRVLYYSATKNGILYRVGDGVYLPPEAFTFNIKLSSPVKRPRKEPVDEDLYPEHYRKYSDYIKGSNLDAPEPYRIGRIKEIFCPKKSNGRPNETDIKIRVNKFYRPENTHKSTPASYHADINLLYWSDEEAVVDFKAVQGRCTVEYGEDLPECVQVYSMGGPNRFYFLEAYNAKSKSFEDPPNHARSPGNKGKGKGKGKGKPKSQACEPSEPEIEIKLPKLRTLDVFSGCGGLSEGFHQAGISDTLWAIEMWDPAAQAFRLNNPGSTVFTEDCNILLKLVMAGETTNSRGQRLPQKGDVEMLCGGPPCQGFSGMNRFNSRTYSKFKNSLVVSFLSYCDYYRPRFFLLENVRNFVSFKRSMVLKLTLRCLVRMGYQCTFGVLQAGQYGVAQTRRRAIILAAAPGEKLPLFPEPLHVFAPRACQLSVVVDDKKFVSNITRLSSGPFRTITVRDTMSDLPEVRNGASALEISYNGEPQSWFQRQLRGAQYQPILRDHICKDMSALVAARMRHIPLAPGSDWRDLPNIEVRLSDGTMARKLRYTHHDRKNGRSSSGALRGVCSCVEAGKACDPAARQFNTLIPWCLPHTGNRHNHWAGLYGRLEWDGFFSTTVTNPEPMGKQGRVLHPEQHRVVSVRECARSQGFPDTYRLFGNILDKHRQVGNAVPPPLAKAIGLEIKLCMLAKARESASAKIKEEEAAKD

SEQ ID NO: 117392 - DNA, 4851 bp, Artificial Sequence
  derived and/or modified sequence
atgcccgcgagaactgcccctgctagagtgcccaccctggcggtcccagccatttccctcccagatgacgtgcgacgcagactgaaagacctggagcgggatagcctaactgaaaaggagtgcgtgaaagagaagctgaatcttctccacgaattcctgcagaccgagataaaaaatcaactatgcgacctggaaactaaattacggaaggaagaactgagtgaagaaggctacctggcaaaagtcaaatcgttgttgaacaaggacctttctctcgagaacggagctcacgcatacaaccgcgaggtaaacggcagactggaaaacgggaatcaagcacgctcagaggcccgtcgtgttgggatggctgatgccaattcaccacctaaacccctgagcaaacctaggaccccccgccgttctaaaagtgacggagaggcaaagcctgagccgtctccctccccacggattaccaggaagtccactcggcagactacgatcacttcacacttcgctaagggccctgcaaaacgtaaaccccaagaggagtctgagcgggctaagagtgatgagagcattaaggaagaggataaggatcaagacgaaaagaggcgccgtgtgacctcccgcgaacgcgtggctagaccactcccagctgaggaacccgaaagggccaaatccgggaccaggaccgagaaagaagaggaacgtgatgaaaaggaagagaaacggctaaggtcgcagaccaaagaaccgacccctaagcaaaaacttaaagaggagcccgacagagaggctagggccggcgtacaggcggatgaggacgaggacggagacgagaaagatgagaaaaaacacagaagtcagcccaaagatctcgctgcaaaaaggcggcccgaagagaaggaacctgagaaggtgaaccctcaaattagtgatgagaaggacgaggatgaaaaggaggaaaaaaggcgcaaaaccacaccaaaggaaccaacagagaagaagatggcacgcgcgaaaacagtcatgaattccaaaacacaccctcccaaatgtatccagtgcggccagtatttagacgatcccgatctcaaatacggccaacacccacctgacgcagttgatgagccacaaatgctgacaaatgagaaactctctatttttgacgccaacgagagcggctttgaatcctatgaggctcttccccagcataaactgacatgcttcagtgtctactgcaagcacggccatctttgccctatagacacaggcctgatcgaaaaaaatattgaactgttctttagtggcagtgccaagccaatatatgacgatgatccaagtctggagggaggcgtgaatggcaagaatctcggcccaataaatgaatggtggattacaggcttcgacggcggggagaaggcattaatcgggttttctacaagttttgcagagtacatactcatggatcccagtccggaatatgcgcctatcttcggcttaatgcaggagaaaatttatatctctaaaatagttgtcgagtttctgcagagcaattcagactctacgtacgaagacttaatcaacaagattgaaacaaccgtccccccttcaggcctgaatttgaaccgttttaccgaagattccttactgcggcatgcacagtttgtcgttgaacaggtggagagttacgatgaagctggcgatagcgacgagcaacctatcttcctgacaccttgcatgagagacctgattaagttggccggagttacactcggacagagacgcgcacaggccaggcgacagactattaggcatagcacccgggagaaggacaggggccccacaaaagccacaaccacaaagctggtctaccagatttttgacactttcttcgcagaacagatagagaaggacgacagggaggacaaggaaaatgcatttaaacgacgtaggtgcggcgtatgtgaggtgtgccaacaaccagagtgtggcaaatgcaaggcctgcaaagatatggttaaatttgggggtagtggtcgttctaagcaggcctgtcaggagaggcggtgtccaaacatggcgatgaaagaggctgacgatgatgaggaggtcgatgataacataccggagatgccatccccaaagaaaatgcaccaggggaagaagaaaaaacaaaataagaaccgcatatcctgggtcggagaagccgtgaagactgacgggaagaaatcatattataagaaagtgtgcattgatgcggagaccctcgaagtgggtgattgtgtatccgttatccctgatgatagcagcaaaccgctgtacttggcccgagtgacagcattgtgggaggacagttccaacggccaaatgttccatgcccattggttctgcgctggtaccgatactgttcttggcgctaccagcgacccacttgagctcttcctggttgacgagtgtgaggatatgcaactgagctatattcattctaaagtgaaggttatctacaaggcgcccagcgagaattgggctatggaaggggggatggacccagagtcactgctggagggagacgatggtaaaacttatttttatcagctgtggtacgaccaggattatgcacgctttgaatctcctccaaaaactcaaccaacagaagacaacaagtttaagttttgtgtatcgtgcgcacgcctggcggaaatgcgacagaaggagataccccgcgtcttagagcagttggaggatttggatagccgagtactgtattattccgctacaaaaaacggcatcttgtatcgcgtgggcgacggagtgtatctgcctccggaggccttcacgtttaacattaaactgtctagtcccgtgaaaagaccccggaaggagccagtggacgaggatctttaccccgaacactataggaaatactccgactacatcaaaggttcaaaccttgatgcaccagaaccataccgaatcgggagaataaaggaaatattttgccctaaaaaatccaatggacgaccgaatgagaccgatatcaaaattcgcgtcaataaattttatcgccccgaaaatacacataaatcaacccctgctagctaccacgcagacatcaacctgctctactggtccgatgaggaagcagtcgtcgatttcaaggctgtacagggaaggtgtaccgtggaatatggagaggatctgcccgaatgcgtgcaagtgtactccatgggtggccccaacaggttctactttctcgaggcatacaatgctaagtctaagagctttgaggatccacccaaccacgccagatctcctggcaacaaaggcaaggggaagggtaagggcaagggcaagcctaagtcacaggcttgcgaacctagcgagcctgaaatcgagattaagctgccgaagttgagaacactcgacgtattcagtggctgtggcggcctgtctgaaggcttccatcaggccggaatttcagacacactctgggccatagaaatgtgggatcctgcagcccaggccttccggcttaataacccaggttccaccgtgttcactgaggattgcaatatcctcttgaagctggtgatggccggcgagaccactaatagtcgggggcagcgccttccccagaaaggcgacgtagaaatgctgtgcggaggccccccttgtcaaggattctccggaatgaatagatttaactctcgcacgtattcaaagttcaagaatagcttagtcgtcagttttttgagttattgcgactactacagacccaggttcttcctgctggagaacgtaaggaattttgtgtccttcaagaggtccatggtgctgaaattgaccttgcggtgcctggtgcgaatgggttaccagtgtacctttggggttctgcaggccgggcagtacggggtggcccagacaagaaggagggcaatcatcttggccgccgcaccaggcgaaaagcttccactatttcctgagcctctgcacgtctttgcccctcgggcgtgccaactgagcgtcgtggtggacgataagaagtttgtctccaacattactcgattatccagcgggcctttccggactattactgtaagagacaccatgagcgatctgcccgaggttcgcaatggagcgagtgcactcgagatatcctacaacggagaacctcaaagttggttccagcggcagctaaggggagcccaataccagcccattctgagggaccacatttgtaaagacatgtctgccttagtggctgcccgcatgagacatatccccctcgcccccggatcggactggcgggatctgcccaacattgaggtgaggctatccgatggtacaatggcacgcaagctgcgttacactcaccatgataggaagaacggacgttcaagcagcggcgcactgcgaggcgtctgctcctgcgtcgaagctgggaaggcctgtgaccctgccgcgaggcaatttaacacactgatcccttggtgcctaccgcacacaggaaataggcacaaccactgggctgggctgtacgggcggttagaatgggatggcttctttagtaccacagtaacaaaccctgagcccatgggcaaacagggcagggtattgcacccagaacagcaccgggtcgtgagtgtccgggaatgcgcccgctcccaggggtttccagacacatataggctgtttggtaacattcttgataagcacagacaggttgggaacgccgtgccgccacccttagccaaggctattggactcgagattaagttgtgtatgctggccaaggccagggaatcagcatccgcaaaaatcaaagaagaagaggccgcaaaagattag

SEQ ID NO: 117393 - DNA, 4851 bp, Artificial Sequence
  derived and/or modified sequence
atgcctgccaggacagccccagcccgggtgcccaccctggccgtgcctgccatcagcctgcctgatgatgtgagaagaaggctgaaggacctggagcgggacagcctgacagagaaggaatgtgtgaaggagaagctgaacctgctgcacgagttcctgcagacagagatcaagaaccagctgtgtgacctggagaccaagctgaggaaggaggagctgtctgaggagggctacctggccaaggtgaagagcctgctgaacaaggacctgagcctggagaatggagcccacgcctacaaccgggaggtgaatggccgcctggagaatggaaaccaggcccggtctgaggcccggcgggtgggcatggctgatgccaacagcccccccaagcccctgagcaagcccaggaccccaagaagaagcaagagtgatggagaggccaagccagagcccagccccagcccccgcatcaccaggaagagcacccggcagaccaccatcaccagccactttgccaagggccctgccaagaggaagccccaggaggagagcgagcgggccaagagtgatgagagcatcaaggaggaggacaaggaccaggatgagaagagaagaagagtgaccagccgggagcgggtggcccggcccctgcctgctgaggagcctgagcgggccaagagcggcaccaggacagagaaggaggaggagagagatgagaaggaggagaagaggctgcggagccagaccaaggagcccacccccaagcagaagctgaaggaggagccagaccgggaggcccgggccggcgtgcaggctgatgaagatgaagatggagatgagaaggatgagaagaagcacaggagccagcccaaggacctggccgccaagagaagacctgaggagaaggagcctgagaaggtgaacccccagatcagtgatgagaaggatgaagatgagaaggaggagaagaggaggaagaccacccccaaggagcccacagagaagaagatggcccgggccaagacagtgatgaacagcaagacccacccccccaagtgcatccagtgtggccagtacctggatgatcctgacctgaagtatggccagcaccccccagatgctgtggatgagccccagatgctgaccaatgagaagctgagcatctttgatgccaatgaaagtggctttgagagctatgaggccctgccccagcacaagctgacctgcttctctgtgtactgcaagcacggccacctgtgccccatcgacaccggcctgattgagaagaacatcgagctgttcttcagcggcagcgccaagcccatctatgatgatgaccccagcctggagggcggcgtgaatggcaagaacctgggccccatcaatgagtggtggatcactggatttgatggaggagagaaggccctgattggcttcagcaccagctttgctgagtacatcctgatggaccccagcccagaatatgcccccatcttcggcctgatgcaggagaagatctacatcagcaagatcgtggtggagttcctgcagagcaacagcgacagcacctatgaagatctcatcaacaagattgagaccaccgtgccccccagcggcctgaacctgaaccgcttcacagaggacagcctgctgcggcatgcccagtttgtggtggagcaggtggagagctatgatgaagctggggacagtgatgagcagcccatcttcctgaccccctgcatgagggacctgatcaagctggccggcgtgaccctgggccagaggcgggcccaggcccggcggcagaccatccgccacagcacccgggagaaggaccggggccccaccaaggccaccaccaccaagctggtgtaccagatctttgacaccttctttgctgagcagatcgagaaggatgaccgggaggacaaggaaaatgccttcaagagaagaagatgtggggtgtgtgaggtgtgccagcagccagaatgtgggaagtgcaaggcctgcaaggacatggtgaagtttggaggcagcggccgcagcaagcaggcctgccaggagcggcgctgccccaacatggccatgaaggaggctgatgatgatgaggaggtggatgacaacatccctgagatgcccagccccaagaagatgcaccagggcaagaagaagaagcagaacaagaaccgcatctcctgggtgggggaggccgtgaagacagatggcaagaagagctactacaagaaggtgtgcattgatgctgagaccctggaggtgggggactgtgtgtctgtcatcccagatgacagcagcaagcccctgtacctggcccgggtgacagccctgtgggaggacagcagcaatggccagatgtttcatgcccactggttctgtgccggcacagacacagtgctgggcgccaccagtgaccccctggagctgttcctggtggatgaatgtgaggacatgcagctgagctacatccacagcaaggtgaaggtgatctacaaggcccccagcgagaactgggccatggagggcggcatggaccctgagagcctgctggagggagatgatggcaagacctacttctaccagctgtggtatgaccaggactatgccaggtttgagagcccccccaagacccagcccacagaggacaacaagttcaagttctgtgtgtcctgtgcccggctggccgagatgaggcagaaggagatcccccgggtgctggagcagctggaggacctggacagccgggtgctgtactacagcgccaccaagaatggcatcctgtacagagtgggagatggagtgtacctgcccccagaggccttcaccttcaacatcaagctgagcagccctgtgaagaggcccaggaaggagcctgtggatgaggacctgtacccagagcactacaggaagtacagcgactacatcaagggcagcaacctggatgcccctgagccctacagaattggccgcatcaaggagatcttctgccccaagaagagcaatggccggcccaatgaaacagacatcaagatccgggtgaacaagttctacagacctgagaacacccacaagagcaccccagccagctaccacgccgacatcaacctgctgtactggagcgatgaggaggccgtggtggacttcaaggctgtgcagggccgctgcaccgtggagtatggagaggacctgcctgaatgtgtgcaggtgtacagcatgggcggccccaaccgcttctacttcctggaggcctacaatgccaagagcaagagctttgaagatcctcccaaccacgcccggagccctggcaacaagggcaagggcaagggcaagggcaagggcaagcccaagagccaggcctgtgagcccagcgagcctgagattgagatcaagctgcccaagctgcggaccctggatgtgttcagcggctgcggcggcctgtctgagggcttccaccaggccggcatcagtgacaccctgtgggccatcgagatgtgggaccctgctgcccaggccttccggctgaacaaccctggcagcacagtgttcacagaggactgcaacatcctgctgaagctggtgatggccggggagaccaccaacagccggggccagaggctgccccagaagggagatgtggagatgctgtgtggcggccccccctgccagggcttcagcggcatgaaccgcttcaacagcaggacctacagcaagttcaagaacagcctggtggtgtccttcctgagctactgtgactactaccggccccgcttcttcctgctggagaatgtgaggaactttgtgtccttcaagaggtccatggtgctgaagctgaccctgcgctgcctggtgaggatgggctaccagtgcaccttcggcgtgctgcaggccggccagtatggagtggcccagaccaggagaagagccatcatcctggccgccgcccctggagagaagctgcccctcttccctgagcccctgcacgtgtttgccccccgggcctgccagctgtctgtggtggtggatgacaagaagtttgtgagcaacatcacccggctgagcagcggccccttccgcaccatcaccgtgcgggacaccatgtctgacctgcctgaggtgagaaatggagccagcgccctggagatctcctacaatggagagccccagagctggttccagaggcagctgcggggggcccagtaccagcccatcctgcgggaccacatctgcaaggacatgtctgccctggtggccgccaggatgaggcacatccccctggcccctggcagtgactggagggacctgcccaacatcgaggtgcggctgagtgatggcaccatggccaggaagctgcgctacacccaccacgacaggaagaatggccgcagcagcagcggggccctgcggggcgtgtgcagctgtgtggaggccggcaaggcctgtgaccctgctgcccggcagttcaacaccctcatcccctggtgcctgccccacactggaaacagacacaaccactgggccggcctgtatggccgcctggagtgggatggcttcttcagcaccaccgtgaccaaccctgagcccatgggcaagcagggccgggtgctgcaccctgagcagcaccgggtggtgtctgtgcgggagtgtgcccggagccagggcttcccagacacctaccgcctgtttggaaacatcctggacaagcaccggcaggtgggcaatgctgtgcccccacccctggccaaggccatcggcctggagatcaagctgtgcatgctggccaaggcccgggagagcgccagcgccaagatcaaggaggaggaggccgccaaggactag

SEQ ID NO: 117394 - DNA, 4851 bp, Artificial Sequence
  derived and/or modified sequence
atgcccgcccggaccgcccccgcccgggtgcccaccctggccgtgccagccatctccctgccagacgacgttaggagaagactgaaagatctggagcgcgactccctgactgagaaagaatgtgttaaggaaaaattaaacctgctgcacgagtttctgcagactgagattaaaaaccagctttgcgacctggagacgaaactcaggaaggaggaactttctgaagagggttatcttgccaaagtgaaatcactgcttaacaaggacctgtcgctcgagaacggagctcatgcatataaccgggaggtgaacggccggctggaaaacggtaaccaggcacgctcagaggcacggagagtcggtatggccgatgcgaacagtccccccaagccactctcgaagccccggactccaagacgcagcaagtctgacggtgaggcaaagccggagcctagcccaagcccccggattacccgaaaatctacgcgccagactacaattacaagtcattttgcaaagggtccggctaagagaaaaccgcaggaggaaagcgagagagctaagtcagacgaatcaattaaagaggaagacaaggaccaggatgaaaaaaggaggcgcgtcacttcaagagagagggtagccaggccactgcctgccgaggagcccgaacgggccaaatctggcactcggacagagaaagaagaagagcgcgatgagaaagaggaaaagcgcctgcggtcgcaaactaaggagcccacacccaagcaaaaactgaaagaagagccagatcgggaagcccgggcaggggtacaggccgatgaggacgaggacggcgacgaaaaagacgaaaaaaagcaccggagtcagcccaaagacctggcggcaaaaagacgccccgaagaaaaggaaccagagaaagtcaatccccagatttcagacgagaaagacgaagacgagaaagaagagaaaaggcgaaaaacaaccccaaaagaacccaccgagaagaaaatggcccgggcaaagaccgtcatgaactcaaagacccacccgccgaagtgtatccagtgtggccagtatctcgacgacccggacctgaaatatggtcagcacccaccagatgccgtcgacgaaccccagatgctgaccaacgaaaagctgtccattttcgatgctaacgagtcagggttcgaaagttatgaagccctgcctcagcacaaactgacctgcttctccgtgtattgtaagcacgggcatttatgtcccatcgacactgggctcattgaaaagaatattgagctgtttttctccggctccgccaagcctatatacgacgacgacccctcactggaaggtggcgtcaatggaaagaatctcggacctatcaacgagtggtggatcacgggttttgatggcggtgaaaaagcactgattggtttttctacatccttcgctgaatacattcttatggacccaagccccgagtacgctcctatatttgggctcatgcaggagaaaatctacataagtaagatcgtggttgagttcctccagagtaattctgactcaacttacgaagatttgattaataagatcgaaaccaccgtgcctccttcagggctcaacctcaatcgattcacggaagattctcttttgcgacacgcccagtttgtggtggaacaggtcgaaagttatgacgaggccggagattccgacgaacagccgatcttcctgacaccatgtatgagggacctcattaagctcgctggtgttacccttggtcagagacgggcgcaggcccggcggcagaccatccggcactcgactcgggaaaaggaccgagggccaaccaaggccacgacaactaaactggtataccagatctttgatactttttttgcagagcagatcgagaaggacgacagggaggataaagagaatgcttttaagagaagacgttgcggcgtgtgcgaagtctgtcagcaacctgaatgcggcaaatgtaaagcatgcaaagacatggtcaagtttgggggatctggccgctctaagcaagcctgtcaagaacggagatgtcccaatatggccatgaaggaagctgacgatgatgaagaagtggacgacaatatcccagaaatgcccagccccaagaaaatgcatcaggggaagaagaaaaaacagaacaaaaatcggatttcttgggttggtgaggctgttaagacagacggaaagaagtcttattacaagaaggtctgcatcgacgcagagaccctggaggtcggagactgcgtctctgtcattccagatgactcgagtaaacccctctacctggcaagggtgacagctctgtgggaggacagttccaacgggcaaatgttccatgcacactggttttgcgccggtactgatacagtgttgggcgcgacttcagatccgctcgagctgttcttagtcgacgaatgtgaggacatgcagttgtcttatatccactctaaagtcaaggtgatttataaggcaccaagtgagaactgggccatggaggggggtatggatcccgaatcactccttgaaggggatgacggcaaaacctacttttaccagctgtggtacgatcaggattacgcccggtttgagtcaccacctaagacacagcctacagaggacaacaaattcaagttttgcgtttcatgcgcccgtcttgcagaaatgcgccagaaggagataccaagagtgctcgaacagctagaggatttagactcacgcgtgctttactactcggccaccaaaaatggaattctgtaccgggtgggagatggcgtgtatttgcccccagaggcttttaccttcaacatcaagcttagcagtccagtgaagcggccccgaaaggaacccgttgacgaagacctttaccctgagcactacaggaagtactcagattatatcaaggggagcaatctggacgctcctgaaccctatagaattggcagaatcaaagaaattttctgccccaagaaatcgaatggccgacctaacgagaccgacattaagatccgcgtgaacaagttctatcggcccgaaaatactcataagagcactcctgcctcatatcacgccgacattaatctactgtactggtcggacgaagaggccgtggtcgattttaaagcagtccagggtagatgtacagttgagtatggggaagacctgcccgagtgcgtgcaggtctatagcatgggcggaccgaaccgtttttacttcttggaagcatataacgccaagagcaagtccttcgaagatccacccaatcatgcacgttctcctggtaacaaagggaaaggcaagggaaaaggcaaggggaagcctaagagtcaggcttgcgaaccaagtgagcccgagattgaaatcaagctccctaaactgcggaccctggacgtgtttagtgggtgcggtgggttgtctgagggcttccatcaggccggaatctccgatactctttgggccatcgagatgtgggacccagcagctcaggcttttcgcctcaataatcccggtagcaccgtctttaccgaagattgcaacatccttctgaagcttgtgatggctggcgaaacaaccaatagcaggggacagcgtctccctcagaagggcgacgttgagatgttgtgcgggggcccgccatgtcagggcttctccggaatgaatcggttcaatagccggacctatagtaaatttaagaatagcttggttgtaagcttcttgtcctactgcgactattataggccccgattttttctccttgaaaatgtacgaaattttgtgtctttcaagaggtcgatggtgctgaagctgacattgagatgtttagttaggatgggctaccaatgtacctttggggttctgcaggccggacagtacggcgtcgcccagacgcgaaggagggccatcatacttgctgcagcaccaggggagaagctaccactgtttcccgagccactccatgtattcgctccacgagcctgccagttgagtgtcgtcgtcgacgacaagaaattcgtgagcaatattacaaggctgagcagtggacccttcaggaccatcaccgttagagataccatgtcggacctgcctgaggtgaggaacggcgcatctgcactggagatctcgtataacggcgaaccgcagtcttggttccagcgccagctgcgaggcgcccagtaccagcccattctccgcgatcatatctgcaaagatatgagcgctttagtcgccgctcgaatgagacatatccctctcgccccaggctctgattggagggatctacctaacattgaggtgcgcctcagcgatggtactatggcaaggaaactccgctatactcatcatgatcgaaaaaacgggcgttcctcctccggcgccctacgcggcgtgtgctcttgcgtcgaagcgggcaaggcatgtgacccagcagctagacagttcaacacattgattccgtggtgtctcccccacaccgggaatcgccacaaccattgggccgggctgtacgggcgcctcgaatgggatggcttcttcagcaccacagtcactaatcctgaacccatgggaaaacagggtagagttcttcacccagagcaacatcgggttgtaagcgttcgcgaatgtgccagatcacaggggtttcccgatacttataggctgttcggtaacattcttgacaaacatcgccaagtcggcaacgcggtgccacccccactggcaaaggctatcggactcgaaataaaactatgtatgttggccaaggcaagagagtcagctagcgctaagataaaggaggaggaggcagcgaaagattag

SEQ ID NO: 117395 - DNA, 4851 bp, Artificial Sequence
  derived and/or modified sequence
atgccagcacgaacagcaccagcaagggtgccaacactcgcggttcctgcaatttcactgccagatgacgtgcgcagacgtctgaaagatcttgaacgcgacagtctcactgagaaagaatgcgtgaaggaaaaactgaacctactgcatgagtttctccaaactgagattaaaaaccagctgtgcgatctagagacgaaacttcgaaaggaggagctcagtgaggaaggatatttggcaaaggttaagtccttgctgaacaaggacctgagcctcgaaaacggagcacacgcatataaccgtgaggtcaatggacggttggagaacggaaaccaggctcgtagcgaagctcgcagggtgggaatggccgatgccaactctcccccaaagcccttgtcaaagcccagaaccccgagaaggtccaaatctgacggggaagccaagcctgagccaagccccagtccaagaatcacacggaagagcaccaggcagactacaatcacctcccacttcgctaagggaccggctaagcgtaagccccaggaagagagcgagcgggcaaaatccgatgaaagtatcaaggaggaggataaggatcaggacgaaaagcgcaggagggtgacgtcccgggagcgggtcgcaagacctctgcccgctgaggagcctgaacgcgcaaaatccggcacaaggacagagaaagaagaggagagggacgaaaaggaagagaaacgactcagatcccagaccaaagagcctacgccaaaacagaagctcaaggaggaacccgacagggaggcaagggccggagtgcaggctgacgaagacgaggacggggatgagaaggatgaaaaaaagcaccgcagccagcctaaggatctggcagccaaacgaaggcctgaggagaaagagcccgagaaggtgaatccccaaataagcgatgaaaaggatgaagacgaaaaagaagaaaaaagacgcaaaaccacaccaaaggagcctaccgagaagaagatggctcgggcaaagaccgtcatgaatagtaagacccatcctcccaagtgcatacaatgcgggcaatatctcgatgatcccgacctgaagtacggacagcacccccctgacgccgtggatgagccacagatgctgaccaatgagaaactgtctatatttgacgcaaatgagtccggtttcgagtcctatgaagcccttccgcagcacaaactgacttgcttctctgtgtactgtaaacacggtcatctgtgccctattgatactgggctgatcgagaaaaatatcgaattgttcttttccggtagcgccaaacctatttatgacgatgacccttctttggaaggcggagtcaatggcaagaacctcgggcctatcaatgaatggtggatcacaggctttgatggtggcgagaaagctttgataggtttctctacctcctttgccgaatacatcctgatggacccaagcccggaatatgctccgatcttcggattgatgcaggagaagatctacataagcaagatagtggtggagtttttgcaaagcaattctgatagtacctatgaagatctgatcaacaaaatcgagactactgtccccccatctggtctgaacctcaaccggttcaccgaggattccttgctgaggcacgctcagttcgtggtcgagcaagtggagagctatgacgaggcgggtgatagcgacgagcagcctatttttctgactccttgcatgcgagacctgattaaactggcaggtgtaactttgggccaacggcgtgcccaggcccgacgtcagaccattcggcatagtacaagggaaaaagatcggggtcctacgaaagctacgactaccaagttggtgtatcagatcttcgacaccttttttgccgagcaaattgagaaagatgatcgggaagataaggagaatgccttcaaacgccgtaggtgtggagtgtgcgaggtctgccagcaacctgagtgtggtaagtgcaaggcctgcaaagacatggtgaagttcgggggaagtgggcgatctaaacaggcctgccaagagaggcgctgtcctaacatggcaatgaaggaagcggacgatgatgaagaggtggacgacaacatcccagagatgccaagccccaagaagatgcaccaaggcaaaaaaaagaaacagaataaaaaccgcatttcatgggtcggagaggcggtgaaaacagacgggaagaagtcatactacaagaaggtgtgcatcgatgccgagaccctggaggtaggagactgcgtgtcagtgattccggatgacagtagcaaaccgctgtatctggccagggtcacggcactgtgggaggacagcagtaacgggcagatgttccacgcccattggttttgtgcgggtacagacaccgttctcggcgcaacatccgatcccctggaactgttcctagtggatgagtgcgaagatatgcaactcagttatattcacagtaaggtgaaagttatttataaagcaccttcagagaactgggccatggaaggaggaatggaccccgaatccctgctggaaggggacgacgggaaaacgtacttctaccagctctggtatgatcaggactacgccagattcgaatcccccccaaaaacccagccaacagaagataataagtttaagttctgtgtgtcatgcgcccgactcgcggagatgcggcaaaaagagataccaagagtcctcgagcagctggaagacttggatagcagggtgctatattactctgccacgaaaaatgggatactgtaccgtgttggggatggcgtgtatctccccccagaggccttcacttttaatatcaagctatcctcccccgtaaagcggccaagaaaggaacctgtagacgaggacttatatcccgaacactacagaaaatactccgattacatcaagggatcaaacctggatgctccagagccatatcgcattggacgaattaaggagatattctgcccaaaaaaaagcaacggaagacctaacgaaacagacatcaagattcgggtcaacaagttctatagacccgaaaacacccataagagcacccctgcttcttaccacgctgacattaacttactgtactggtcagacgaggaggcagtggtcgatttcaaagcggtgcaggggaggtgcaccgtggagtacggggaagatctgcctgagtgtgtccaggtgtacagtatgggtggcccaaaccgcttttattttctcgaggcttataatgctaaaagtaagagcttcgaggaccccccaaatcacgccagatcgccgggaaacaagggtaagggcaagggaaaaggcaaagggaagccgaaaagtcaagcctgtgagcccagcgaaccagagatcgagatcaaactgccaaaattaaggacactggatgtcttcagcggctgtgggggactgtctgagggatttcaccaggcaggcatttctgacaccctatgggcaatcgaaatgtgggaccctgccgctcaggcatttcgactcaacaacccaggctccactgtttttactgaggattgtaacatcttgctgaagttggtgatggccggagaaaccacgaactcacggggtcaacggctcccacagaagggggatgtcgagatgctgtgcgggggacccccatgtcaaggattttcgggaatgaaccggttcaacagcagaacctacagcaagtttaaaaatagtcttgtggtgtcatttctctcctactgcgattactataggccacgattcttcttgttagaaaatgtgaggaattttgtatcttttaagaggtctatggtcttgaagctgaccctgcgctgcctagtgcgtatggggtaccaatgtacctttggcgtgctgcaggctgggcagtatggcgtagcacagacgcgcaggagggcgatcatattggcagcggctcccggagagaaactgcctttgttcccagagcccttgcacgtgttcgcgccaagggcgtgtcagctctcagtcgtagtggacgataaaaaatttgtgtcaaacatcactagactgtcttctggacctttcagaacgatcaccgttagagacaccatgagtgatttgccggaagtgagaaacggggcaagcgcattagaaatttcgtataatggggagcctcaatcctggtttcagcgtcagctgagaggcgcacagtaccagcccattctccgagatcatatctgtaaggatatgagcgctctggtggccgcaagaatgcgacacataccactcgcacccggtagtgattggagggaccttcctaacatcgaggtgcgcttaagtgatggaacaatggctcgcaagttaaggtacacgcaccacgataggaagaacggtcgaagtagctctggagctttgcgaggagtgtgctcatgcgtcgaggccggaaaggcctgcgatcctgcagcccgacagtttaatacgctgatcccttggtgtctgccccacaccggcaataggcataaccactgggccggattgtacgggaggctcgagtgggacggttttttttcgactacggtcacaaatcctgagcccatgggaaagcaagggcgtgtgctccaccctgagcaacatagagtggtgagtgttcgcgagtgcgcacgatcacagggctttcctgatacctacaggctcttcggcaacatcttggataagcacaggcaggtagggaacgcggttcctccaccactggccaaggctattggcctggaaatcaagctatgcatgctggctaaagccagggagtctgcatccgcaaagatcaaagaagaggaagcagccaaggattag

SEQ ID NO: 117396 - DNA, 4851 bp, Artificial Sequence
  derived and/or modified sequence
atgcccgccagaaccgcccccgccagagtgcccaccctggccgtgcccgccatcagcctgcccgacgacgtgagaagaagactgaaggacctggagagagacagcctgaccgagaaggagtgcgtgaaggagaagctgaacctgctgcacgagttcctgcagaccgagatcaagaaccagctgtgcgacctggagaccaagctgagaaaggaggagctgagcgaggagggctacctggccaaggtgaagagcctgctgaacaaggacctgagcctggagaacggcgcccacgcctacaacagagaggtgaacggcagactggagaacggcaaccaggccagaagcgaggccagaagagtgggcatggccgacgccaacagcccccccaagcccctgagcaagcccagaacccccagaagaagcaagagcgacggcgaggccaagcccgagcccagccccagccccagaatcaccagaaagagcaccagacagaccaccatcaccagccacttcgccaagggccccgccaagagaaagccccaggaggagagcgagagagccaagagcgacgagagcatcaaggaggaggacaaggaccaggacgagaagagaagaagagtgaccagcagagagagagtggccagacccctgcccgccgaggagcccgagagagccaagagcggcaccagaaccgagaaggaggaggagagagacgagaaggaggagaagagactgagaagccagaccaaggagcccacccccaagcagaagctgaaggaggagcccgacagagaggccagagccggcgtgcaggccgacgaggacgaggacggcgacgagaaggacgagaagaagcacagaagccagcccaaggacctggccgccaagagaagacccgaggagaaggagcccgagaaggtgaacccccagatcagcgacgagaaggacgaggacgagaaggaggagaagagaagaaagaccacccccaaggagcccaccgagaagaagatggccagagccaagaccgtgatgaacagcaagacccacccccccaagtgcatccagtgcggccagtacctggacgaccccgacctgaagtacggccagcacccccccgacgccgtggacgagccccagatgctgaccaacgagaagctgagcatcttcgacgccaacgagagcggcttcgagagctacgaggccctgccccagcacaagctgacctgcttcagcgtgtactgcaagcacggccacctgtgccccatcgacaccggcctgatcgagaagaacatcgagctgttcttcagcggcagcgccaagcccatctacgacgacgaccccagcctggagggcggcgtgaacggcaagaacctgggccccatcaacgagtggtggatcaccggcttcgacggcggcgagaaggccctgatcggcttcagcaccagcttcgccgagtacatcctgatggaccccagccccgagtacgcccccatcttcggcctgatgcaggagaagatctacatcagcaagatcgtggtggagttcctgcagagcaacagcgacagcacctacgaggacctgatcaacaagatcgagaccaccgtgccccccagcggcctgaacctgaacagattcaccgaggacagcctgctgagacacgcccagttcgtggtggagcaggtggagagctacgacgaggccggcgacagcgacgagcagcccatcttcctgaccccctgcatgagagacctgatcaagctggccggcgtgaccctgggccagagaagagcccaggccagaagacagaccatcagacacagcaccagagagaaggacagaggccccaccaaggccaccaccaccaagctggtgtaccagatcttcgacaccttcttcgccgagcagatcgagaaggacgacagagaggacaaggagaacgccttcaagagaagaagatgcggcgtgtgcgaggtgtgccagcagcccgagtgcggcaagtgcaaggcctgcaaggacatggtgaagttcggcggcagcggcagaagcaagcaggcctgccaggagagaagatgccccaacatggccatgaaggaggccgacgacgacgaggaggtggacgacaacatccccgagatgcccagccccaagaagatgcaccagggcaagaagaagaagcagaacaagaacagaatcagctgggtgggcgaggccgtgaagaccgacggcaagaagagctactacaagaaggtgtgcatcgacgccgagaccctggaggtgggcgactgcgtgagcgtgatccccgacgacagcagcaagcccctgtacctggccagagtgaccgccctgtgggaggacagcagcaacggccagatgttccacgcccactggttctgcgccggcaccgacaccgtgctgggcgccaccagcgaccccctggagctgttcctggtggacgagtgcgaggacatgcagctgagctacatccacagcaaggtgaaggtgatctacaaggcccccagcgagaactgggccatggagggcggcatggaccccgagagcctgctggagggcgacgacggcaagacctacttctaccagctgtggtacgaccaggactacgccagattcgagagcccccccaagacccagcccaccgaggacaacaagttcaagttctgcgtgagctgcgccagactggccgagatgagacagaaggagatccccagagtgctggagcagctggaggacctggacagcagagtgctgtactacagcgccaccaagaacggcatcctgtacagagtgggcgacggcgtgtacctgccccccgaggccttcaccttcaacatcaagctgagcagccccgtgaagagacccagaaaggagcccgtggacgaggacctgtaccccgagcactacagaaagtacagcgactacatcaagggcagcaacctggacgcccccgagccctacagaatcggcagaatcaaggagatcttctgccccaagaagagcaacggcagacccaacgagaccgacatcaagatcagagtgaacaagttctacagacccgagaacacccacaagagcacccccgccagctaccacgccgacatcaacctgctgtactggagcgacgaggaggccgtggtggacttcaaggccgtgcagggcagatgcaccgtggagtacggcgaggacctgcccgagtgcgtgcaggtgtacagcatgggcggccccaacagattctacttcctggaggcctacaacgccaagagcaagagcttcgaggacccccccaaccacgccagaagccccggcaacaagggcaagggcaagggcaagggcaagggcaagcccaagagccaggcctgcgagcccagcgagcccgagatcgagatcaagctgcccaagctgagaaccctggacgtgttcagcggctgcggcggcctgagcgagggcttccaccaggccggcatcagcgacaccctgtgggccatcgagatgtgggaccccgccgcccaggccttcagactgaacaaccccggcagcaccgtgttcaccgaggactgcaacatcctgctgaagctggtgatggccggcgagaccaccaacagcagaggccagagactgccccagaagggcgacgtggagatgctgtgcggcggccccccctgccagggcttcagcggcatgaacagattcaacagcagaacctacagcaagttcaagaacagcctggtggtgagcttcctgagctactgcgactactacagacccagattcttcctgctggagaacgtgagaaacttcgtgagcttcaagagaagcatggtgctgaagctgaccctgagatgcctggtgagaatgggctaccagtgcaccttcggcgtgctgcaggccggccagtacggcgtggcccagaccagaagaagagccatcatcctggccgccgcccccggcgagaagctgcccctgttccccgagcccctgcacgtgttcgcccccagagcctgccagctgagcgtggtggtggacgacaagaagttcgtgagcaacatcaccagactgagcagcggccccttcagaaccatcaccgtgagagacaccatgagcgacctgcccgaggtgagaaacggcgccagcgccctggagatcagctacaacggcgagccccagagctggttccagagacagctgagaggcgcccagtaccagcccatcctgagagaccacatctgcaaggacatgagcgccctggtggccgccagaatgagacacatccccctggcccccggcagcgactggagagacctgcccaacatcgaggtgagactgagcgacggcaccatggccagaaagctgagatacacccaccacgacagaaagaacggcagaagcagcagcggcgccctgagaggcgtgtgcagctgcgtggaggccggcaaggcctgcgaccccgccgccagacagttcaacaccctgatcccctggtgcctgccccacaccggcaacagacacaaccactgggccggcctgtacggcagactggagtgggacggcttcttcagcaccaccgtgaccaaccccgagcccatgggcaagcagggcagagtgctgcaccccgagcagcacagagtggtgagcgtgagagagtgcgccagaagccagggcttccccgacacctacagactgttcggcaacatcctggacaagcacagacaggtgggcaacgccgtgcccccccccctggccaaggccatcggcctggagatcaagctgtgcatgctggccaaggccagagagagcgccagcgccaagatcaaggaggaggaggccgccaaggactag

SEQ ID NO: 117397 - DNA, 5351 bp, Artificial Sequence
  derived and/or modified sequence
ggctccgttccatccttctgcacagggtatcgcctctctccgtttggtacatcccctcctcccccacgcccggactggggtggtagacgccgcctccgctcatcgcccctccccatcggtttccgcgcgaaaagccggggcgcctgcgctgccgccgccgcgtctgctgaagcctccgagatgccggcgcgtaccgccccagcccgggtgcccacactggccgtcccggccatctcgctgcccgacgatgtccgcaggcggctcaaagatttggaaagagacagcttaacagaaaaggaatgtgtgaaggagaaattgaatctcttgcacgaatttctgcaaacagaaataaagaatcagttatgtgacttggaaaccaaattacgtaaagaagaattatccgaggagggctacctggctaaagtcaaatcccttttaaataaagatttgtccttggagaacggtgctcatgcttacaaccgggaagtgaatggacgtctagaaaacgggaaccaagcaagaagtgaagcccgtagagtgggaatggcagatgccaacagcccccccaaacccctttccaaacctcgcacgcccaggaggagcaagtccgatggagaggctaagcctgaaccttcacctagccccaggattacaaggaaaagcaccaggcaaaccaccatcacatctcattttgcaaagggccctgccaaacggaaacctcaggaagagtctgaaagagccaaatcggatgagtccatcaaggaagaagacaaagaccaggatgagaagagacgtagagttacatccagagaacgagttgctagaccgcttcctgcagaagaacctgaaagagcaaaatcaggaacgcgcactgaaaaggaagaagaaagagatgaaaaagaagaaaagagactccgaagtcaaaccaaagaaccaacacccaaacagaaactgaaggaggagccggacagagaagccagggcaggcgtgcaggctgacgaggacgaagatggagacgagaaagatgagaagaagcacagaagtcaacccaaagatctagctgccaaacggaggcccgaagaaaaagaacctgaaaaagtaaatccacagatttctgatgaaaaagacgaggatgaaaaggaggagaagagacgcaaaacgacccccaaagaaccaacggagaaaaaaatggctcgcgccaaaacagtcatgaactccaagacccaccctcccaagtgcattcagtgcgggcagtacctggacgaccctgacctcaaatatgggcagcacccaccagacgcggtggatgagccacagatgctgacaaatgagaagctgtccatctttgatgccaacgagtctggctttgagagttatgaggcgcttccccagcacaaactgacctgcttcagtgtgtactgtaagcacggtcacctgtgtcccatcgacaccggcctcatcgagaagaatatcgaactcttcttttctggttcagcaaaaccaatctatgatgatgacccatctcttgaaggtggtgttaatggcaaaaatcttggccccataaatgaatggtggatcactggctttgatggaggtgaaaaggccctcatcggcttcagcacctcatttgccgaatacattctgatggatcccagtcccgagtatgcgcccatatttgggctgatgcaggagaagatctacatcagcaagattgtggtggagttcctgcagagcaattccgactcgacctatgaggacctgatcaacaagatcgagaccacggttcctccttctggcctcaacttgaaccgcttcacagaggactccctcctgcgacacgcgcagtttgtggtggagcaggtggagagttatgacgaggccggggacagtgatgagcagcccatcttcctgacaccctgcatgcgggacctgatcaagctggctggggtcacgctgggacagaggcgagcccaggcgaggcggcagaccatcaggcattctaccagggagaaggacaggggacccacgaaagccaccaccaccaagctggtctaccagatcttcgatactttcttcgcagagcaaattgaaaaggatgacagagaagacaaggagaacgcctttaagcgccggcgatgtggcgtctgtgaggtgtgtcagcagcctgagtgtgggaaatgtaaagcctgcaaggacatggttaaatttggtggcagtggacggagcaagcaggcttgccaagagcggaggtgtcccaatatggccatgaaggaggcagatgacgatgaggaagtcgatgataacatcccagagatgccgtcacccaaaaaaatgcaccaggggaagaagaagaaacagaacaagaatcgcatctcttgggtcggagaagccgtcaagactgatgggaagaagagttactataagaaggtgtgcattgatgcggaaaccctggaagtgggggactgtgtctctgttattccagatgattcctcaaaaccgctgtatctagcaagggtcacggcgctgtgggaggacagcagcaacgggcagatgtttcacgcccactggttctgcgctgggacagacacagtcctcggggccacgtcggaccctctggagctgttcttggtggatgaatgtgaggacatgcagctttcatatatccacagcaaagtgaaagtcatctacaaagccccctccgaaaactgggccatggagggaggcatggatcccgagtccctgctggagggggacgacgggaagacctacttctaccagctgtggtatgatcaagactacgcgagattcgagtcccctccaaaaacccagccaacagaggacaacaagttcaaattctgtgtgagctgtgcccgtctggctgagatgaggcaaaaagaaatccccagggtcctggagcagctcgaggacctggatagccgggtcctctactactcagccaccaagaacggcatcctgtaccgagttggtgatggtgtgtacctgccccctgaggccttcacgttcaacatcaagctgtccagtcccgtgaaacgcccacggaaggagcccgtggatgaggacctgtacccagagcactaccggaaatactccgactacatcaaaggcagcaacctggatgcccctgagccctaccgaattggccggatcaaagagatcttctgtcccaagaagagcaacggcaggcccaatgagactgacatcaaaatccgggtcaacaagttctacaggcctgagaacacccacaagtccactccagcgagctaccacgcagacatcaacctgctctactggagcgacgaggaggccgtggtggacttcaaggctgtgcagggccgctgcaccgtggagtatggggaggacctgcccgagtgcgtccaggtgtactccatgggcggccccaaccgcttctacttcctcgaggcctataatgcaaagagcaaaagctttgaagatcctcccaaccatgcccgtagccctggaaacaaagggaagggcaagggaaaagggaagggcaagcccaagtcccaagcctgtgagccgagcgagccagagatagagatcaagctgcccaagctgcggaccctggatgtgttttctggctgcggggggttgtcggagggattccaccaagcaggcatctctgacacgctgtgggccatcgagatgtgggaccctgcggcccaggcgttccggctgaacaaccccggctccacagtgttcacagaggactgcaacatcctgctgaagctggtcatggctggggagaccaccaactcccgcggccagcggctgccccagaagggagacgtggagatgctgtgcggcgggccgccctgccagggcttcagcggcatgaaccgcttcaattcgcgcacctactccaagttcaaaaactctctggtggtttccttcctcagctactgcgactactaccggccccggttcttcctcctggagaatgtcaggaactttgtctccttcaagcgctccatggtcctgaagctcaccctccgctgcctggtccgcatgggctatcagtgcaccttcggcgtgctgcaggccggtcagtacggcgtggcccagactaggaggcgggccatcatcctggccgcggcccctggagagaagctccctctgttcccggagccactgcacgtgtttgctccccgggcctgccagctgagcgtggtggtggatgacaagaagtttgtgagcaacataaccaggttgagctcgggtcctttccggaccatcacggtgcgagacacgatgtccgacctgccggaggtgcggaatggagcctcggcactggagatctcctacaacggggagcctcagtcctggttccagaggcagctccggggcgcacagtaccagcccatcctcagggaccacatctgtaaggacatgagtgcattggtggctgcccgcatgcggcacatccccttggccccagggtcagactggcgcgatctgcccaacatcgaggtgcggctctcagacggcaccatggccaggaagctgcggtatacccaccatgacaggaagaacggccgcagcagctctggggccctccgtggggtctgctcctgcgtggaagccggcaaagcctgcgaccccgcagccaggcagttcaacaccctcatcccctggtgcctgccccacaccgggaaccggcacaaccactgggctggcctctatggaaggctcgagtgggacggcttcttcagcacaaccgtcaccaaccccgagcccatgggcaagcagggccgcgtgctccacccagagcagcaccgtgtggtgagcgtgcgggagtgtgcccgctcccagggcttccctgacacctaccggctcttcggcaacatcctggacaagcaccggcaggtgggcaatgccgtgccaccgcccctggccaaagccattggcttggagatcaagctttgtatgttggccaaagcccgagagagtgcctcagctaaaataaaggaggaggaagctgctaaggactagttctgccctcccgtcacccctgtttctggcaccaggaatccccaacatgcactgatgttgtgtttttaacatgtcaatctgtccgttcacatgtgtggtacatggtgtttgtggccttggctgacatgaagctgttgtgtgaggttcgcttatcaactaatgatttagtgatcaaattgtgcagtactttgtgcattctggattttaaaagttttttattatgcattatatcaaatctaccactgtatgagtggaaattaagactttatgtagtttttatatgttgtaatatttcttcaaataaatctctcctataaacc

SEQ ID NO: 117398 - protein, 1865 aa, Artificial Sequence
  derived and/or modified sequence
MTRWVPTKREEKYGVAFYNYDARGADELSLQIGDTVHILETYEGWYRGYTLRKKSKKGIFPASYIHLKEAIVEGKGQHETVIPGDLPLIQEVTTTLREWSTIWRQLYVQDNREMFRSVRHMIYDLIEWRSQILSGTLPQDELKELKKKVTAKIDYGNRILDLDLVVRDEDGNILDPELTSTISLFRAHEIASKQVEERLQEEKSQKQNIDINRQAKFAATPSLALFVNLKNVVCKIGEDAEVLMSLYDPVESKFISENYLVRWSSSGLPKDIDRLHNLRAVFTDLGSKDLKREKISFVCQIVRVGRMELRDNNTRKLTSGLRRPFGVAVMDVTDIINGKVDDEDKQHFIPFQPVAGENDFLQTVINKVIAAKEVNHKGQGLWVTLKLLPGDIHQIRKEFPHLVDRTTAVARKTGFPEIIMPGDVRNDIYVTLVQGDFDKGSKTTAKNVEVTVSVYDEDGKRLEHVIFPGAGDEAISEYKSVIYYQVKQPRWFETVKVAIPIEDVNRSHLRFTFRHRSSQDSKDKSEKIFALAFVKLMRYDGTTLRDGEHDLIVYKAEAKKLEDAATYLSLPSTKAELEEKGHSATGKSMQSLGSCTISKDSFQISTLVCSTKLTQNVDLLGLLKWRSNTSLLQQNLRQLMKVDGGEVVKFLQDTLDALFNIMMENSESETFDTLVFDALVFIIGLIADRKFQHFNPVLETYIKKHFSATLAYTKLTKVLKNYVDGAEKPGVNEQLYKAMKALESIFKFIVRSRILFNQLYENKGEADFVESLLQLFRSINDMMSSMSDQTVRVKGAALKYLPTIVNDVKLVFDPKELSKMFTEFILNVPMGLLTIQKLYCLIEIVHSDLFTQHDCREILLPMMTDQLKYHLERQEDLEACCQLLSHILEVLYRKDVGPTQRHVQIIMEKLLRTVNRTVISMGRDSELIGNFVACMTAILRQMEDYHYAHLIKTFGKMRTDVVDFLMETFIMFKNLIGKNVYPFDWVIMNMVQNKVFLRAINQYADMLNKKFLDQANFELQLWNNYFHLAVAFLTQESLQLENFSSAKRAKILNKYGDMRRQIGFEIRDMWYNLGQHKIKFIPEMVGPILEMTLIPETELRKATIPIFFDMMQCEFHSTRSFQMFENEIITKLDHEVEGGRGDEQYKVLFDKILLEHCRKHKYLAKTGETFVKLVVRLMERLLDYRTIMHDENKENRMSCTVNVLNFYKEIEREEMYIRYLYKLCDLHKECDNYTEAAYTLLLHAKLLKWSEDVCVAHLTQRDGYQATTQGQLKEQLYQEIIHYFDKGKMWEEAIALGKELAEQYENEMFDYEQLSELLKKQAQFYENIVKVIRPKPDYFAVGYYGQGFPTFLRGKVFIYRGKEYERREDFEARLLTQFPNAEKMKTTSPPGDDIKNSPGQYIQCFTVKPKLDLPPKFHRPVSEQIVSFYRVNEVQRFEYSRPIRKGEKNPDNEFANMWIERTIYTTAYKLPGILRWFEVKSVFMVEISPLENAIETMQLTNDKINSMVQQHLDDPSLPINPLSMLLNGIVDPAVMGGFANYEKAFFTDRYLQEHPEAHEKIEKLKDLIAWQIPFLAEGIRIHGDKVTEALRPFHERMEACFKQLKEKVEKEYGVRIMPSSLDDRRGSRPRSMVRSFTMPSSSRPLSVASVSSLSSDSTPSRPGSDGFALEPLLPKKMHSRSQDKLDKDDLEKEKKDKKKEKRNSKHQEIFEKEFKPTDISLQQSEAVILSETISPLRPQRPKSQVMNVIGSERRFSVSPSSPSSQQTPPPVTPRAKLSFSMQSSLELNGMTGADVADVPPPLPLKGSVADYGNLMENQDLLGSPTPPPPPPHQRHLPPPLPSKTPPPPPPKTTRKQASVDSGIVQ

SEQ ID NO: 117399 - DNA, 5598 bp, Artificial Sequence
  derived and/or modified sequence
atgacacgctgggtccccacaaagagggaggaaaagtacggagtcgcgttttacaattatgacgctcgcggggccgacgagttaagcctgcagattggagacactgtgcacatcctggaaacctatgaaggatggtatagaggctacactttacgcaaaaaatccaaaaaaggtatcttccccgcttcttacatccacctcaaagaggccatcgtcgaaggaaaagggcagcatgagactgtgatccccggcgacctgcccctgattcaggaagtgacaacaaccctgcgcgaatggagtacaatttggcgccagctctatgtccaagataatcgggagatgttcagaagcgttcggcacatgatctacgatctgatcgagtggcgctcgcagattctgtccggtacgcttccccaggatgaattgaaggaactgaaaaagaaggtgacagccaaaatcgactacgggaatcgcattttggacctagatctcgtggtgagagatgaggacggtaacatcctggaccccgagctcacaagtaccatatctttatttagagcccacgaaatagcatcgaagcaagtcgaggagcggctgcaggaagaaaaaagccagaagcaaaacatcgatataaataggcaagccaaatttgccgccacaccttccctggccctgttcgtaaatctcaagaatgtcgtgtgcaagatcggagaggacgccgaggtgctaatgagcttgtacgatccagtcgagagtaagtttataagcgagaactacctagtgcggtggtctagctccggcttgccaaaggatattgatcgtttacacaatctacgcgccgtttttactgatttgggaagtaaagacctgaagagggagaaaatcagcttcgtgtgtcaaatcgtgagggtgggcaggatggagctccgggataacaacactagaaagctcacatccggcctgagacgtcctttcggggtagccgtgatggacgttaccgatattataaatgggaaagtcgacgacgaggataaacagcattttattcccttccagcccgtggccggcgagaatgatttccttcagaccgtcataaacaaagtcatagctgctaaagaagtgaatcacaagggccaaggtctctgggtgaccctaaaactccttcccggagatatccaccagatcagaaaagagtttccacatttggttgatcggaccaccgccgtggcccgcaaaacgggctttccggaaatcattatgcccggggacgtgagaaatgatatatatgtcaccctcgttcagggtgatttcgacaaaggctctaaaaccactgccaaaaacgtggaagttacagtgagtgtctacgatgaggatggtaaaagacttgagcatgtgatcttcccaggggctggtgatgaggctatttcagagtacaagagtgtgatctattatcaggtaaaacaaccacgatggtttgaaacagtgaaagtggcgatccccatcgaggacgttaatcgctctcacctgagattcacatttcggcatcgtagctctcaggattcgaaagataagtcagagaagattttcgcattggccttcgtgaagctcatgagatatgacggtaccacacttagagacggggagcacgatttgattgtctataaagcagaggccaagaaactggaagacgctgcaacgtacctgtccctcccgagcactaaggccgagcttgaggagaaaggtcactccgctaccggcaaatctatgcagtcgctcggaagctgcacaatttcaaaagactcattccagatttccacccttgtctgctctacaaaactgacccagaatgtagacctgctcggcctgctgaaatggcgaagcaacacgtcgctactgcagcagaatctgcgccaattaatgaaggtggacggtggagaagtcgtcaaatttcttcaagatactctcgacgccctgtttaacattatgatggaaaatagtgaatccgaaacgttcgacactctagtgttcgatgcattggtttttattatcggtttgatagccgacaggaagtttcagcattttaatcctgtactcgagacctacataaagaaacatttttccgctaccttggcatataccaagcttaccaaggtgcttaagaactacgtcgatggagctgagaagcccggcgtgaatgagcagctctacaaggccatgaaagcacttgagagtatcttcaagttcattgtgcgcagtagaattttatttaaccagctgtacgagaataagggcgaggccgatttcgtggagtccctgcttcagttgttccggtcaattaatgatatgatgtccagtatgagtgatcagaccgtgagagtaaagggcgctgcacttaagtacctgcctacaattgtcaatgatgtaaagttggtgttcgatccaaaagagctcagcaaaatgttcaccgaatttatcctgaatgtacccatggggctgctgacaatccagaagctctactgtctcatcgaaattgtgcatagtgatctgtttactcagcacgactgtcgggaaattctgctacccatgatgactgaccagttgaagtatcatctcgaacggcaggaggacctcgaagcctgttgtcagctgctgagtcacattctcgaagtgttgtaccgaaaggatgtgggcccaacgcaaaggcacgttcagataataatggagaagcttctgagaaccgtgaatcggactgtgattagtatgggtagggactctgaactgataggcaattttgtggcttgcatgacggcgatcctgagacagatggaagactatcactacgctcatctgattaagacctttggcaagatgagaacagacgtggtggattttctcatggagacgtttattatgttcaaaaacctgatcggtaagaatgtatacccctttgattgggtgatcatgaatatggtccagaacaaagtgttccttcgtgcaatcaaccagtacgcagatatgctgaacaagaagttcctggatcaggcaaatttcgagctccagctgtggaacaattattttcacctcgcggtggcgtttctgacacaggagagccttcagctcgaaaacttctcatccgccaagagggctaagatcctgaataagtatggggacatgagacgacagattggctttgagattagggatatgtggtacaatctgggccaacacaaaatcaagtttattccagagatggtcggtcccatcctagagatgactctgattccagagactgagctgaggaaggccacaatacctatcttcttcgatatgatgcaatgtgagttccactccacccgctcctttcaaatgttcgaaaacgagatcatcaccaaactggaccacgaagttgaagggggccgcggcgacgagcagtataaagtgctcttcgacaaaatccttctggaacattgtcggaagcataagtacttagccaagaccggagaaactttcgtgaagctagtggtgaggcttatggagcgcctgcttgactaccggacaattatgcacgatgagaacaaggaaaaccggatgtcatgtaccgtgaatgtgttaaatttctacaaagagattgagagagaggagatgtatattcgatacttatataaactctgcgatctccataaggagtgcgacaactacacagaagcagcatataccctgctactgcacgcaaagttgcttaagtggagcgaggatgtgtgcgtggctcatcttacccagagggacgggtaccaggcgaccactcagggtcagctgaaagagcagctgtaccaggagataattcattattttgacaaaggaaagatgtgggaagaagccatcgccctcgggaaagagttggccgagcagtacgagaatgagatgttcgattatgagcagttgagcgaactactgaagaagcaggcccagttctacgagaacattgtgaaggtaatccggcctaagcccgattattttgccgtcggatattatggccagggattccccacatttcttcgcgggaaggtctttatctaccgcggtaaagaatacgaaagaagggaggacttcgaagcccgccttctgacccagttcccaaacgctgagaagatgaaaaccaccagtccccctggagatgacattaaaaattcacctggccaatatatccagtgcttcactgttaaacctaaactggatctcccccctaaattccaccgtcctgtgtccgagcagatcgtcagcttttatcgcgttaatgaggttcaaagatttgagtattcccgtccaattcggaaaggagaaaaaaatcctgacaacgaatttgcaaacatgtggattgagcggacaatctataccaccgcctacaaactgccaggcattctcaggtggttcgaggtaaaatctgtgtttatggttgagattagcccacttgaaaacgctatcgagaccatgcagctgacgaacgataagattaactctatggtgcagcaacatcttgacgaccctagcctaccaatcaacccgttaagcatgctgcttaacgggattgtcgacccagctgtcatgggcggctttgcgaattacgagaaagccttttttaccgatagatatttacaagagcaccctgaggcccacgaaaaaattgagaaactcaaagacttgatcgcgtggcagattcctttcctggcagagggaatcaggattcatggtgataaagtcaccgaagccctgaggccttttcatgagcggatggaggcgtgcttcaagcagttgaaggagaaagtcgagaaggaatatggtgtcagaataatgccttcgtctctagatgataggcgcggaagcaggccccgtagcatggtccgaagttttacgatgccaagttcttctaggcccttgtctgtggcctctgtgtcaagtctgagtagcgacagtaccccctcccgaccaggctcggacggttttgccctcgaaccactccttcctaagaaaatgcattcgcgctcgcaggataagctggacaaggacgaccttgagaaagagaagaaggacaagaaaaaagaaaagcggaactccaagcaccaggagatctttgaaaaggagttcaaacctactgacatctccctgcaacaatctgaagcagtgatattgtccgagactattagccccctgagaccacagaggccaaaatcccaggtaatgaatgtcatcggctctgagcgccggttcagcgtctcaccaagttccccaagttcccaacagacgccgcccccggtcacacctcgcgctaagttgtcattttcaatgcagtcatcgctggagctcaacggtatgactggtgcagacgtcgcagacgtgccgccacccctgcccctgaagggaagtgttgctgattacgggaacctgatggagaaccaggatctgctaggttctcctacaccgccccccccaccaccacaccagcggcacctgcccccaccactgccctcaaagacacctcctccccccccccctaagactactcggaaacaggcctccgtcgactcaggtattgtccagtag

SEQ ID NO: 117400 - DNA, 5598 bp, Artificial Sequence
  derived and/or modified sequence
atgacccgctgggtgcccaccaagcgggaggagaagtatggagtggccttctacaactatgatgcccggggagcagatgagctgagcctgcagatcggggacacagtgcacatcctggagacctatgagggctggtaccggggctacaccctgaggaagaagagcaagaagggcatcttccctgccagctacatccacctgaaggaggccatcgtggagggcaagggccagcacgagaccgtcatccctggggacctgcccctcatccaggaggtgaccaccaccctgcgggagtggagcaccatctggaggcagctgtatgtgcaggacaaccgggagatgttccgctctgtgcgccacatgatctatgacctgattgagtggaggagccagatcctgagcggcaccctgccccaggatgagctgaaggagctgaagaagaaggtgacagccaagattgattatggcaaccgcatcctggacctggacctggtggtgagagatgaagatggcaacatcctggaccctgagctgaccagcaccatcagcctcttccgggcccacgagatcgccagcaagcaggtggaggagcggctgcaggaggagaagagccagaagcagaacatcgacatcaaccggcaggccaagtttgctgccacccccagcctggccctgtttgtgaacctgaagaatgtggtgtgcaagatcggggaggatgctgaggtgctgatgagcctgtatgaccctgtggagagcaagttcatcagcgagaactacctggtgcgctggagcagcagcggcctgcccaaggacatcgaccggctgcacaacctgcgggctgtgttcacagacctgggcagcaaggacctgaagcgggagaagatcagctttgtgtgccagatcgtgcgggtgggccgcatggagctgcgggacaacaacaccaggaagctgaccagcggcctgcggcggccctttggagtggccgtgatggatgtgacagacatcatcaatggcaaggtggatgatgaggacaagcagcacttcatccccttccagcctgtggccggagaaaatgacttcctgcagaccgtcatcaacaaggtgattgctgccaaggaggtgaaccacaagggccagggcctgtgggtgaccctgaagctgctgcccggggacatccaccagatcaggaaggagttcccccacctggtggacaggaccacagctgtggccaggaagacaggcttccctgagatcatcatgcctggagatgtgagaaatgacatctacgtgaccctggtgcagggcgactttgataaaggcagcaagaccacagccaagaatgtggaggtgacagtgtctgtgtatgatgaagatggcaagaggctggagcacgtgatcttccctggagctggagatgaggccatcagcgagtacaagagcgtcatctactaccaggtgaagcagccccgctggtttgagaccgtgaaggtggccatccccattgaagatgtgaacagaagccacctgcgcttcaccttccgccacaggagcagccaggacagcaaggacaagtctgagaagatctttgccctggcctttgtgaagctgatgagatatgatggcaccaccctgagagatggagaacatgacctgattgtgtacaaggccgaggccaagaagctggaggatgctgccacctacctgagcctgcccagcaccaaggccgagctggaggagaagggccacagcgccaccgggaagtccatgcagagcctgggcagctgcaccatcagcaaggacagcttccagatcagcaccctggtgtgcagcaccaagctgacccagaatgtggacctgctgggcctgctgaagtggaggagcaacaccagcctgctgcagcagaacctgcggcagctgatgaaggtggatggaggagaggtggtgaagttcctgcaggacaccctggatgccctcttcaacatcatgatggagaacagcgagagcgagacctttgacaccctggtgtttgatgccctggtgttcatcatcggcctgattgctgacaggaagttccagcacttcaaccctgtgctggagacctacatcaagaagcacttcagcgccaccctggcctacaccaagctgaccaaggtgctgaagaactacgtggatggagctgagaagccaggagtgaatgagcagctgtacaaggccatgaaggccctggagagcatcttcaagttcatcgtgcgcagccgcatcctcttcaaccagctgtatgaaaataaaggagaggccgactttgtggagagcctgctgcagctgttccgcagcatcaatgacatgatgagctccatgtctgaccagacagtgcgggtgaagggggccgccctgaagtacctgcccaccatcgtgaatgatgtgaagctggtgtttgaccccaaggagctgagcaagatgttcacagagttcatcctgaatgtgcccatgggcctgctgaccatccagaagctgtactgcctgattgagatcgtgcacagcgacctcttcacccagcacgactgccgggagatcctgctgcccatgatgacagaccagctgaagtaccacctggagcggcaggaggacctggaggcctgctgccagctgctgagccacatcctggaggtgctgtacaggaaggatgtgggccccacccagagacatgtgcagatcatcatggagaagctgctgaggacagtgaacagaactgtcatctccatgggccgggacagcgagctgattggcaactttgtggcctgcatgacagccatcctgcggcagatggaggactaccactacgcccacctgatcaagaccttcggcaagatgaggacagatgtggtggacttcctgatggagaccttcatcatgttcaagaacctgattggcaagaatgtgtacccctttgactgggtgatcatgaacatggtgcagaacaaggtgttcctgcgggccatcaaccagtatgctgacatgctgaacaagaagttcctggaccaggccaactttgagctgcagctgtggaacaactacttccacctggccgtggccttcctgacccaggagagcctgcagctggagaacttcagcagcgccaagagggccaagatcctgaacaagtatggagacatgaggcggcagatcggctttgagatccgggacatgtggtacaacctgggccagcacaagatcaagttcatccctgagatggtgggccccatcctggagatgaccctcatccctgagacagagctgaggaaggccaccatccccatcttctttgacatgatgcagtgtgagttccacagcaccaggagcttccagatgtttgaaaatgagatcatcaccaagctggaccacgaggtggagggcggcagaggagatgagcagtacaaggtgctgtttgacaagatcctgctggagcactgcaggaagcacaagtacctggccaagacaggagagacctttgtgaagctggtggtgcggctgatggagcggctgctggactaccgcaccatcatgcatgatgagaacaaggagaacaggatgagctgcaccgtgaatgtgctgaacttctacaaggagattgaaagagaggagatgtacatccgctacctgtacaagctgtgtgacctgcacaaggaatgtgacaactacacagaggccgcctacaccctgctgctgcacgccaagctgctgaagtggagcgaagatgtgtgtgtggcccacctgacccagagagatggctaccaggccaccacccagggccagctgaaggagcagctgtaccaggagatcatccactactttgacaagggcaagatgtgggaggaggccatcgccctgggcaaggagctggccgagcagtatgaaaatgagatgtttgattatgagcagctgtctgagctgctgaagaagcaggcccagttctatgagaacatcgtgaaggtgatccggcccaagccagactactttgctgtgggctactacggccagggcttccccaccttcctgcggggcaaggtgttcatctaccggggcaaggagtatgaaagaagagaggactttgaggcccggctgctgacccagttccccaatgctgagaagatgaagaccaccagccccccaggagatgacatcaagaacagccctggccagtacatccagtgcttcaccgtgaagcccaagctggacctgccccccaagttccacaggcctgtgtctgagcagatcgtgtccttctacagagtgaatgaggtgcagagatttgagtacagccggcccatcagaaaaggagagaagaacccagacaatgaatttgccaacatgtggattgaaagaaccatctacaccacagcctacaagctgcccggcatcctgcgctggtttgaggtgaagtctgtgttcatggtggagatcagccccctggagaatgccatcgagaccatgcagctgaccaatgacaagatcaacagcatggtgcagcagcacctggatgaccccagcctgcccatcaaccccctgtccatgctgctgaatggaattgtggaccctgctgtgatgggcggctttgccaactatgagaaggccttcttcacagaccgctacctgcaggagcaccctgaggcccacgagaagattgagaagctgaaggacctgattgcctggcagatccccttcctggccgagggcatccgcatccacggggacaaggtgacagaggccctgcggcccttccacgagaggatggaggcctgcttcaagcagctgaaggagaaggtggagaaggagtatggagtgcgcatcatgcccagcagcctggatgaccggcggggcagccggcccaggtccatggtgcgctccttcaccatgcccagcagcagccggcccctgtctgtggcctctgtgagcagcctgagcagtgacagcacccccagccggcccggcagtgatggctttgccctggagcccctgctgcccaagaagatgcacagccgcagccaggacaagctggacaaggatgacctggagaaggagaagaaggacaagaagaaggagaagaggaacagcaagcaccaggagatctttgagaaggagttcaagcccacagacatcagcctgcagcagagcgaggccgtcatcctgtctgagaccatcagccccctgcggccccagaggcccaagagccaggtgatgaatgtgattggcagcgagcggcgcttctctgtgagccccagcagccccagcagccagcagaccccacctcctgtgaccccccgggccaagctgtccttctccatgcagagcagcctggagctgaatggcatgactggagcagatgtggctgatgtgcccccacccctgcccctgaagggctctgtggccgactatggcaacctgatggagaaccaggacctgctgggcagccccaccccacctcctcctccaccccaccagaggcacctgcccccacccctgcccagcaagaccccacctcctcctccacccaagaccaccaggaagcaggcctctgtggacagcggcatcgtgcagtag

SEQ ID NO: 117401 - DNA, 5598 bp, Artificial Sequence
  derived and/or modified sequence
atgacccggtgggtgcccaccaagcgggaggagaagtacggcgtggcattttataattacgacgcccgtggtgccgacgagctgagcctgcaaataggggatacagtccatattctggaaacctatgaagggtggtacagaggctacacacttcgcaagaaatccaaaaagggaatcttccccgccagttacattcacctcaaggaggccattgtcgagggcaaaggccaacatgagactgtgatccctggggacctgcctctaattcaggaagtaacgacgactctgcgcgaatggtcaactatttggcgtcaactgtacgtccaggacaaccgcgagatgtttaggtctgttaggcatatgatatacgacctgatcgaatggcggagtcagatccttagcggaacattaccacaggatgaattgaaagagctcaaaaagaaggtcaccgcaaaaattgattacggcaacaggatcttagatttggacctggtcgtccgagatgaagatgggaacatactggatccagagctgacaagcaccatcagtctctttcgcgctcatgagatagcatccaaacaagtggaagagagattacaagaagagaagagccaaaaacagaatatagatatcaacaggcaggccaaattcgcagcaactcccagtctcgccttgttcgttaacctgaaaaatgtggtttgcaaaatcggtgaggacgcagaggtgcttatgtctctgtatgatccagtggaaagcaagttcatttccgaaaactacctcgtcagatggtcttcatcaggcctgccaaaagacatcgatcgactccataacttacgagccgtattcacagatctcggttctaaagacctgaaacgggaaaaaatttccttcgtgtgccaaatcgttagggttggacggatggaactgcgcgacaacaacactcgcaaacttacgagcggtctgcggcgcccctttggcgtggccgtgatggacgtgaccgacatcatcaatggcaaagtcgatgacgaagataaacaacactttattccatttcagcccgtggccggagagaatgacttccttcagactgtcatcaataaggtgatagcggctaaagaggtcaatcataaagggcaaggcttgtgggtcacgcttaagctcctacccggcgacattcatcagatccgaaaggaattcccccatctggtagaccgaacaacagccgtcgcgcgcaagacaggatttcctgagataataatgccaggtgatgtcaggaacgatatatacgtcaccctggtccagggcgacttcgataaggggagtaaaaccacggcaaagaatgtggaggtgactgtgagtgtgtatgacgaggacggcaagcgacttgagcacgtcatattccctggcgccggggacgaggccatctcagaatacaagtcagtgatctattaccaggtgaaacagccccgctggtttgagaccgtcaaagttgcgattcccattgaggatgtgaaccgatctcaccttagatttacatttagacaccggagttcccaagactcaaaggacaaaagcgaaaagatattcgccctagcttttgtcaaattgatgcgatatgacgggaccactcttcgagacggagagcatgacctgattgtttataaggctgaagctaaaaagctggaagatgccgccacctacctgtccctacctagcaccaaagctgagctggaagagaaagggcatagcgcaacaggcaagagcatgcagagcctggggtcatgcaccatttccaaagactcatttcagatctcaacactggtttgttccactaagctcactcagaatgtggacctcctcggacttctgaaatggaggtccaacacatcactgctgcagcagaatttgcgtcagctcatgaaagtagatggcggtgaagtggttaaatttctccaagacactcttgatgctctgttcaatattatgatggagaattcagagtccgaaacatttgacacactggtgtttgacgccctggtctttattatcggactcattgctgacaggaaattccaacactttaatccagtacttgagacatacattaaaaaacacttcagtgccactttggcttacaccaagttgaccaaagtgttgaaaaattacgtcgacggtgccgaaaagccgggggtgaacgaacaattgtataaagccatgaaagctcttgaatctatcttcaagtttatcgtccggagccggattctgtttaatcagctgtacgagaacaagggggaggccgactttgttgagtctctcttgcaattgtttagatctattaatgacatgatgagctctatgtcagaccagaccgtccgggttaaaggggccgcgctgaagtacttgccgaccatagtcaatgatgtcaaactggttttcgaccccaaagagctatccaagatgtttacagagttcatcctgaatgtccccatgggcctcctgacgatccaaaaactctattgcctgattgagatcgtgcatagcgacttgtttactcagcacgattgtcgtgagatcctgctgcctatgatgactgaccagctgaagtaccacctcgaaaggcaggaggatttagaagcctgctgtcaactcctgtctcacattctcgaggtgctatatcgcaaggatgtgggacccactcagcgccatgtccagatcatcatggaaaagctgttaaggactgtgaacaggaccgtcattagcatgggacgcgacagtgaactcataggaaatttcgtagcctgcatgactgctatcctgcggcagatggaagactaccactatgcccacttaattaagacatttggcaaaatgcggactgatgtggtcgacttcctgatggagacctttattatgtttaaaaatcttatcggaaaaaatgtctacccattcgattgggttatcatgaacatggtccaaaataaggtgttcctgagagcaattaaccagtatgctgacatgctgaataagaaatttttagatcaggccaatttcgaattacagctttggaataattacttccacctagccgtggccttccttactcaggaatcactccagctggaaaacttttcttccgcaaaacgtgctaagattctcaataagtatggggacatgcggaggcagatcggctttgagatccgcgacatgtggtataacctcggccagcataagatcaaattcatccctgagatggtcggacccatcctggagatgactcttattcctgaaactgagctgcgtaaggccacaatcccaatattttttgatatgatgcagtgcgagtttcactcaacgagatcctttcaaatgttcgagaacgagattattaccaagctggatcatgaagtggagggcgggcgcggcgacgagcagtataaggtgctcttcgataagatcttactggagcactgccgtaaacacaagtaccttgcgaagacaggcgagaccttcgtcaagcttgttgtccgtctaatggagcgcctgcttgattataggacgatcatgcacgacgagaataaagagaatcgcatgagttgcaccgtcaacgtgcttaacttctataaggagatagagcgagaggaaatgtacatacgctacttatacaaattatgtgatctgcacaaggagtgcgataattacaccgaggccgcctatacattacttttgcatgccaaactgttgaaatggtccgaagatgtgtgcgttgcccatctgacccagagagacggttaccaggctaccacccaagggcaattgaaagaacagttgtaccaagagatcattcattattttgataaggggaaaatgtgggaagaagctatcgccttaggcaaagaactggccgagcaatatgaaaacgaaatgtttgattacgagcagcttagtgaacttttgaaaaagcaagcgcagttttacgaaaatattgtcaaagtaattcgcccaaaaccagattacttcgcagtaggatattacggacagggctttcctaccttcttaaggggcaaggtgttcatctatcgcggcaaagaatacgagagacgagaagattttgaggccagactgctgactcagtttcccaatgcagaaaagatgaaaacgacttcccctcccggagatgacatcaaaaattccccaggccaatacattcagtgcttcacagtcaaaccaaagttggacctgcccccgaaatttcaccgcccagtgagtgagcaaatcgtgagcttttaccgggtgaatgaggtccagcggtttgaatactctcgtcccattagaaagggtgagaaaaaccctgacaacgaatttgcaaatatgtggatcgagagaaccatttatacaacggcctacaagctccccggcattttgagatggtttgaggttaagtcggttttcatggtcgagattagccccttggagaatgccatcgaaaccatgcagttgaccaacgataagattaactccatggttcagcaacacctagacgaccccagcctcccaattaaccccttgagcatgctccttaacggaatcgtcgatcctgccgtcatgggcgggtttgccaattatgagaaggccttttttacagaccggtatctccaggagcatcccgaggctcacgagaaaatcgaaaagctgaaagatctcatcgcatggcaaataccatttcttgctgaaggtataaggatccacggtgacaaagtcacagaagctttgaggccatttcacgagcgcatggaggcctgctttaagcaactgaaagagaaggtggagaaggaatatggtgtgcggattatgccgtcaagcctcgatgacagaagaggcagccgcccccgatcaatggttcgaagcttcactatgcctagctcatccaggccactgagtgtggcttcagtatcatccttgagtagcgactctactccttccaggcccgggagcgatggattcgctctggagcctcttctaccaaaaaagatgcactcccggtcccaggacaaactggataaggatgacttagaaaaggaaaaaaaagataaaaaaaaagaaaagagaaactctaagcatcaggaaatctttgaaaaggaatttaagccaaccgatattagtctccaacaatcggaagctgtgattttgtcagaaaccatctccccactgaggcctcagagacccaaaagccaggtgatgaatgtcatcggctctgaacgacgttttagcgttagtcccagtagtccttcatctcaacagactccaccccctgttacaccgagggctaaactatcattctccatgcagtcctccttggaattgaatggaatgacaggggctgacgtagctgacgtgccacccccgcttccccttaagggctccgtcgctgattatggaaacctgatggagaatcaggacttgttgggcagtcccactcctcctcctccgcctccccaccagagacacttaccgccccccttgccttccaagacccctcctccacctccaccaaaaacaacgagaaaacaggcatcagtcgatagtggaatcgtgcagtag

SEQ ID NO: 117402 - DNA, 5598 bp, Artificial Sequence
  derived and/or modified sequence
atgacgcggtgggtgccgactaaacgggaggagaaatacggagtggctttttataattatgacgcacgcggagcagacgagttgtctctgcagattggcgatactgtgcatatcctcgaaacctatgaggggtggtacaggggatacaccctcagaaagaaaagtaaaaaagggatcttccctgccagttatatccacttaaaggaggccatcgtggagggtaaaggccagcacgagaccgttatccctggagatttacctctgatacaggaggttactaccactttacgcgagtggtccacgatctggagacagctgtacgttcaggataatcgagaaatgttccgctccgtgcggcacatgatttatgatctgatcgagtggagaagccagattctgagcggaactctcccacaagatgagctgaaggagctcaaaaagaaggtcaccgctaagattgactatggcaacaggattctcgacctggatcttgtggtgcgagacgaagatgggaatattcttgatccagagttgacatccaccattagcctgttccgcgcacacgagattgccagcaagcaagttgaagaaaggctgcaagaagagaagagtcagaagcagaacatcgacataaaccgccaggccaaattcgctgccacaccaagcctggcgctgtttgtaaacttgaagaacgttgtatgcaagatcggcgaagatgccgaggttctgatgagcctgtacgaccccgtggaatccaagttcattagtgaaaattatctggtcaggtggagctcgagtggtctcccaaaggacatcgatcgactgcataacctgagagcagttttcaccgacctggggagtaaagacttaaaacgtgaaaaaatcagtttcgtgtgtcaaatagtaagagttggaagaatggagctgcgtgacaacaacacacggaagctaacttctggtctcaggcgaccttttggagtcgctgtgatggacgtcactgatatcatcaatggcaaggttgacgacgaggacaaacagcactttattccatttcagccagtggcaggggaaaatgacttcttgcaaacagttatcaataaagttatcgccgcaaaagaagtcaaccacaaggggcaagggctctgggtgacattgaagttactaccaggtgacattcaccagatccggaaagaatttcctcatttggtagaccggacaaccgcagtcgccaggaaaactgggttcccagagattataatgccaggtgatgtgcggaacgatatctatgtcacactggtgcagggcgattttgacaagggatctaagacaaccgccaagaacgtggaggtgaccgtgtcagtctacgatgaagacggaaaacggctggagcatgtgatattcccaggcgctggcgatgaagctatctctgagtacaaatctgtgatctactaccaggtaaagcagcccaggtggtttgagacggtcaaggtggccatccctattgaagatgtgaaccggtcccacctgcggttcacctttcggcacaggtcttcacaggatagcaaggataaaagtgagaagattttcgccttagcctttgtgaaactcatgcggtacgatggcactacacttcgagacggagaacacgatctcattgtttacaaggccgaggctaaaaaactcgaggatgctgctacttatctctctctgcctagtacaaaggctgagctcgaggaaaagggtcacagcgcgacgggaaaaagtatgcagtcactgggtagctgcacaataagcaaggactcattccagatcagcaccctcgtgtgttcaacaaagttgacccaaaatgtggacctgttgggcttgctgaaatggcgctcaaatacatcgctgcttcagcaaaacctgaggcagctgatgaaagttgacggcggtgaagttgtcaagttccttcaggataccctggatgccctcttcaacatcatgatggagaacagcgaatcggagactttcgataccctagtgttcgacgctctggttttcatcataggactgattgcagacaggaaattccagcacttcaaccctgttctggagacatatataaagaaacatttttcagccaccctggcctacacaaagctaaccaaggtgttgaagaactatgtagacggagccgaaaagccaggagtgaacgaacagctctacaaagccatgaaagcattggaatccatttttaaattcattgtgaggagccgcattttgtttaatcaactctacgaaaacaagggggaggctgactttgtcgagtcactcctgcagctgttccggtccattaacgatatgatgagctccatgagcgaccagacagtacgcgtgaagggcgcagccttgaaatacctgccgacaatcgtgaatgacgttaagttggtgtttgacccgaaagagctgtccaagatgtttacagaatttatcttaaacgtccccatggggcttcttaccatacagaaactgtactgtcttatagagatcgttcatagcgatctgttcacccagcatgattgccgggagatactactgcctatgatgacggatcagctcaagtaccacttggaaaggcaggaagatctggaagcgtgctgccaactgttaagccacattttagaagtcctttaccggaaagacgtcggtcctacccagcggcacgtacaaatcattatggaaaaactgctgcggaccgtgaatagaacggtgataagtatgggcagggacagcgagctaatagggaacttcgttgcatgcatgactgccatacttcggcagatggaagactaccactacgctcaccttatcaagacttttgggaaaatgcggacagatgtggttgatttcctgatggaaacatttatcatgttcaagaaccttatcggcaagaacgtttacccctttgactgggtgattatgaacatggttcaaaacaaagtttttttgcgcgcaattaaccaatacgctgacatgctcaacaaaaagtttcttgaccaggccaattttgaactgcagctttggaacaactatttccaccttgcagtagccttccttacacaggaaagtctacagctagaaaatttctcatcggccaaaagagctaagattttgaataagtatggcgacatgagaaggcaaatcggctttgagatcagggatatgtggtacaacttaggccagcacaaaataaaatttatccctgagatggtcggacctatcttggaaatgaccttgatccccgagacagagctgcgcaaagccactatcccaatttttttcgacatgatgcagtgtgagtttcattctacaagaagtttccaaatgtttgagaacgaaattattacaaaactggatcatgaggtggagggtggcaggggagacgagcagtataaagtgctgtttgacaagatcttgctggagcactgccgcaagcacaaatacctcgcaaaaaccggcgagacattcgtaaaacttgtggtgcgacttatggaacggctgcttgattatcgaacaatcatgcacgatgaaaataaagaaaataggatgtcttgcacagtcaatgtgctgaacttttacaaggaaatcgagagagaggaaatgtacatccgctacctatataagctctgcgatctacacaaggagtgcgataactacaccgaagcagcgtatactcttttgctgcatgccaaactgttgaagtggtcggaagatgtgtgcgtcgctcaccttacgcaaagagatggctaccaggctaccacgcaggggcagctgaaagagcagctgtatcaagaaataatccactactttgacaagggcaagatgtgggaggaggctatcgcgctgggaaaagaactcgctgagcagtacgaaaacgagatgtttgattatgaacagctgtctgagctgctcaagaagcaggcccaattttacgagaatatagtgaaggttatacgcccaaagcccgactacttcgccgtgggctattatggacagggattccctactttcctgaggggaaaggtttttatctacaggggcaaggaatacgaaagaagagaagacttcgaggccagactgctgacccagtttcctaacgccgagaagatgaagaccacaagcccccctggcgatgacataaagaactctcctggacagtacattcagtgtttcactgttaagcctaagctggatctgcctcccaaatttcaccgcccagtgtccgagcaaatcgtgagcttctaccgcgtcaatgaggttcagcgcttcgagtatagcaggccaattcgtaaaggcgagaaaaatcctgataatgagtttgcaaacatgtggattgaaagaaccatctatacgaccgcatataaactcccaggtatcttacgctggtttgaggttaaatcagtgttcatggttgagatatcacctctagagaatgctattgagaccatgcagcttactaatgataagatcaacagtatggtacagcagcatctggatgatccctcactcccaattaatccactcagtatgttgctgaatgggatcgtggacccagcagtgatgggcggattcgccaattacgagaaagccttttttaccgaccgttatttacaggagcacccagaagctcacgagaagatcgagaagctgaaggacctgattgcatggcagatccccttcctcgccgagggcatccgaattcacggtgataaggtgaccgaagcccttaggccctttcacgaaaggatggaagcatgcttcaagcagttgaaagaaaaagtcgaaaaggagtatggggtcagaatcatgccgtcatccctggatgaccgcagaggctcccgcccaagaagcatggtgcggtcctttactatgcccagctcaagccgcccactctctgttgcctccgtgtcctccctctctagcgatagcactcctagccggccagggagcgatgggtttgcactagagcctctgctgccgaaaaaaatgcacagtagatctcaggataagttagacaaggacgatcttgagaaggaaaagaaggacaagaaaaaagagaaaagaaatagcaagcaccaggaaatattcgagaaagaattcaagcctacggacatctccctgcagcagtcggaagccgtcatattgtccgagaccataagtcctctccgtccccagcgccctaagagccaagttatgaacgttatcggctcggaacgtaggttctccgtgtcccctagctctcctagctcccagcaaacaccgcctcccgtgacacccagggcgaagttatcattcagcatgcagagctcacttgaattaaacggtatgacgggcgcagatgtcgccgacgtgcctccaccactgccattaaagggaagcgtggcggattacgggaatttaatggagaaccaagatctacttggcagccccactccccctcctcctcctccgcatcaacgccacctgcctcctccacttccttcaaaaaccccaccccctccccctcctaagacaaccagaaagcaggcctccgtggactccgggatcgtgcagtaa

SEQ ID NO: 117403 - DNA, 5598 bp, Artificial Sequence
  derived and/or modified sequence
atgaccagatgggtgcccaccaagagagaggagaagtacggcgtggccttctacaactacgacgccagaggcgccgacgagctgagcctgcagatcggcgacaccgtgcacatcctggagacctacgagggctggtacagaggctacaccctgagaaagaagagcaagaagggcatcttccccgccagctacatccacctgaaggaggccatcgtggagggcaagggccagcacgagaccgtgatccccggcgacctgcccctgatccaggaggtgaccaccaccctgagagagtggagcaccatctggagacagctgtacgtgcaggacaacagagagatgttcagaagcgtgagacacatgatctacgacctgatcgagtggagaagccagatcctgagcggcaccctgccccaggacgagctgaaggagctgaagaagaaggtgaccgccaagatcgactacggcaacagaatcctggacctggacctggtggtgagagacgaggacggcaacatcctggaccccgagctgaccagcaccatcagcctgttcagagcccacgagatcgccagcaagcaggtggaggagagactgcaggaggagaagagccagaagcagaacatcgacatcaacagacaggccaagttcgccgccacccccagcctggccctgttcgtgaacctgaagaacgtggtgtgcaagatcggcgaggacgccgaggtgctgatgagcctgtacgaccccgtggagagcaagttcatcagcgagaactacctggtgagatggagcagcagcggcctgcccaaggacatcgacagactgcacaacctgagagccgtgttcaccgacctgggcagcaaggacctgaagagagagaagatcagcttcgtgtgccagatcgtgagagtgggcagaatggagctgagagacaacaacaccagaaagctgaccagcggcctgagaagacccttcggcgtggccgtgatggacgtgaccgacatcatcaacggcaaggtggacgacgaggacaagcagcacttcatccccttccagcccgtggccggcgagaacgacttcctgcagaccgtgatcaacaaggtgatcgccgccaaggaggtgaaccacaagggccagggcctgtgggtgaccctgaagctgctgcccggcgacatccaccagatcagaaaggagttcccccacctggtggacagaaccaccgccgtggccagaaagaccggcttccccgagatcatcatgcccggcgacgtgagaaacgacatctacgtgaccctggtgcagggcgacttcgacaagggcagcaagaccaccgccaagaacgtggaggtgaccgtgagcgtgtacgacgaggacggcaagagactggagcacgtgatcttccccggcgccggcgacgaggccatcagcgagtacaagagcgtgatctactaccaggtgaagcagcccagatggttcgagaccgtgaaggtggccatccccatcgaggacgtgaacagaagccacctgagattcaccttcagacacagaagcagccaggacagcaaggacaagagcgagaagatcttcgccctggccttcgtgaagctgatgagatacgacggcaccaccctgagagacggcgagcacgacctgatcgtgtacaaggccgaggccaagaagctggaggacgccgccacctacctgagcctgcccagcaccaaggccgagctggaggagaagggccacagcgccaccggcaagagcatgcagagcctgggcagctgcaccatcagcaaggacagcttccagatcagcaccctggtgtgcagcaccaagctgacccagaacgtggacctgctgggcctgctgaagtggagaagcaacaccagcctgctgcagcagaacctgagacagctgatgaaggtggacggcggcgaggtggtgaagttcctgcaggacaccctggacgccctgttcaacatcatgatggagaacagcgagagcgagaccttcgacaccctggtgttcgacgccctggtgttcatcatcggcctgatcgccgacagaaagttccagcacttcaaccccgtgctggagacctacatcaagaagcacttcagcgccaccctggcctacaccaagctgaccaaggtgctgaagaactacgtggacggcgccgagaagcccggcgtgaacgagcagctgtacaaggccatgaaggccctggagagcatcttcaagttcatcgtgagaagcagaatcctgttcaaccagctgtacgagaacaagggcgaggccgacttcgtggagagcctgctgcagctgttcagaagcatcaacgacatgatgagcagcatgagcgaccagaccgtgagagtgaagggcgccgccctgaagtacctgcccaccatcgtgaacgacgtgaagctggtgttcgaccccaaggagctgagcaagatgttcaccgagttcatcctgaacgtgcccatgggcctgctgaccatccagaagctgtactgcctgatcgagatcgtgcacagcgacctgttcacccagcacgactgcagagagatcctgctgcccatgatgaccgaccagctgaagtaccacctggagagacaggaggacctggaggcctgctgccagctgctgagccacatcctggaggtgctgtacagaaaggacgtgggccccacccagagacacgtgcagatcatcatggagaagctgctgagaaccgtgaacagaaccgtgatcagcatgggcagagacagcgagctgatcggcaacttcgtggcctgcatgaccgccatcctgagacagatggaggactaccactacgcccacctgatcaagaccttcggcaagatgagaaccgacgtggtggacttcctgatggagaccttcatcatgttcaagaacctgatcggcaagaacgtgtaccccttcgactgggtgatcatgaacatggtgcagaacaaggtgttcctgagagccatcaaccagtacgccgacatgctgaacaagaagttcctggaccaggccaacttcgagctgcagctgtggaacaactacttccacctggccgtggccttcctgacccaggagagcctgcagctggagaacttcagcagcgccaagagagccaagatcctgaacaagtacggcgacatgagaagacagatcggcttcgagatcagagacatgtggtacaacctgggccagcacaagatcaagttcatccccgagatggtgggccccatcctggagatgaccctgatccccgagaccgagctgagaaaggccaccatccccatcttcttcgacatgatgcagtgcgagttccacagcaccagaagcttccagatgttcgagaacgagatcatcaccaagctggaccacgaggtggagggcggcagaggcgacgagcagtacaaggtgctgttcgacaagatcctgctggagcactgcagaaagcacaagtacctggccaagaccggcgagaccttcgtgaagctggtggtgagactgatggagagactgctggactacagaaccatcatgcacgacgagaacaaggagaacagaatgagctgcaccgtgaacgtgctgaacttctacaaggagatcgagagagaggagatgtacatcagatacctgtacaagctgtgcgacctgcacaaggagtgcgacaactacaccgaggccgcctacaccctgctgctgcacgccaagctgctgaagtggagcgaggacgtgtgcgtggcccacctgacccagagagacggctaccaggccaccacccagggccagctgaaggagcagctgtaccaggagatcatccactacttcgacaagggcaagatgtgggaggaggccatcgccctgggcaaggagctggccgagcagtacgagaacgagatgttcgactacgagcagctgagcgagctgctgaagaagcaggcccagttctacgagaacatcgtgaaggtgatcagacccaagcccgactacttcgccgtgggctactacggccagggcttccccaccttcctgagaggcaaggtgttcatctacagaggcaaggagtacgagagaagagaggacttcgaggccagactgctgacccagttccccaacgccgagaagatgaagaccaccagcccccccggcgacgacatcaagaacagccccggccagtacatccagtgcttcaccgtgaagcccaagctggacctgccccccaagttccacagacccgtgagcgagcagatcgtgagcttctacagagtgaacgaggtgcagagattcgagtacagcagacccatcagaaagggcgagaagaaccccgacaacgagttcgccaacatgtggatcgagagaaccatctacaccaccgcctacaagctgcccggcatcctgagatggttcgaggtgaagagcgtgttcatggtggagatcagccccctggagaacgccatcgagaccatgcagctgaccaacgacaagatcaacagcatggtgcagcagcacctggacgaccccagcctgcccatcaaccccctgagcatgctgctgaacggcatcgtggaccccgccgtgatgggcggcttcgccaactacgagaaggccttcttcaccgacagatacctgcaggagcaccccgaggcccacgagaagatcgagaagctgaaggacctgatcgcctggcagatccccttcctggccgagggcatcagaatccacggcgacaaggtgaccgaggccctgagacccttccacgagagaatggaggcctgcttcaagcagctgaaggagaaggtggagaaggagtacggcgtgagaatcatgcccagcagcctggacgacagaagaggcagcagacccagaagcatggtgagaagcttcaccatgcccagcagcagcagacccctgagcgtggccagcgtgagcagcctgagcagcgacagcacccccagcagacccggcagcgacggcttcgccctggagcccctgctgcccaagaagatgcacagcagaagccaggacaagctggacaaggacgacctggagaaggagaagaaggacaagaagaaggagaagagaaacagcaagcaccaggagatcttcgagaaggagttcaagcccaccgacatcagcctgcagcagagcgaggccgtgatcctgagcgagaccatcagccccctgagaccccagagacccaagagccaggtgatgaacgtgatcggcagcgagagaagattcagcgtgagccccagcagccccagcagccagcagacccccccccccgtgacccccagagccaagctgagcttcagcatgcagagcagcctggagctgaacggcatgaccggcgccgacgtggccgacgtgcccccccccctgcccctgaagggcagcgtggccgactacggcaacctgatggagaaccaggacctgctgggcagccccacccccccccccccccccccccaccagagacacctgcccccccccctgcccagcaagaccccccccccccccccccccaagaccaccagaaagcaggccagcgtggacagcggcatcgtgcagtag

SEQ ID NO: 117404 - DNA, 6797 bp, Artificial Sequence
  derived and/or modified sequence
ctccgccgcaaactttttcctccccatcctgtcgcggctcgaaaggaatggaaaatggcggcctagacgcggagtttcctgcccgacccgcggcggctccggcggcgccatgacgcgctgggtgcccaccaagcgcgaggagaagtacggcgtggctttttataactatgatgccagaggagcggatgaactttctttacagatcggagacactgtgcacatcttagaaacatatgaagggtggtaccgaggttacacgttacgaaaaaagtctaagaagggtatatttcctgcttcatatattcatcttaaagaagcgatagttgaaggaaaagggcaacatgaaacagtcatcccgggtgacctccccctcatccaggaagtcaccacgacactccgagagtggtccaccatctggaggcagctctacgtgcaagataacagggagatgtttcgaagtgtgcggcacatgatctatgaccttattgaatggcgatcacaaattctttctggaactctgcctcaggatgaactcaaagaactgaagaagaaggtcacagccaaaattgattatggaaacagaattctagatttggacctggtggttagagatgaagatgggaatattttggatccagaattaactagcacgattagtctcttcagagctcatgaaatagcttctaaacaagtggaggaaaggttacaagaggaaaaatctcaaaagcagaacatagatattaacagacaagccaagtttgctgcaaccccttctctggccttgtttgtgaacctcaaaaatgtggtttgtaaaataggagaagatgctgaagtcctcatgtctctatatgaccctgtggagtccaaattcatcagtgagaactacctggttcgctggtccagttcaggattacctaaagacatagacagattacataatttgcgagccgtgtttactgacctcggaagcaaagacctgaaaagggagaaaatcagttttgtctgtcagattgttcgcgtgggtcgcatggagctgagggacaacaacaccaggaaactgacctcggggttgcggcgaccttttggagtggctgtgatggatgtaacagatataataaatggaaaagtagatgatgaagataagcagcatttcattccctttcagccggtggcaggggagaatgacttccttcagactgttataaacaaagtcatcgctgccaaagaagtcaaccacaaggggcagggtttgtgggtaacattgaaattacttcctggagatatccatcagatccgaaaagagtttccgcatttagtggacaggaccacagctgtggctcgaaaaacagggtttccggagataatcatgcctggtgatgttcgaaatgatatctatgtaacattagttcaaggagattttgataaaggaagcaaaacaacagcgaagaacgtggaggtcacggtgtctgtgtacgatgaggatgggaaacgattagagcatgtgattttcccgggtgctggtgatgaagcgatttcagagtacaaatctgtgatttactaccaagtaaagcagccacgctggtttgagactgttaaggtggccattcccatcgaggacgttaaccgcagtcaccttcggtttaccttccgccacaggtcatcacaggactctaaggataaatctgagaaaatatttgcactagcatttgtcaagctgatgagatacgatggtaccaccctgcgagacggagagcacgatcttatcgtctataaggccgaagcaaagaagctggaagatgctgccacgtacttgagtctgccctccacgaaggcagagttggaagaaaagggccactcggccaccggcaagagcatgcagagccttgggagctgcaccattagcaaggactccttccagatctccacgctcgtgtgctccaccaaactgactcagaacgtggaccttctggggctcttgaaatggcgctccaacaccagcctgctgcagcagaacttgaggcagctgatgaaagtcgatggtggtgaagtagtgaagtttcttcaggacacgttggatgccctcttcaacatcatgatggagaactcagagagtgagacttttgacacgttagtctttgatgctctggtatttatcattggactgattgctgatagaaaatttcagcattttaatcctgttttggaaacttacattaagaaacactttagtgcaacgttagcctacacgaagttgacaaaagtgttgaagaactacgtggacggtgctgagaagccgggagtaaatgagcagctgtacaaagccatgaaagcgctagaatccatcttcaagttcatcgtgcgctccaggatcctgttcaatcaactgtatgaaaacaagggagaggctgacttcgtggaatctttgctgcagctcttcaggtccatcaatgacatgatgagcagcatgtcagaccagaccgtccgggtgaagggggcagcactgaaatacttaccaacgatcgtcaacgatgtgaaattggtgtttgatcccaaagagctcagcaaaatgtttactgaattcatcctcaatgttcccatgggcttgctgaccatccagaaactctactgcttgatcgaaatcgtccacagtgacctcttcacacagcatgactgcagagagatcctgcttcccatgatgaccgatcagctcaagtaccatctggagagacaggaggacctggaggcctgctgtcagctgctcagccacatcctggaggtgctgtacaggaaggacgtggggccaacccagaggcacgtccagattatcatggagaaacttctccggaccgtgaaccgaaccgtcatttccatgggacgagattctgaactcattggaaacttcgtggcttgcatgacagctattttacgacaaatggaagattaccattatgcccacttgatcaagacttttgggaaaatgaggactgatgtggtagatttcctaatggaaacattcatcatgtttaagaacctcattggaaagaacgtttaccccttcgactgggtgatcatgaacatggtgcaaaataaagtcttcctgcgagcaattaatcagtatgcagatatgctgaacaaaaaatttctggatcaagccaactttgagctacagctgtggaacaactactttcacctggctgttgctttccttactcaagagtccctgcaactggagaatttttcaagtgccaagagagccaaaatccttaacaagtacggagatatgaggagacagattggctttgaaatcagagacatgtggtacaaccttggtcaacacaagataaagttcattccagaaatggtgggcccaatattagaaatgacattaattcccgagacggagctgcgcaaagccaccatccccatcttctttgatatgatgcagtgtgaattccattcgacccgaagcttccaaatgtttgaaaatgagatcatcaccaagctggatcatgaagtcgaaggaggcagaggagacgaacagtacaaagtgttatttgataaaatccttctggaacactgcaggaagcacaaatacctcgccaaaacaggagaaacttttgtaaaactcgttgtgcgcttaatggaaaggcttttggattatagaaccatcatgcacgacgagaacaaagaaaaccgcatgagctgcaccgtcaatgtgctgaatttctacaaagaaattgaaagagaagaaatgtatataaggtatttgtacaagctctgtgacctgcacaaggagtgtgataactacaccgaagcggcttacaccttgcttctccatgcaaagcttcttaagtggtcggaggatgtgtgtgtggcccacctcacccagcgggacgggtaccaggccaccacgcagggacagctgaaggagcagctctaccaggaaatcatccactacttcgacaaaggcaagatgtgggaggaggccattgccttgggcaaggagctagccgagcagtatgagaacgaaatgtttgattatgagcaactcagcgaattgctgaaaaaacaggctcagttttatgaaaacatcgtcaaagtgatcaggcccaagcctgactattttgctgttggctactacggacaagggttccccacattcctgcggggaaaagttttcatttaccgagggaaagagtatgagcgccgggaagattttgaggctcggctcttaactcagtttccaaacgccgagaaaatgaagacaacatctccaccaggcgacgatattaaaaactctcctggccagtatattcagtgcttcacagtgaagcccaaactcgatctgcctcctaagtttcacaggccagtgtcagagcagattgtaagtttttacagggtgaacgaggtccagcgatttgaatattctcggccaatccggaagggagagaaaaacccagacaatgaatttgcgaatatgtggatcgagagaaccatatatacaactgcatataaattacctggaattttaaggtggtttgaggtcaagtctgttttcatggtggaaatcagccccctggagaatgccattgagaccatgcagctgacgaacgacaagatcaacagcatggtgcagcagcacctggatgaccccagcctgcccatcaacccgctctccatgctcctgaacggcatcgtggacccagctgtcatggggggcttcgcaaactacgaaaaggccttctttacagaccggtacctgcaggagcaccctgaggcccatgaaaagatcgagaagctcaaggacctgattgcttggcagattccttttctggccgaagggatcagaatccatggagacaaagtcacggaggcactgaggccgttccacgagaggatggaggcctgtttcaaacagctgaaggaaaaggtggagaaagagtacggcgtccgaatcatgccctcaagtctggatgatagaagaggcagccgcccccggtccatggtgcggtccttcacgatgccttcctcatcccgccctctgtctgtggcctctgtctcttccctctcatcggacagcaccccttccagaccaggctccgacgggtttgccctggagcctctcctgccaaagaaaatgcactccaggtcccaggacaagctggacaaggatgacctggagaaggagaagaaggacaagaagaaggaaaaaaggaacagcaaacatcaagagatatttgagaaagaatttaaacccaccgacatttccctgcagcagtctgaggctgtgatcctttcggaaacgataagtcccctgcggccccagagaccgaagagccaggtgatgaacgtcattggaagcgaaaggcgcttctcggtgtccccctcgtcaccgtcctcccagcaaacaccccctccagttacaccaagggccaagctcagcttcagcatgcagtcgagcttggagctgaacggcatgacgggggcggacgtggccgatgtcccaccccctctgcctctcaaaggcagcgtggcagattacgggaatttgatggaaaaccaggacttgctgggctcgccaacacctccacctccccctccacaccagaggcatctgccacctccactgcccagcaaaactccgcctcctccccctccaaagacaactcgcaagcaggcatcggtggactccgggatcgtgcagtgacgtcgcaagcctctctggaaagagtgtgctgcccctccccatctccatgccctctccttctgtgtcccctgagtctgctgtttacctcattgggcctgtgatgttaacatttcgtgcgactgctttttcttcaaaggagttcagttctcaccatggagtgagtggcctttagcgtcatggagcaaggtgggtctgggaggtagatatgggtccgggatgtgctatcgtagttatcagagttgggggcctctgagtgtgtctggctctgagagagtctgagtcttgcccaaacattctttctttttgtgccaaatgacttgcatttgcaaagagctcaattgctctgagctcagccaagtaggagaggctaggccatcactcttaggaagctgtgtagtgatgatgtataagaatcctcctcactgtcatgggatgttgtatccagcccctccttgttccagccggtggtgtgacttcgttggttgaggtgtgtctccaacctacatcagaccatgaagttcaacccctccagggaagctcctgatttcccctgcataattgaaaataggatatttctcagctattgaacagttactaatttatggggtggaaacagcattaagaatactgaatcaaatggaaaaacaaatgaatacaggaagataagtgttcgttcttttctgaaaaagagtatgtgtaccacaagagctggttttaattgggtgaattgtttttgtcctcattctgtacagaaatttgtatatatgatggttcttagaacttgttttaatttttgtggtccttccgtttattataataggcgtccaccaatgattatccatatgtgttcttaatttttaactgctggaagtgttaaaacacacacacacacacacacacattttttttttgagaactccaaagtcctgaaaattttggtggacaatgatttttaaaaaactaactttgtataacctaatatttgtattctctcatctatatttttttattcactataatcatgatactcttctaatagacttaaaagttaatcattgacaacgaaaaataaaatgttattttaaaagac

SEQ ID NO: 117405 - protein, 481 aa, Artificial Sequence [sequence omitted]

SEQ ID NO: 117406 - DNA, 1446 bp, Artificial Sequence
  derived and/or modified sequence
atggatggggcagtaatggagggtcctttgttccttcaaagccaacgctttgggacaaagcggtggcgtaagacatgggctgtgctgtacccagcctccccccacggagtggcacgccttgaattcttcgaccataaaggaagctcaagcgggggtggtcgcgggagctctcgaaggttagattgcaaggtcataaggcttgcagaatgtgtttccgttgccccagttacggtggaaaccccgcctgaacctggagctaccgcatttcggcttgacacagcccagagaagtcatctcctggccgccgatgctccatccagcgctgcctgggtgcagaccttgtgtagaaacgctttccctaaaggcagttggacactcgcccccacagataatcctcccaaactttctgccctggagatgctcgaaaactctctctattcccctacatgggagggttcccagttctgggtgactgtgcagcgcacagaagcagcagagcgctgtggcctgcatggctcctatgttctgcgggttgaggccgagcgcctgacccttcttacggtcggcgcccagtcccagatacttgagccactgctgtcttggccatatactcttttgaggaggtatgggcgcgataaggtgatgtttagcttcgaagcagggagacgatgtcccagcggacctggaacattcacattccagacagcacaaggaaatgacattttccaggcggtagagacggccatccaccgccagaaagcccaggggaaagcagggcagggtcatgacgtcctgcgggcggactctcacgagggcgaagtagcagaagggaagctacctagtccccctggaccccaggaacttctggacagtccacccgccttgtacgcagagcccctagatagtttgaggattgcaccatgtccgtcccaggattccctctatagcgatccactggattctacctccgctcaagcaggcgagggcgtgcagcggaaaaagcctctgtactgggatctgtatgaacatgctcagcagcaactactgaaggcaaaactaacagatcccaaggaggaccccatctacgatgagcctgagggactggctcccgtgccacctcagggcctgtatgatctgccccgcgagcctaaggacgcgtggtggtgtcaggcccgagttaaggaagagggatacgaattgccttataatccagcaactgacgactatgcagtcccaccgccccgcagcactaaaccgctactcgccccgaaacctcagggccctgcctttcctgaaccaggaacagccacagggagcggaattaaatcacacaattccgcgttgtattctcaggtccagaaatcgggggcaagcgggagctgggattgtggcttatcccgggtcggcaccgacaaaacaggggtcaagagcgaaggctccacttag

SEQ ID NO: 117407 - DNA, 1446 bp, Artificial Sequence
  derived and/or modified sequence
atggatggagctgtgatggagggccccctcttcctgcagagccagagatttggcaccaagcgctggaggaagacctgggccgtgctgtacccagccagcccccatggagtggcccggctggagttctttgaccacaagggcagcagcagcggcggcggccggggcagcagccggcggctggactgcaaggtgatccggctggctgaatgtgtgtctgtggcccctgtgacagtggagaccccacctgagcccggggccacagccttccggctggacacagcccagaggagccacctgctggccgcagatgcccccagcagcgctgcctgggtgcagaccctgtgcagaaatgccttccccaagggctcctggaccctggcccccacagacaacccccccaagctgagcgccctggagatgctggagaacagcctgtacagccccacctgggagggcagccagttctgggtgacagtgcagaggacagaggccgctgagcgctgtggcctgcacggcagctatgtgctgcgggtggaggccgagcggctgaccctgctgactgtgggcgcccagagccagatcctggagcccctgctgtcctggccctacaccctgctgcggcgctatggccgggacaaggtgatgttctcctttgaggccggccgccgctgccccagcggccctggcaccttcaccttccagacagcccagggcaatgacatcttccaggccgtggagacagccatccaccggcagaaggcccagggcaaggccggccagggccatgatgtgctgcgggctgacagccatgaaggagaggtggccgagggcaagctgcccagccccccaggcccccaggagctgctggacagccccccagccctgtatgcagagcccctggacagcctgagaattgccccctgccccagccaggacagcctgtacagcgaccccctggacagcaccagcgcccaggccggggagggcgtgcagaggaagaagcccctgtactgggacctgtatgaacatgcccagcagcagctgctgaaggccaagctgacagaccccaaggaggaccccatctatgatgagcctgagggcctggcccctgtgcccccccagggcctgtatgacctgccccgggagcccaaggatgcctggtggtgccaggcccgggtgaaggaggagggctatgagctgccctacaacccagccacagatgattatgctgtgcccccacccaggagcaccaagcccctgctggcccccaagccccagggccctgccttccctgagcctggaacagccactggaagtggcatcaagagccacaacagcgccctgtacagccaggtgcagaagagcggggccagcggctcctgggactgtggcctgagccgggtgggcacagacaagacaggagtgaagtctgagggcagcacctag

SEQ ID NO: 117408 - DNA, 1446 bp, Artificial Sequence
  derived and/or modified sequence
atggacggcgccgtgatggagggccccctgttcctgcagagccagcggttcgggactaaaagatggcgaaagacctgggctgttctgtatccggcctccccccacggagtagcgaggctagaattcttcgaccataagggttcaagcagtgggggtggaagggggtccagtaggaggcttgattgtaaagtcatccggctggctgaatgcgtgtctgtcgcacccgttacagtggaaacaccccctgaaccgggagccactgcattccggttggataccgctcaacggtcccacttgctcgctgccgatgctccatccagtgccgcgtgggtgcagactctgtgtcgtaacgcctttcccaaaggcagctggacactggcgccaacagataatcctcctaaattgtctgcattagaaatgctcgagaacagtctgtattccccgacatgggaaggatctcagttttgggtgaccgtgcagcgaaccgaggcggccgagaggtgcggcctccacgggagctacgtcctccgagttgaggcagagcgactgaccctgctgaccgtgggtgcccaatcacagatccttgagccccttctcagttggccatatactctgttgaggcgctatggtcgcgataaagtgatgttcagttttgaggcaggcagacgatgcccatcaggccccggtacatttacctttcagactgcacaaggcaacgacatctttcaggcagtggaaactgccatccacagacagaaggctcaggggaaagctgggcagggtcacgacgtcctccgcgctgacagccacgagggtgaggttgccgagggaaaacttccgagccctcccgggccacaggaactcctggactcgccaccggcactgtacgcggaacctttggattccttgagaattgcaccatgcccatcccaggacagcctttactcggaccctttggattccactagtgcccaagctggcgaaggagtacagagaaaaaagcccctctactgggacctctacgaacacgctcaacagcaacttctgaaggccaagcttactgacccaaaagaggaccccatctatgatgagcctgaaggtctggccccagtgcctccacaggggctgtacgatctgccccgtgaacccaaggatgcttggtggtgccaggctcgggtcaaagaggagggatacgagttaccatacaaccccgcaactgacgattacgcggtacctccccccagatcaactaagccgttgctagcccctaaaccgcagggccctgccttccccgaaccgggaacggccacagggtctggaatcaaatctcacaacagcgccctatattcacaggtgcagaaatcaggcgcttccggcagttgggattgcggcctttcacgggtaggcaccgataaaacaggcgtaaaatccgaaggctccacttag

SEQ ID NO: 117409 - DNA, 1446 bp, Artificial Sequence
  derived and/or modified sequence
atggatggggctgttatggaaggccctttgttcctccagtctcaaagattcgggacgaagaggtggcgcaagacctgggccgtgttatacccagcctccccgcatggggtagcgagattggaatttttcgaccataaaggctcatctagcggagggggtagaggctcctcccgacgcctcgactgcaaggtgatccggctggctgaatgcgtaagtgtagccccagtgactgtggagacgcctccggagcccggtgcaactgcttttcgccttgacacagctcagaggtcccacttgcttgcggctgacgcgccatcctcagcagcgtgggttcaaacgctctgcaggaatgcgttccccaagggcagttggacactggcgccaactgacaaccccccaaaacttagtgccctagaaatgctggagaatagtctctattccccaacctgggaaggaagtcagttttgggtaacagtacagcgtactgaggcagccgaacgatgcggactgcacggctcctacgtactgagggtggaggccgagcggctcacactactgaccgtaggtgcgcagtctcagatcctggagcccctgctatcttggccttatactctgctgcgccgttatggacgggacaaagttatgttttctttcgaggcaggcagaaggtgcccttccgggcctggtacattcactttccagaccgcccaggggaacgatattttccaggccgtcgaaacggccatccaccgacagaaggctcaagggaaggccggacagggtcacgatgtattgcgagccgatagtcacgagggcgaagtcgccgagggtaagttgccatcaccacctgggcctcaagaactcctcgactctcccccagcattatacgctgagcctttggacagtttgcgtatcgctccatgcccatcacaggattctctgtacagcgaccctctggactcaactagcgctcaggccggagaaggcgtgcagcgcaaaaaacctctctactgggacctttacgagcacgctcagcaacagctacttaaggccaagcttaccgatcctaaggaggatccgatatatgatgaaccagaagggctcgccccagttcctccgcaggggctgtatgatctgccgagagagcccaaggatgcttggtggtgccaggctagagtgaaggaggaaggctacgagctgccatacaacccagcaacagacgactacgccgtgcccccacctagatcaaccaagcctcttcttgcgccaaaaccccagggccctgcttttccagaacctgggactgcaaccggcagtgggatcaaatcccacaacagcgctctgtacagccaggtgcagaaatctggagctagcggttcctgggactgcggcctctcgcgcgtcgggacagacaaaactggcgtaaaaagcgaaggaagcacctag

SEQ ID NO: 117410 - DNA, 1446 bp, Artificial Sequence
  derived and/or modified sequence
atggacggcgccgtgatggagggccccctgttcctgcagagccagagattcggcaccaagagatggagaaagacctgggccgtgctgtaccccgccagcccccacggcgtggccagactggagttcttcgaccacaagggcagcagcagcggcggcggcagaggcagcagcagaagactggactgcaaggtgatcagactggccgagtgcgtgagcgtggcccccgtgaccgtggagaccccccccgagcccggcgccaccgccttcagactggacaccgcccagagaagccacctgctggccgccgacgcccccagcagcgccgcctgggtgcagaccctgtgcagaaacgccttccccaagggcagctggaccctggcccccaccgacaacccccccaagctgagcgccctggagatgctggagaacagcctgtacagccccacctgggagggcagccagttctgggtgaccgtgcagagaaccgaggccgccgagagatgcggcctgcacggcagctacgtgctgagagtggaggccgagagactgaccctgctgaccgtgggcgcccagagccagatcctggagcccctgctgagctggccctacaccctgctgagaagatacggcagagacaaggtgatgttcagcttcgaggccggcagaagatgccccagcggccccggcaccttcaccttccagaccgcccagggcaacgacatcttccaggccgtggagaccgccatccacagacagaaggcccagggcaaggccggccagggccacgacgtgctgagagccgacagccacgagggcgaggtggccgagggcaagctgcccagcccccccggcccccaggagctgctggacagcccccccgccctgtacgccgagcccctggacagcctgagaatcgccccctgccccagccaggacagcctgtacagcgaccccctggacagcaccagcgcccaggccggcgagggcgtgcagagaaagaagcccctgtactgggacctgtacgagcacgcccagcagcagctgctgaaggccaagctgaccgaccccaaggaggaccccatctacgacgagcccgagggcctggcccccgtgcccccccagggcctgtacgacctgcccagagagcccaaggacgcctggtggtgccaggccagagtgaaggaggagggctacgagctgccctacaaccccgccaccgacgactacgccgtgcccccccccagaagcaccaagcccctgctggcccccaagccccagggccccgccttccccgagcccggcaccgccaccggcagcggcatcaagagccacaacagcgccctgtacagccaggtgcagaagagcggcgccagcggcagctgggactgcggcctgagcagagtgggcaccgacaagaccggcgtgaagagcgagggcagcacctag

SEQ ID NO: 117411 - DNA, 2555 bp, Artificial Sequence
  derived and/or modified sequence
ctctgggtcctccctccccgtggagctggccactgccgcgccccctccccctccctggccctcccggctcgttcaatgaagctttctcttcccgcggcatggaggccaggcctctgcggtcagggagctgacatgcaagcggcggccgggcggcggggcggccccggtggtggcgggaagcggttcaaccccagccctccctccgagtcccgggccagcggagtctaaacagcccggctcgggcggggctgggggcgggcccggccagggtaaataaagccccggaggcccgtgtgggtctctccggtgcccggggcgctttcggggtgatgtcatggctttcactctgacgtcaccttgggcatatgacgtcacgcgcagccaccacgcccagaggccagggccctcgcgccaaaaccgaggactttcggtggagccactggcgcgcccccacgacggcgggtaggggcctggggtgctgcagctcccggctaatccgggggtctccaccattccttctcgctcctctccctcaccccaccgcgacccccccagcggctgccggcgggggccggggaggggcggaaactcctccagggaacccggccccgcctcccgccccgcctcccgccgcagggccaggaagcgcggaaggaaccgccgggggccatggacggagcagtgatggaagggccgctttttttgcagagtcagcgctttgggaccaagaggtggaggaagacctgggccgtgctctacccggccagtccccacggcgtagcgcggctcgagttctttgaccataaggggtcgagctctgggggtggccgagggagctcgcgccgcctggactgcaaagtgatccgtctggctgagtgtgtgagtgtggcccccgtcaccgtggagaccccccctgagcccggcgccactgccttccgcctggacactgctcagcgctcgcacctgctggcggccgacgcgccgtccagtgcagcctgggtgcagacgctgtgccgaaacgcctttccgaaaggcagctggactctggcgcctaccgataacccacctaagctttctgccctggagatgctggagaactccttgtacagccctacctgggaaggatcccaattctgggtaacggtgcagaggactgaggccgccgagcgctgtggcctgcatggctcctacgtgctgagggtggaggctgaaaggctgactctcctgaccgtgggggcccagagtcagatactggagccactcctgtcctggccctacactctgttgcgtcgctatggccgggacaaggtcatgttctctttcgaggccggccgccgctgcccctcaggccctggaaccttcaccttccagacggcacagggaaatgacatcttccaggcagttgagactgccatccaccggcagaaggcccagggaaaggccggacaggggcacgatgttctcagagctgactcccatgaaggggaggtggcagaggggaagttgccttccccacctggcccccaagagctcctcgacagtcccccagccctgtatgctgagcccttagactccctgcgcattgctccatgcccttcccaggactccctatactcagaccccttggacagcacgtctgctcaggcaggagagggagtacaacggaagaaacctctctattgggacttgtatgagcatgcgcagcagcagttgctgaaggccaagctgacagaccccaaagaggatcccatctatgatgaacctgagggcctggccccagtccctccccagggcctttatgatctgcctcgggagcccaaggatgcatggtggtgccaagctcgggtgaaggaggagggctatgagctcccctacaaccctgccactgatgactacgctgtgccaccccctcggagcacaaagcccctccttgctcccaagccccagggcccagccttccctgaacctggtactgcaactggcagtggcatcaaaagccacaactcagccctgtacagccaggtccagaagagcggggcctcagggagctgggactgtgggctctctagagtagggactgacaagactggggtcaagtcagagggctctacctgagaaggacggcaaggctgaggtggctaagggggaccatggggaggtggcactagggatcaaagaagatggttagaaccagcagaagccagagggtgggaggggccatgctgtgtgagaccaggggaccagagggatgggagagtcaagggaaggacaatcccaggaagtcctaagaagtggggcagatggcagggctgaggatgggctctgcatcccccaaagccatcccttccctacttccccaaatgaagggacggctgtgggaccaggtctgtggaaagtggtgcatggtcagaatgggtgcagtttgaggggcctgtgtggaggcctcagggagatgttggactgtgcctggatccttactcctgcattgttctttgccagagacctatttaaaaattttaaaattctcattaaagtcagcttgggtttaagaagtt

SEQ ID NO: 117412 - protein, 408 aa, Artificial Sequence
  derived and/or modified sequence
MWAFSELPMPLLINLIVSLLGFVATVTLIPAFRGHFIAARLCGQDLNKTSRQQIPESQGVISGAVFLIILFCFIPFPFLNCFVKEQCKAFPHHEFVALIGALLAICCMIFLGFADDVLNLRWRHKLLLPTAASLPLLMVYFTNFGNTTIVVPKPFRPILGLHLDLGILYYVYMGLLAVFCTNAINILAGINGLEAGQSLVISASIIVFNLVELEGDCRDDHVFSLYFMIPFFFTTLGLLYHNWYPSRVFVGDTFCYFAGMTFAVVGILGHFSKTMLLFFMPQVFNFLYSLPQLLHIIPCPRHRIPRLNIKTGKLEMSYSKFKTKSLSFLGTFILKVAESLQLVTVHQSETEDGEFTECNNMTLINLLLKVLGPIHERNLTLLLLLLQILGSAITFSIRYQLVRLFYDV

SEQ ID NO: 117413 - DNA, 1227 bp, Artificial Sequence
  derived and/or modified sequence
atgtgggccttcagcgagctgcccatgcccctgctgatcaacctgatcgtgagcctgctgggcttcgtggccaccgtgaccctgatccccgccttcagaggccacttcatcgccgccagactgtgcggccaggacctgaacaagaccagcagacagcagatccccgagagccagggcgtgatcagcggcgccgtgttcctgatcatcctgttctgcttcatccccttccccttcctgaactgcttcgtgaaggagcagtgcaaggccttcccccaccacgagttcgtggccctgatcggcgccctgctggccatctgctgcatgatcttcctgggcttcgccgacgacgtgctgaacctgagatggagacacaagctgctgctgcccaccgccgccagcctgcccctgctgatggtgtacttcaccaacttcggcaacaccaccatcgtggtgcccaagcccttcagacccatcctgggcctgcacctggacctgggcatcctgtactacgtgtacatgggcctgctggccgtgttctgcaccaacgccatcaacatcctggccggcatcaacggcctggaggccggccagagcctggtgatcagcgccagcatcatcgtgttcaacctggtggagctggagggcgactgcagagacgaccacgtgttcagcctgtacttcatgatccccttcttcttcaccaccctgggcctgctgtaccacaactggtaccccagcagagtgttcgtgggcgacaccttctgctacttcgccggcatgaccttcgccgtggtgggcatcctgggccacttcagcaagaccatgctgctgttcttcatgccccaggtgttcaacttcctgtacagcctgccccagctgctgcacatcatcccctgccccagacacagaatccccagactgaacatcaagaccggcaagctggagatgagctacagcaagttcaagaccaagagcctgagcttcctgggcaccttcatcctgaaggtggccgagagcctgcagctggtgaccgtgcaccagagcgagaccgaggacggcgagttcaccgagtgcaacaacatgaccctgatcaacctgctgctgaaggtgctgggccccatccacgagagaaacctgaccctgctgctgctgctgctgcagatcctgggcagcgccatcaccttcagcatcagataccagctggtgagactgttctacgacgtgtag

SEQ ID NO: 117414 - DNA, 2205 bp, Artificial Sequence
  derived and/or modified sequence
attcatcttggaaccgggcaattggcatttccgctctgggtagtacatctttaacataatgttagggaagtatccgttcttggctgcctttctttaattgcgtttccagtactctctcggtgattctactcttgaacataggatgaaatttggaatcacacttctcttccacttccatccccaccctctaatgcccatattaaaaatggcggccgccgccttccgcagtaatggttgttcagcgaacaagatccgggcggaaacagtagataggcgggtgcagcggggcagaacataggttgccttagagaggttccccggtgtcccgacggcggctcaagtcagagttgctgggttttgctcagattggtgtgggaagagcctgcctgtggggagcggccactccatactgctgaggcctcaggactgctgctcagcttgcccgttacctgaagaggcggcggagccgggcccctgaccggtcaccatgtgggccttctcggaattgcccatgccgctgctgatcaatttgatcgtctcgctgctgggatttgtggccacagtcaccctcatcccggccttccggggccacttcattgctgcgcgcctctgtggtcaggacctcaacaaaaccagccgacagcagatcccagaatcccagggagtgatcagcggtgctgttttccttatcatcctcttctgcttcatccctttccccttcctgaactgctttgtgaaggagcagtgtaaggcattcccccaccatgaatttgtggccctgataggtgccctccttgccatctgctgcatgatcttcctgggctttgcggatgatgtactgaatctgcgctggcgccataagctgctgctacctacagctgcctcactacctctcctcatggtctatttcaccaactttggcaacacgaccattgtggtgcccaagcccttccgcccgatacttggcctgcatctggacttgggaatcctgtactatgtctacatggggctgctggcagtgttctgtaccaatgccatcaatatcctagcaggaattaacggcctagaggctggccagtcactagtcatttctgcttccatcattgtcttcaacctggtagagttggaaggtgattgtcgggatgatcatgtcttttccctctacttcatgatacccttttttttcaccactttgggattgctctaccacaactggtacccatcacgggtgtttgtgggagataccttctgttactttgctggcatgacctttgccgtggtgggcatcttgggacacttcagcaagaccatgctactattcttcatgccccaggtgttcaacttcctctactcactgcctcagctcctgcatatcatcccctgccctcgccaccgcatacccagactcaatatcaagacaggcaaactggagatgagctattccaagttcaagaccaagagcctctctttcttgggcacctttattttaaaggtggcagagagcctccagctggtgacagtacaccagagtgagactgaagatggtgaattcactgaatgtaacaacatgaccctcatcaacttgctacttaaagtccttgggcccatacatgagagaaacctcacattgctcctgctgctgctgcagatcctgggcagtgccatcaccttctccattcgatatcagctcgttcgactcttctatgatgtctgagtcccttgatcattgtcctttacctcacagtctctaggattcctgactcaggctgacctctctctctggtcccagactgcctccttgcccaggcctctctcactcttcatactcctccagattttgttctcagcattttcctttctctgtgatcattggcatcctgggcgtttcttgccctctgctgactactgattggattttacctatggctttctgcaacttgctactctctccctctccatcccatctttgcagcctcatagggtgggatacagcagctttttttgcagttatccacactcacatttcagagtcctgactctcaaggaaccactggtttttgggatagaacttgggccagggctaggaacacaggctccacggtgacatgtcatttgattgtaaattaagtgttctgattagtaagaactaagcagggggccacatgctctcaatggagacaataaagtgttgtctttttcttattg

SEQ ID NO: 117415 - DNA, 3274 bp, Artificial Sequence
  derived and/or modified sequence
gtgcatgggtttggaaccagagtaccttgcccacagaaatggaagtctggggacccagttggatttctacaacctccagccttagcggcacccttttctctgatccgggaggggaagagaagccatagggttccccagtttatgcccaccctcgtctggcctcctagcacgagcagtcagtccctcccctggaaggaaaggctgaagggaccacccaagcgcttggtccaactcaccccgtttctgcaggcctgctcgttcagcgctcgcacccaagcccgctgccagttctcccggaaagacttgaaggcgaagagtgacgccaggaggccccggactcctggctcctcggcggcgccagcccgagtcgcccgcagccgcagcagcgagcgccacacgcccagctcccgcagggaacccgcgggttccccggctaaggcgggtcccgggccccggtccccgcgggcccgcgccagccacaagccccgggcatattgcagcagccaggcgaacaccgtgagcagcgaggcggcgaagaggatcagcaaggccgcccagcccacgtcccgctgcccccagcccggatccatgctccgcgcgggctccgatcccggtcccggctggggctcacccgctgccccgggggagcatggcccgggcgggccgcggggaggaggtgggctcccccggggctgggcgcgcggggtcgggggctctccgcggctgagtgcccaggactagtgggtgccacagggcgaggagaggaggtcctcgggggtcgcgatgccggggtctctgtctccgtggtccgggtctctcctagcttggtcagcagtcggacccgttagtcgccggccagtgcccgactcctcccaccgcgcgggccccgccggaccctggaggggactggtctgcagagacgctggggctcgcgggccggcaccggctccgggagggctgcgtgcgcagagctgacactgacaacaccgccggcgccccgcccccacccgcccttaaaggagccgcacccgcgccgggcggggccaggacagcctggcgctccctcgctggaggagggcgggagggctagcagcgagcggaggaggttccggggttgaaaataggcgggatctttgatcacctcgccccatcttgcaatcgcggtgctcccacactcagctcaaggtttcctgcaagaaacaggcgcgtctccacaccctcgtccctcctccccaccccctgcctttcaatagccatcttcctggagccggaggcatcccagattaagggagaggtacgggccctttaagcttgacctatggaggcggacggagctaaaactgacgtggaaccggaatgtgagcggtgtcagacacgtggtacaaggaggcattcatcttggaaccgggcaattggcatttccgctctggattggtgtgggaagagcctgcctgtggggagcggccactccatactgctgaggcctcaggactgctgctcagcttgcccgttacctgaagaggcggcggagccgggcccctgaccggtcaccatgtgggccttctcggaattgcccatgccgctgctgatcaatttgatcgtctcgctgctgggatttgtggccacagtcaccctcatcccggccttccggggccacttcattgctgcgcgcctctgtggtcaggacctcaacaaaaccagccgacagcagatcccagaatcccagggagtgatcagcggtgctgttttccttatcatcctcttctgcttcatccctttccccttcctgaactgctttgtgaaggagcagtgtaaggcattcccccaccatgaatttgtggccctgataggtgccctccttgccatctgctgcatgatcttcctgggctttgcggatgatgtactgaatctgcgctggcgccataagctgctgctacctacagctgcctcactacctctcctcatggtctatttcaccaactttggcaacacgaccattgtggtgcccaagcccttccgcccgatacttggcctgcatctggacttgggaatcctgtactatgtctacatggggctgctggcagtgttctgtaccaatgccatcaatatcctagcaggaattaacggcctagaggctggccagtcactagtcatttctgcttccatcattgtcttcaacctggtagagttggaaggtgattgtcgggatgatcatgtcttttccctctacttcatgatacccttttttttcaccactttgggattgctctaccacaactggtacccatcacgggtgtttgtgggagataccttctgttactttgctggcatgacctttgccgtggtgggcatcttgggacacttcagcaagaccatgctactattcttcatgccccaggtgttcaacttcctctactcactgcctcagctcctgcatatcatcccctgccctcgccaccgcatacccagactcaatatcaagacaggcaaactggagatgagctattccaagttcaagaccaagagcctctctttcttgggcacctttattttaaaggtggcagagagcctccagctggtgacagtacaccagagtgagactgaagatggtgaattcactgaatgtaacaacatgaccctcatcaacttgctacttaaagtccttgggcccatacatgagagaaacctcacattgctcctgctgctgctgcagatcctgggcagtgccatcaccttctccattcgatatcagctcgttcgactcttctatgatgtctgagtcccttgatcattgtcctttacctcacagtctctaggattcctgactcaggctgacctctctctctggtcccagactgcctccttgcccaggcctctctcactcttcatactcctccagattttgttctcagcattttcctttctctgtgatcattggcatcctgggcgtttcttgccctctgctgactactgattggattttacctatggctttctgcaacttgctactctctccctctccatcccatctttgcagcctcatagggtgggatacagcagctttttttgcagttatccacactcacatttcagagtcctgactctcaaggaaccactggtttttgggatagaacttgggccagggctaggaacacaggctccacggtgacatgtcatttgattgtaaattaagtgttctgattagtaagaactaagcagggggccacatgctctcaatggagacaataaagtgttgtctttttcttattgttta

SEQ ID NO: 117416 - DNA, 1227 bp, Artificial Sequence
  derived and/or modified sequence
atgtgggccttcagcgagctcccaatgcctctgctaatcaatctgatagtttcattattgggcttcgtggctacagtaacgctaatccccgcctttagaggccattttatagccgccagattgtgtggacaggacttgaacaaaactagtagacagcagatccccgagagtcagggggtgatttccggtgccgtatttcttattatcctgttctgctttattccctttccattcctgaattgtttcgtgaaagagcagtgcaaagcctttcctcatcacgaatttgtggcactgattggagctctgttagccatttgctgcatgatcttcctgggctttgcagacgacgtgctcaaccttcgctggcgtcacaagcttcttttgcctacagccgcttctctgcctctgctgatggtgtactttacgaacttcggtaatacaacaattgtcgtgcccaagcctttcaggccaatactgggtctgcacctggatctggggatactttactacgtgtacatgggccttctggccgtcttttgtaccaatgcgataaacattctcgcagggatcaatggtctggaggcaggccagtctctggttatcagtgcaagcatcattgtgttcaacctggtggaactggagggtgattgcagagatgaccacgtgttctcactgtactttatgattcccttcttttttacaactctggggttgttataccacaattggtaccccagtcgggtcttcgtcggcgatactttctgttactttgccggcatgacatttgcggtagtgggaattttgggccactttagcaagactatgctcctgttttttatgccccaggtattcaatttcctgtactctctgccacagctactacacatcattccttgtccacgacatcgaatccctaggctgaatatcaaaactgggaagctagagatgagctacagtaaatttaagacgaagtccctgagcttcctgggaacgttcatcctgaaggtggccgaatccctacaattggtgacagtccaccaaagcgagacagaggacggcgagttcactgaatgcaacaacatgacactaatcaacttgctgctgaaagtactgggtcctatccatgagcgtaacctcactcttcttctcctgctgctgcagatcctggggtctgccattactttcagcatcagataccagctcgtccggctgttctatgacgtttag

SEQ ID NO: 117417 - DNA, 1227 bp, Artificial Sequence
  derived and/or modified sequence
atgtgggccttctctgaattgcccatgccacttcttattaacctcattgtgagcttgcttgggttcgttgcgaccgtcacactaatcccagccttcagaggtcattttatagcagcccgtctgtgcggtcaggatctgaataaaacctcaaggcagcagatacccgaatcccagggggttatttccggggcggtattcctcatcatcctgttctgcttcatccccttcccgtttctgaattgtttcgtgaaagagcagtgcaaggcatttccccaccacgagttcgtagctttgatcggtgccctgctcgctatctgctgtatgatcttcctgggctttgccgacgatgtgttaaatctgagatggcggcataagctcttgcttcccactgctgcatctctaccattactaatggtgtactttacaaattttgggaacacgaccatcgtggtgccaaaaccttttcgccctattctgggccttcacttggacttgggcatcctgtattacgtgtatatgggactgctcgctgtattttgcaccaacgcgattaacattcttgcagggattaacggtctggaggctggccagtccctcgtcatttcagccagtatcattgtgttcaacctggttgaattggaaggcgattgccgtgacgatcacgtcttctcactgtacttcatgatccctttcttcttcactacactagggctgttgtaccacaattggtatcccagtcgtgtgtttgtcggcgatacgttttgttacttcgctgggatgacgtttgcagtggtgggcattctcggacatttttccaaaaccatgctcctgttctttatgccccaggtgtttaatttcctttatagtctcccacaactcctgcatataattccttgccctaggcaccgcatcccacgactgaacatcaagactggaaagctcgagatgtcttattccaagtttaagactaagagcctgtcattccttgggacattcatactgaaagtagccgagagccttcagttagttactgtgcatcagtccgaaacagaggacggggagtttacggagtgtaacaatatgaccctcatcaacctgttgctgaaggtgttgggaccaatacacgagcggaatctcaccctcttacttctgttgctgcaaatactgggctcagcaattacattctccattcggtaccagctggtgcgactattctatgacgtctag

SEQ ID NO: 117418 - DNA, 1227 bp, Artificial Sequence
  derived and/or modified sequence
atgtgggccttcagcgagctgcccatgcccctgctgatcaacctgattgtgtccctgctgggctttgtggccaccgtgaccctcatcccagccttccggggccacttcatcgccgcccggctgtgtggccaggacctgaacaagaccagccggcagcagatccctgagagccagggcgtcatcagcggggctgtgttcctgatcatcctcttctgcttcatccccttccccttcctgaactgctttgtgaaggagcagtgcaaggccttcccccaccatgaatttgtggccctgattggagccctgctggccatctgctgcatgatcttcctgggctttgctgatgatgtgctgaacctgcgctggaggcacaagctgctgctgcccacagctgccagcctgcccctgctgatggtgtacttcaccaactttggaaacaccaccatcgtggtgcccaagcccttccggcccatcctgggcctgcacctggacctgggcatcctgtactacgtgtacatgggcctgctggccgtgttctgcaccaatgccatcaacatcctggccggcatcaatggcctggaggccggccagagcctggtgatcagcgccagcatcatcgtgttcaacctggtggagctggagggggactgcagagatgaccacgtgttcagcctgtacttcatgatccccttcttcttcaccaccctgggcctgctgtaccacaactggtaccccagccgggtgtttgtgggggacaccttctgctactttgctggcatgacctttgctgtggtgggcatcctgggccacttcagcaagaccatgctgctcttcttcatgccccaggtgttcaacttcctgtacagcctgccccagctgctgcacatcatcccctgccccaggcaccgcatcccccggctgaacatcaagacaggcaagctggagatgagctacagcaagttcaagaccaagagcctgtccttcctgggcaccttcatcctgaaggtggccgagagcctgcagctggtgacagtgcaccagagcgagacagaagatggagagttcacagagtgcaacaacatgaccctcatcaacctgctgctgaaggtgctgggccccatccatgaaagaaacctgaccctgctgctgctgctgctgcagatcctgggcagcgccatcaccttcagcatccgctaccagctggtgcggctcttctatgatgtgtag

SEQ ID NO: 117419 - DNA, 1227 bp, Artificial Sequence
  derived and/or modified sequence
atgtgggccttcagcgagctgcccatgcccctgctgatcaacctgattgtgagcttattgggtttcgtagccacagttaccctgatacccgccttcaggggacacttcatcgccgccagactgtgtggtcaggatctgaacaagacgagccggcaacagattcctgagagtcagggcgtcatttctggggctgtgttcctcatcattctgttctgttttatccctttccccttcctaaattgcttcgtcaaggagcaatgcaaggcattcccccatcacgagtttgtggctctgattggggctctgctcgccatatgttgcatgattttcttaggttttgccgacgacgtgttgaacttgcgctggagacacaaattacttctgcctacagctgcttctctcccactcttaatggtgtactttactaatttcgggaacaccaccattgtggtgcccaaaccttttcgccccattcttggcctccacctagatctggggatactctactatgtatatatggggctacttgccgttttttgcacaaatgctattaatattcttgcaggcatcaacggccttgaagccgggcaaagccttgttataagcgccagcatcattgtatttaaccttgtggagctggagggagattgtcgcgatgaccacgtttttagcctctactttatgataccgttctttttcacaacactgggactactataccataattggtatccttcacgtgtgtttgtcggcgacacgttttgttacttcgccgggatgactttcgccgtggtcgggatcctcggacatttcagcaaaaccatgctcctgttctttatgccccaggtttttaactttctttattccctgccccagctactccacatcattccatgtccccgacataggatccctcgccttaacattaagaccggcaaactcgaaatgagctattccaaattcaagactaaaagtctctcctttctgggaacattcatcctgaaggtcgccgaatcactgcagctcgtaaccgttcaccaaagtgaaactgaggacggggaattcacggagtgcaacaacatgaccttaattaatctgttactgaaggtgctgggccccattcacgaaaggaacttaaccttgcttctgttactgttacagatcctgggttccgccatcaccttctctattagataccaactggtcagacttttctatgacgtgtag

SEQ ID NO: 117420 - DNA, 1227 bp, Artificial Sequence
  derived and/or modified sequence
atgtgggccttcagcgagctgcccatgcccctgctgatcaacctgatcgtcagcctgttggggttcgttgcaaccgtgacacttatacccgccttccgaggccatttcatcgcagcccggctttgcggacaggatctgaacaagacatctagacagcagatccctgagtctcagggtgtgatctcgggagcagtctttttgatcatcttgttctgttttattccgtttccctttttaaattgctttgtgaaagagcaatgcaaggctttcccgcatcatgaattcgtggcattaatcggggccctactcgccatctgttgcatgatttttctgggattcgcagatgatgtgctcaatttgcgctggcgccacaagctgcttctccctactgccgccagccttcccttgctgatggtctattttaccaacttcgggaatacaaccattgttgtgcctaagcccttccgccctatcctcggcctgcatctggatcttggcattttgtattacgtctatatgggtctgctggccgtattttgtactaatgccatcaatattctcgccgggatcaatggacttgaagctggacagtctctggtcatttcagcttctatcatagtgtttaacctcgttgaactggaaggagactgtcgggacgatcatgtcttcagtctttacttcatgattcccttcttttttaccactttgggactgctgtatcataactggtacccaagccgggtgttcgtgggggacacattttgctacttcgctgggatgacctttgccgtggtgggcattctgggtcacttctcaaagactatgctgttattctttatgcctcaggtcttcaacttcctgtactctctccctcagctactacatataataccttgtcctagacatcggatccctagactgaatattaaaactggtaaattagaaatgtcctactcgaaattcaagactaaatccctatcattcttaggtacctttatcttgaaggtagccgagagtctccagctcgtgactgtccatcaatccgaaactgaagacggcgagtttacagagtgcaataatatgactttgataaaccttcttcttaaggtgcttggccccattcacgaaagaaacctgacactactgctccttctgctacagatcctgggcagcgcgatcacattctcaattcgataccagttggtaaggcttttttacgatgtgtag

SEQ ID NO: 117421 - DNA, 1227 bp, Artificial Sequence
  derived and/or modified sequence
atgtgggctttttccgaactgcctatgccattgttgatcaaccttattgtaagcctgctcggctttgtcgccactgtaaccctgatcccagcattccgcggacatttcatcgccgcacgcttgtgtggacaggatctgaacaagacctcgagacagcaaatccccgagtcccagggggtcatctctggtgctgtcttcctgatcattcttttttgctttatccctttccctttcctcaattgcttcgtgaaagagcagtgtaaagcatttccacatcacgagttcgtagccttaattggagcactgcttgccatttgttgcatgattttcctgggcttcgcagatgacgtcttaaatcttcggtggagacacaagctgttgctgcctacagctgccagcctccctttgttgatggtgtattttaccaattttggcaatactacaatagttgtccccaaaccattccgaccaatcctcgggcttcatcttgacctcggcatattgtactacgtctacatgggcctattggcggtcttttgtaccaatgcaataaacattctggccggaatcaatggattggaggccggacagtccttggttattagtgcctctataattgtgtttaacttagtagagttggagggcgattgcagagacgatcacgttttcagcttgtacttcatgattcctttcttcttcactacactcggactgctttaccacaactggtatcccagtcgggtttttgtgggcgacacattttgctatttcgctggaatgacgtttgctgtggtgggtatcctgggacacttcagcaaaactatgctgctgttctttatgccacaggtctttaatttcctatatagcctgccccaactgcttcatatcataccttgtccccgtcacagaatccccaggctgaacattaagacaggaaaactggagatgtcttattccaagttcaaaaccaagtcactctccttcctgggcacgtttattttgaaggtggccgagtccctgcaattggtgactgtccatcaaagcgagaccgaggacggggagttcacggagtgcaataatatgacactcatcaacctgctcctgaaggtcctgggacccatccacgagcggaacttgacactactcctgctactcttacagattttgggcagtgctatcacgttctcgatacgatatcagttagtgagattgttttatgatgtgtag

SEQ ID NO: 117422 - DNA, 1227 bp, Artificial Sequence
  derived and/or modified sequence
atgtgggcattttcagagttgccaatgcctctgctgattaatctaatcgtatcattactgggatttgttgctacagtcaccctgattcctgcattccggggtcacttcatagcggctcggctgtgcggtcaagatttaaataagacttcccgacagcaaatcccagaatcccagggagtcatttccggagctgtgtttcttatcatcctattttgttttatcccattccctttcctaaactgcttcgttaaagagcagtgtaaagcttttccgcatcacgaattcgtggctctcatcggcgcactgctggccatttgctgcatgatcttcctgggctttgccgacgacgtgctgaacctgcggtggaggcacaagctgctcctcccaactgctgcatccttgccactcctcatggtctatttcactaatttcggaaacactactatcgttgttcctaagccttttcgtccaattctgggcctccatctggatcttggcatcttatactatgtttacatgggactgctcgccgtcttctgcaccaacgctatcaatatcctagctggtattaatgggctggaggccggtcaatccttagtcataagtgcctccatcatcgtgtttaatctggtcgagttggagggggattgccgggatgaccacgtttttagcttatactttatgattccattcttctttacaaccttaggcttactgtaccataactggtaccctagtcgggtatttgtgggtgataccttctgttactttgccggaatgacatttgcagtggttggaattctggggcactttagtaaaacaatgctgttattcttcatgccacaggtcttcaatttcctctattctctgcctcagttgctgcacatcattccctgtcctcgtcatcgaatcccccgactcaatattaaaactggcaagctggaaatgtcctactcaaaatttaaaaccaaatctctcagctttctcgggaccttcatcctgaaggtggccgaatccctgcagctggttaccgtccaccagtctgagaccgaagacggagagtttaccgaatgtaataatatgactctaataaatctgttgctgaaggtgctgggtcccattcacgagaggaatctgactcttttgctgctgctgttgcagattctgggttcagcaatcaccttcagcattcgctaccagctggtgcggctgttttatgatgtgtag

SEQ ID NO: 117423 - protein, 443 aa, Artificial Sequence
  derived and/or modified sequence
MRRQVMAALVVSGAAEQGGRDGPGRGRAPRGRVANQIPPEILKNPQLQAAIRVLPSNYNFEIPKTIWRIQQAQAKKVALQMPEGLLLFACTIVDILERFTEAEVMVMGDVTYGACCVDDFTARALGADFLVHYGHSCLIPMDTSAQDFRVLYVFVDIRIDTTHLLDSLRLTFPPATALALVSTIQFVSTLQAAAQELKAEYRVSVPQCKPLSPGEILGCTSPRLSKEVEAVVYLGDGRFHLESVMIANPNVPAYRYDPYSKVLSREHYDHQRMQAARQEAIATARSAKSWGLILGTLGRQGSPKILEHLESRLRALGLSFVRLLLSEIFPSKLSLLPEVDVWVQVACPRLSIDWGTAFPKPLLTPYEAAVALRDISWQQPYPMDFYAGSSLGPWTVNHGQDRRPHAPGRPARGKVQEGSARPPSAVACEDCSCRDEKVAPLAP

SEQ ID NO: 117424 - DNA, 1332 bp, Artificial Sequence
  derived and/or modified sequence
atgagaagacaggtgatggccgccctggtggtgagcggcgccgccgagcagggcggcagagacggccccggcagaggcagagcccccagaggcagagtggccaaccagatcccccccgagatcctgaagaacccccagctgcaggccgccatcagagtgctgcccagcaactacaacttcgagatccccaagaccatctggagaatccagcaggcccaggccaagaaggtggccctgcagatgcccgagggcctgctgctgttcgcctgcaccatcgtggacatcctggagagattcaccgaggccgaggtgatggtgatgggcgacgtgacctacggcgcctgctgcgtggacgacttcaccgccagagccctgggcgccgacttcctggtgcactacggccacagctgcctgatccccatggacaccagcgcccaggacttcagagtgctgtacgtgttcgtggacatcagaatcgacaccacccacctgctggacagcctgagactgaccttcccccccgccaccgccctggccctggtgagcaccatccagttcgtgagcaccctgcaggccgccgcccaggagctgaaggccgagtacagagtgagcgtgccccagtgcaagcccctgagccccggcgagatcctgggctgcaccagccccagactgagcaaggaggtggaggccgtggtgtacctgggcgacggcagattccacctggagagcgtgatgatcgccaaccccaacgtgcccgcctacagatacgacccctacagcaaggtgctgagcagagagcactacgaccaccagagaatgcaggccgccagacaggaggccatcgccaccgccagaagcgccaagagctggggcctgatcctgggcaccctgggcagacagggcagccccaagatcctggagcacctggagagcagactgagagccctgggcctgagcttcgtgagactgctgctgagcgagatcttccccagcaagctgagcctgctgcccgaggtggacgtgtgggtgcaggtggcctgccccagactgagcatcgactggggcaccgccttccccaagcccctgctgaccccctacgaggccgccgtggccctgagagacatcagctggcagcagccctaccccatggacttctacgccggcagcagcctgggcccctggaccgtgaaccacggccaggacagaagaccccacgcccccggcagacccgccagaggcaaggtgcaggagggcagcgccagaccccccagcgccgtggcctgcgaggactgcagctgcagagacgagaaggtggcccccctggccccctag

SEQ ID NO: 117425 - DNA, 2194 bp, Artificial Sequence
  derived and/or modified sequence
ctgtctttttagtaccacatgcgcaggcaggtgatggcggcgctggtcgtatccggggcagcggagcagggcggccgagacggccctggcagaggtcgggcccctcggggccgcgtggccaatcagatcccccctgagatcctgaagaaccctcagctgcaggcagcaatccgggtcctgccttccaactacaactttgagatccccaagaccatctggaggatccaacaagcccaggccaagaaggtggccttgcaaatgccggaaggcctcctcctctttgcctgtaccattgtggatatcttggaaaggttcacggaggccgaagtgatggtgatgggtgacgtgacctacggggcttgctgtgtggatgacttcacagcgagggccctgggagctgacttcttggtgcactacggccacagttgcctgattcccatggacacctcggcccaagacttccgggtgctgtacgtctttgtggacatccggatagacactacacacctcctggactctctccgcctcacctttcccccagccactgcccttgccctggtcagcaccattcagtttgtgtcgaccttgcaggcagccgcccaggagctgaaagccgagtatcgtgtgagtgtcccacagtgcaagcccctgtcccctggagagatcctgggctgcacatccccccgactgtccaaagaggtggaggccgttgtgtatcttggagatggccgcttccatctggagtctgtcatgattgccaaccccaatgtccccgcttaccggtatgacccatatagcaaagtcctatccagagaacactatgaccaccagcgcatgcaggctgctcgccaagaagccatagccactgcccgctcagctaagtcctggggccttattctgggcactttgggccgccagggcagtcctaagatcctggagcacctggaatctcgactccgagccttgggcctttcctttgtgaggctgctgctctctgagatcttccccagcaagcttagcctacttcctgaggtggatgtgtgggtgcaggtggcatgtccacgtctctccattgactggggcacagccttccccaagccgctgctgacaccctatgaggcggccgtggctctgagggacatttcctggcagcagccctacccgatggacttctacgctggcagctccttggggccctggacggtgaaccacggccaggaccgccgtccccacgccccgggccggcccgcgcgggggaaggtgcaggaggggtccgcgcgtcccccttcggccgtggcttgcgaggactgcagctgcagggacgagaaggtggcgccgctggctccttgacgcgctcccgggcctcagggtcctgccctccggaggagcagcctcgaggctggtggttttcagagcaggaggccgacgttttctccgcattggaagagcccgccgtctgcaggggcctggaggaatcactggggatggtggcacaggcactgaacaggctggggccttttgacggccttcttggtttcagccaaggggctgcgctagcagcccttgtgtgtgccctgggccaggcaggcgatccccgcttccccttgccacggtttatcctcttggtgtctggtttctgtccccggggcattgggttcaaggaatccatcctgcaaaggcccttgtcattgccttcgctccatgtttttggggacactgacaaagtcatcccctctcaggagagtgtgcaactggccagccaatttcccggagccatcaccctcacccactctggtggccacttcattccagcagctgcaccccagcgtcaggcctacctcaagttcttggaccagtttgcagagtgaaagatcaagaaatgtctctgctcctacatccagctcctctaggggcagcctccgtcatccatgccctcccaggaccctccactcactgctgtgagtgcgcctcaccagaaccagttaagagacaactatcaattcttgagacccaaattataagggccctgccctgtactgaagaaaaggggagcacaaggccttaatggacattgacttgtgaaaacgcaaacatgaatatggttggagagccctggattaggagggtgacatggggaaggcagaggctggcaccatggtgactgccacataataaagtggtgatttggattttg

SEQ ID NO: 117426 - DNA, 1332 bp, Artificial Sequence
  derived and/or modified sequence
atgcggcgccaggttatggctgccctggttgtttctggtgccgccgagcagggcggccgcgatggcccaggccggggacgggcgccccgggggcgggtggcgaaccagatccctcctgaaatactcaagaacccccaactgcaagctgccatcagagttttgccaagcaattataatttcgaaattccaaagaccatttggcgcattcagcaggcccaggcaaagaaggtagcactgcaaatgcctgagggtttgctgctttttgcctgcacgatagtcgacattctggaacgtttcactgaggctgaggtgatggttatgggggatgtgacctacggtgcctgttgcgtggacgactttactgcccgtgcccttggcgccgatttcctggtccactacgggcatagctgtcttattccaatggacaccagcgcccaggatttccgggtcttatatgtgttcgttgatatccgcattgacactactcacctattggattcccttagattgacttttccacccgccaccgcccttgcactggtgtccactattcagtttgtatccactctccaggccgccgcccaggagctaaaggcagagtaccgtgtcagcgtcccccaatgtaaacccctatctccgggcgagattttgggctgtacaagccctaggctgtccaaagaggtggaggcagttgtctacctgggcgacggtcgcttccatctggagtctgtgatgatcgccaaccccaacgttcccgcataccggtatgacccttactcaaaggtcctatcaagagaacactacgatcatcagagaatgcaagctgcccgccaggaggcaatcgccaccgctcgcagcgctaaaagctgggggctgatccttggtacattgggcaggcagggtagccccaaaatcctggaacatctggaatcacgactgagagccctcgggctcagttttgtcaggctgcttctgagcgagatcttcccttcaaaactttccctgcttcctgaagtcgacgtttgggtccaagtggcttgcccccgtctgtcaatagactggggtaccgcttttcccaagcctctcttaaccccttacgaggccgctgtggccctccgggacatctcctggcagcaaccctacccaatggacttttatgcgggctcgagcttaggtccttggactgtcaatcacggccaggatagaaggcctcacgccccgggccggcctgccaggggcaaagtacaggagggatccgcccggcctccgtctgcagtggcgtgtgaggattgttcatgcagggatgagaaagttgctcctctagctccttag

SEQ ID NO: 117427 - DNA, 1332 bp, Artificial Sequence
  derived and/or modified sequence
atgaggcggcaggtgatggccgccctggtggtgtctggagctgctgagcagggcggcagagatggccctggccggggccgggccccccggggccgggtggccaaccagatccccccagagatcctgaagaacccccagctgcaggccgccatccgggtgctgcccagcaactacaactttgagatccccaagaccatctggaggatccagcaggcccaggccaagaaggtggccctgcagatgcctgagggcctgctgctgtttgcctgcaccatcgtggacatcctggagcgcttcacagaggccgaggtgatggtgatgggagatgtgacctacggggcctgctgcgtggatgacttcaccgcccgggccctgggcgctgacttcctggtgcactacggccacagctgcctgatccccatggacaccagcgcccaggacttccgggtgctgtatgtgtttgtggacatcagaattgacaccacccacctgctggacagcctgcggctgaccttccccccagccacagccctggccctggtgtccaccatccagtttgtgtccaccctgcaggccgccgcccaggagctgaaggccgagtacagagtgtctgtgccccagtgcaagcccctgagccctggagagatcctgggctgcaccagcccccggctgagcaaggaggtggaggccgtggtgtacctgggagatggccgcttccacctggagagcgtgatgattgccaaccccaacgtgcctgcctaccgctatgacccctacagcaaggtgctgagccgggagcactatgaccaccagaggatgcaggccgcccggcaggaggccatcgccacagcccggagcgccaagtcctggggcctcatcctgggcaccctgggccggcagggcagccccaagatcctggagcacctggagagccggctgcgggccctgggcctgagctttgtgcggctgctgctgtctgagatcttccccagcaagctgagcctgctgcctgaggtggatgtgtgggtgcaggtggcctgcccccggctgagcattgactggggcacagccttccccaagcccctgctgaccccctatgaggccgctgtggccctgcgggacatctcctggcagcagccctaccccatggacttctacgccggcagcagcctgggcccctggacagtgaaccacggccaggaccggcggccccacgcccctggccggcctgcccggggcaaggtgcaggagggcagcgcccggccccccagcgctgtggcctgtgaggactgcagctgcagagatgagaaggtggcccccctggccccctag

SEQ ID NO: 117428 - DNA, 1332 bp, Artificial Sequence
  derived and/or modified sequence
atgcggcggcaggtgatggccgccctggtggtgagcggcgccgccgagcagggcgggagagacggccccgggcggggccgtgctccgagaggtagagtggcaaatcaaataccacccgaaatcctcaagaatccacagctgcaagcagcgatccgcgtcttgccaagcaactacaacttcgaaattcccaaaactatttggaggatacaacaagcccaggccaaaaaggtggcactgcagatgcccgaaggtctgctgttattcgcgtgtacaatcgttgatatcctggaacgctttactgaagctgaagtgatggttatgggcgacgttacatatggggcctgctgcgtagacgactttaccgcgagagctttgggcgctgacttccttgttcactatggccacagctgcctcatccccatggatacaagcgcacaggactttcgggtgctttacgtgttcgtggatatccgtattgacactacacacctgctcgattcacttcgcctgacattcccacccgcaactgcacttgctcttgtctcaactatacagttcgtatctacactacaggcagctgcacaggaacttaaagctgagtatagggtgtcagttccacagtgcaaacctctgtctccaggggagatcctggggtgcacctccccgaggctttccaaggaagttgaggcagtggtgtacctgggagatggaaggttccacctagagtcagtaatgattgccaatcccaacgtgcctgcctatcggtacgacccctactcaaaggtgttgagccgggagcactatgatcaccaaagaatgcaggccgcacgacaagaagcgatagcgaccgcacggtctgccaaaagctggggcctcatcttgggcacactggggcgccagggctcaccaaaaatccttgaacacttagaaagccgactgcgagccctgggtctgagctttgtcaggttgctcctaagcgagatattccctagcaagctgagcctccttcctgaagtggacgtttgggtccaagttgcatgcccgagactcagcattgattggggcacagcctttcccaaacccctgctgacaccctatgaggcagcggtggcactgcgtgacatctcatggcagcagccctatcccatggatttttacgcaggatcgagtctgggcccatggacagtcaaccacggtcaagatcggcgaccacacgctccgggcagacccgcacgggggaaggtccaggagggcagcgctcgacctccgtccgctgtggcttgcgaagattgttcctgcagagacgaaaaggtcgcaccactcgccccttag

SEQ ID NO: 117429 - DNA, 1332 bp, Artificial Sequence
  derived and/or modified sequence
atgagaaggcaggtcatggcagccctggtagtgagtggcgcagccgagcaaggaggacgtgacggaccaggcagaggacgagccccacgcggaagggtcgccaatcagatcccgcctgagatcttgaagaaccctcagcttcaggctgcgatcagagttctacctagtaattacaatttcgaaatccccaagacaatctggcggattcagcaggctcaggctaaaaaagttgcactccagatgcccgagggattactcctgtttgcctgtactatcgtggacatactggagcgcttcacggaagctgaagttatggtaatgggagacgtgacctatggggcatgttgcgtggacgattttactgctcgcgcactgggggctgatttcttggttcactacgggcactcgtgcctgatcccaatggatacgtcagctcaggattttagagttttatatgtcttcgttgacattaggattgataccacccaccttctcgacagcttaaggctgacattcccccctgcaacagctctggcactggtaagcactattcagtttgtctcgaccctgcaggcagccgcacaggagctaaaagctgaatacagggtaagcgtgccccagtgtaaaccattgtccccaggagaaattctcggctgcacatcacctcgattgagcaaagaggtggaagccgtagtctacttaggtgatggcaggttccatctcgagtccgtgatgatcgctaacccaaatgttcctgcttacagatatgacccatattccaaggtcttgtcccgggagcactacgaccaccaacggatgcaggctgccaggcaagaggccattgctaccgccaggtcagccaagagttgggggcttatcctgggcactttgggccgtcaggggtcccctaagatcctggagcatctggagagccggttgcgcgctcttggcctgtctttcgttcggttgctgctgagcgaaatattcccatctaagctgtctctattaccagaggtagacgtctgggtccaggtcgcgtgcccacggctgagcatagactgggggaccgcttttcctaagccactgttgaccccctatgaggccgcagtggccctccgagatatctcctggcaacagccttacccaatggacttctatgcaggttcttccctgggtccttggaccgtcaatcacgggcaggaccgaaggccccatgcacctggaagacccgcaaggggaaaagtgcaggaagggagcgcaaggccaccaagtgctgtggcgtgtgaagactgcagctgcagagatgaaaaagtggctccactggccccatag

SEQ ID NO: 117430 - protein, 519 aa, Artificial Sequence
  derived and/or modified sequence
MAAPSRLLIRGGRVVNDDFSEVADVLVEDGVVRALGHDLLPPGGAPAGLRVLDAAGKLVLPGGIDTHTHMQFPFMGSRSIDDFHQGTKAALSGGTTMIIDFAIPQKGGSLIEAFETWRSWADPKVCCDYSLHVAVTWWSDQVKEEMKILVQDKGVNSFKMFMAYKDLYMVTDLELYEAFSRCKEIGAIAQVHAENGDLIAEGAKKMLALGITGPEGHELCRPEAVEAEATLRAITIASAVNCPLYIVHVMSKSAAKVIADARRDGKVVYGEPIAASLGTDGTHYWNKEWHHAAHHVMGPPLRPDPSTPDFLMNLLANDDLTTTGTDNCTFNTCQKALGKDDFTKIPNGVNGVEDRMSVIWEKGVHSGKMDENRFVAVTSTNAAKIFNLYPRKGRIAVGSDADIVIWDPKGTRTISAKTHHQAVNFNIFEGMVCHGVPLVTISRGKVVYEAGVFSVTAGDGKFIPRKPFAEYIYKRIKQRDRTCTPTPVERAPYKGEVATLKSRVTKEDATAGTRKQAHP

SEQ ID NO: 117431 - DNA, 1560 bp, Artificial Sequence
  derived and/or modified sequence
atggcagctccaagtcgccttctaattcgcggcggacgtgttgtgaatgatgatttcagcgaagttgccgacgtgctagtcgaggacggcgttgtccgggccctgggtcatgacctgctgccccctgggggcgcccccgctggcctgcgcgttctggatgctgctggtaagctggtgctcccaggtgggatcgacacccacacacatatgcaattcccttttatgggtagtagaagtatcgatgatttccaccaaggcaccaaagccgctctgagtggtggaaccacgatgataatcgattttgcaatccctcaaaaaggagggtctttgattgaggcttttgagacctggcgcagttgggctgatcccaaggtgtgctgcgactactctctgcacgttgccgttacctggtggtctgatcaggttaaggaagagatgaagatattggtgcaggataaaggagtaaactcattcaaaatgtttatggcctataaggacctatatatggtaaccgacctggaactctatgaagcatttagtaggtgcaaggagattggggcgatcgcacaggtgcatgctgagaacggcgacctaatcgccgagggagctaagaaaatgctggccctgggaatcacaggccctgaggggcacgagctgtgtcgccctgaggcagttgaagccgaggccactctgagagcaatcactatagcctctgccgtgaactgcccattatatattgtgcacgtaatgtccaagtccgcagcgaaggttatcgctgacgcacgacgggatggcaaagtcgtctatggcgagccgattgccgccagcctcggtacagatggcactcactactggaataaggaatggcatcacgcggcccatcacgtgatgggtccacccttacgccccgaccccagcactccagacttcctgatgaacctactggcaaacgacgatttaacaaccacagggacagataattgtacattcaacacctgccagaaagccctgggtaaggatgattttacaaaaattcccaatggagtgaacggagtggaggatcgcatgtcagttatctgggagaagggagtccacagtgggaagatggacgaaaatcgttttgtcgctgtcacttctaccaatgccgcaaaaattttcaatctttatcctaggaagggcagaatcgctgtaggatccgatgctgatatagtgatctgggatcccaaaggcacccggacgatcagcgcaaagacgcatcatcaggcagtgaattttaatatctttgagggaatggtgtgccacggtgtcccgctggtaacaatcagcagagggaaggtggtgtacgaggcaggggtgtttagtgtgacagcgggcgatggcaaattcattccgcgaaagccctttgctgagtacatctacaaaaggattaagcaaagagatagaacttgcacccccacacccgtcgaacgggccccgtacaagggcgaggtcgcaactctaaaaagcagggtgaccaaagaggacgctaccgccggtacaaggaagcaggcacatccttag

SEQ ID NO: 117432 - DNA, 1560 bp, Artificial Sequence
  derived and/or modified sequence
atggccgcccccagccggctgctgatccggggcggccgggtggtgaatgatgacttcagcgaggtggctgatgtgctggtggaggatggagtggtgcgggccctgggccatgacctgctgcccccaggaggagccccagctggcctgcgggtgctggatgctgctgggaagctggtgctgcccggcggcatcgacacccacacccacatgcagttccccttcatgggcagccgcagcattgatgacttccaccagggcaccaaggccgccctgagcggcggcaccaccatgatcatcgactttgccatcccccagaagggcggcagcctgattgaggcctttgagacctggaggtcctgggccgaccccaaggtgtgctgtgactacagcctgcacgtggccgtgacctggtggagcgaccaggtgaaggaggagatgaagatcctggtgcaggacaagggcgtgaacagcttcaagatgttcatggcctacaaggacctgtacatggtgacagacctggagctgtatgaggccttcagccgctgcaaggagattggagccatcgcccaggtgcatgctgaaaatggagacctgattgctgagggcgccaagaagatgctggccctgggcatcaccggccctgagggccacgagctgtgcaggcctgaggccgtggaggccgaggccaccctgcgggccatcaccatcgccagcgctgtgaactgccccctgtacatcgtgcacgtgatgagcaagtctgctgccaaggtgattgctgatgccaggagagatggcaaggtggtgtatggagagcccatcgccgccagcctgggcacagatggcacccactactggaacaaggagtggcaccacgccgcccaccacgtgatgggcccccccctgcggccagaccccagcaccccagacttcctgatgaacctgctggccaatgatgacctgaccaccactggaacagacaactgcaccttcaacacctgccagaaggccctgggcaaggatgacttcaccaagatccccaatggagtgaatggagtggaggacaggatgtctgtcatctgggagaagggcgtgcacagcggcaagatggatgaaaatagatttgtggccgtgaccagcaccaatgctgccaagatcttcaacctgtaccccaggaagggcagaattgctgtgggcagtgatgctgacatcgtcatctgggaccccaagggcaccaggaccatcagcgccaagacccaccaccaggccgtgaacttcaacatctttgagggcatggtgtgccacggcgtgcccctggtgaccatcagccggggcaaggtggtgtatgaggccggggtcttctctgtgacagctggagatggcaagttcatccccaggaagccctttgctgagtacatctacaagaggatcaagcagagggacaggacctgcacccccacccctgtggagcgggccccctacaagggggaggtggccaccctgaagagccgggtgaccaaggaggatgccacagctggcaccaggaagcaggcccacccctag

SEQ ID NO: 117433 - DNA, 1560 bp, Artificial Sequence
  derived and/or modified sequence
atggccgcccccagccggctgctgatccggggcggccgggtggtgaatgacgactttagtgaagtggcagacgtgctggtggaggacggagttgttcgagctctggggcacgacttgctcccgcctggcggagcacctgccggactgagagtgctagatgctgccggaaaactcgttctccccgggggcatcgatacgcacacccatatgcagttcccgtttatgggttcacgcagtatcgatgacttccatcaggggaccaaggcagccctgtccggcggtacaactatgattattgattttgccatcccccagaagggcggctccctgattgaggcttttgaaacctggagaagctgggcggatccaaaagtttgttgtgattactcactgcacgtggctgtgacatggtggagcgatcaggtgaaggaagagatgaaaatcctggtgcaagacaagggggttaattctttcaaaatgttcatggcatataaggacctgtatatggtgacggatctagagttgtacgaggccttttccagatgcaaggaaattggagcaatcgctcaggttcacgcagaaaatggcgacctgatcgctgaaggggccaagaagatgcttgctcttggcattacaggccccgaaggccatgagctgtgcagacctgaggctgtggaagcagaggctactctgagggccatcacgattgcctctgctgtcaactgcccactatacatcgtgcatgtcatgagtaaatcagcggccaaagtgattgccgatgccaggcgagacgggaaggtggtgtacggggagcctatcgccgcttcactggggacagacggcactcattattggaataaggaatggcaccacgcggctcaccatgtgatgggacctccccttcgccctgacccttctacaccggattttttgatgaacttactcgcaaacgacgacctgaccaccacgggcaccgataactgcacttttaacacatgtcagaaagctttaggaaaagatgatttcacgaagataccaaacggggtgaacggggtagaagatagaatgagcgtgatttgggagaagggggtgcactccgggaaaatggatgagaaccggtttgtcgccgtgacttctactaatgccgcaaagatcttcaacctttatcccaggaaaggcagaattgcagtgggcagtgatgcagatatagttatttgggaccctaagggcacacgcactataagtgccaagactcaccaccaggcagtgaattttaatatatttgaaggaatggtctgccacggagtgcctctagtcacaatctcacggggcaaggtggtatatgaggccggagtgttcagcgtgactgccggtgatggaaagtttataccaaggaagccctttgcagagtacatttacaagcgtatcaagcagagggaccgaacctgcacacccactcctgtggaaagagccccctataagggcgaggtggcgaccctgaagtcccgtgttactaaagaagatgcaacagcagggacaagaaaacaagctcatccctag

SEQ ID NO: 117434 - DNA, 1560 bp, Artificial Sequence
  derived and/or modified sequence
atggccgcaccgtcccggctactcatacgcggtggcagggttgtgaacgacgacttctccgaagtggctgatgtgttggtggaggatggggtcgtgcgcgctctggggcacgatctgttgcctcccggaggggcacctgcagggctccgggttctcgatgctgccggaaaactggtgttgcccggagggatcgatacccatacacacatgcaattccctttcatgggatcaagatccatagatgacttccatcagggaaccaaagccgctctgtccggtggcacaacaatgatcattgattttgccatacctcagaagggaggatctttgattgaggcgttcgagacatggcgctcttgggctgatccgaaagtgtgttgtgactatagcctgcacgtggcggtgacatggtggtccgaccaggtcaaagaggagatgaaaattctggtccaggacaaaggtgtcaattcatttaagatgtttatggcttataaagatctttatatggtcaccgacctggaactgtacgaggctttctctagatgcaaagagatcggcgcaatcgcccaagtgcatgctgagaacggcgacttgatagcagagggtgcgaaaaagatgctcgccctggggatcactggtcccgaaggccacgagctttgtcggccagaggccgtggaagccgaggccacactgagagcaataaccatcgcttccgctgttaattgcccgctctatatagtgcatgtcatgagcaaatcagcagccaaggtaattgccgatgccagacgcgatggaaaagtggtctacggcgagcctatcgccgcttcgcttggaacagatggaactcactattggaataaggagtggcatcatgcagcacaccatgtgatggggccacctctgcgtcccgaccctagcacccctgatttcctgatgaatttgctggcaaacgacgatttaacaacaactggaactgataactgcaccttcaacacttgtcagaaagctttagggaaagacgactttaccaagatccccaatggtgtgaacggagtggaggatcgcatgagcgtcatttgggagaaaggggtgcactcaggaaagatggacgagaatcggttcgtggctgtgacctccaccaatgccgcaaagatttttaacctgtaccccaggaaggggagaatcgccgtgggatcggatgcagacattgtcatttgggaccccaaggggactagaaccatctcggccaagacgcatcaccaagccgtcaattttaacattttcgaggggatggtctgccacggagttcccctggtaactataagtcgcggaaaggtcgtttacgaggcaggtgtattttcagtcacagcaggcgatggcaaatttattccaagaaagcctttcgcagaatatatttacaaacgcatcaaacagcgggatcggacatgtaccccaacccccgtggaacgcgcaccatacaaaggcgaagttgccacactgaagtcgcgcgtgaccaaagaggacgccactgcaggtacgcgcaaacaggcccatccttag

SEQ ID NO: 117435 - DNA, 1560 bp, Artificial Sequence
  derived and/or modified sequence
atggccgcccccagcagactgctgatcagaggcggcagagtggtgaacgacgacttcagcgaggtggccgacgtgctggtggaggacggcgtggtgagagccctgggccacgacctgctgccccccggcggcgcccccgccggcctgagagtgctggacgccgccggcaagctggtgctgcccggcggcatcgacacccacacccacatgcagttccccttcatgggcagcagaagcatcgacgacttccaccagggcaccaaggccgccctgagcggcggcaccaccatgatcatcgacttcgccatcccccagaagggcggcagcctgatcgaggccttcgagacctggagaagctgggccgaccccaaggtgtgctgcgactacagcctgcacgtggccgtgacctggtggagcgaccaggtgaaggaggagatgaagatcctggtgcaggacaagggcgtgaacagcttcaagatgttcatggcctacaaggacctgtacatggtgaccgacctggagctgtacgaggccttcagcagatgcaaggagatcggcgccatcgcccaggtgcacgccgagaacggcgacctgatcgccgagggcgccaagaagatgctggccctgggcatcaccggccccgagggccacgagctgtgcagacccgaggccgtggaggccgaggccaccctgagagccatcaccatcgccagcgccgtgaactgccccctgtacatcgtgcacgtgatgagcaagagcgccgccaaggtgatcgccgacgccagaagagacggcaaggtggtgtacggcgagcccatcgccgccagcctgggcaccgacggcacccactactggaacaaggagtggcaccacgccgcccaccacgtgatgggcccccccctgagacccgaccccagcacccccgacttcctgatgaacctgctggccaacgacgacctgaccaccaccggcaccgacaactgcaccttcaacacctgccagaaggccctgggcaaggacgacttcaccaagatccccaacggcgtgaacggcgtggaggacagaatgagcgtgatctgggagaagggcgtgcacagcggcaagatggacgagaacagattcgtggccgtgaccagcaccaacgccgccaagatcttcaacctgtaccccagaaagggcagaatcgccgtgggcagcgacgccgacatcgtgatctgggaccccaagggcaccagaaccatcagcgccaagacccaccaccaggccgtgaacttcaacatcttcgagggcatggtgtgccacggcgtgcccctggtgaccatcagcagaggcaaggtggtgtacgaggccggcgtgttcagcgtgaccgccggcgacggcaagttcatccccagaaagcccttcgccgagtacatctacaagagaatcaagcagagagacagaacctgcacccccacccccgtggagagagccccctacaagggcgaggtggccaccctgaagagcagagtgaccaaggaggacgccaccgccggcaccagaaagcaggcccacccctag

SEQ ID NO: 117436 - DNA, 2127 bp, Artificial Sequence
  derived and/or modified sequence
atttgcagcctgaggcagagctcgggggctgtcggtggggaccttgcaggagggcaccccaagcccgcccggcccgcccaacccagcccctgcgcgcagcccgggccgagtaggaccccgcgcgcccctcgctatggcggcgccctcgcggctcctgatccgcgggggtcgcgtggtcaacgatgacttctcggaggtggccgacgtgctggtggaggacggcgtggtgcgggcactcgggcacgacctgctgcctcccgggggcgctcctgcggggctgcgggtcctcgacgccgccggcaagctcgtcctgcccggaggcatcgacacacacacgcacatgcagttccccttcatgggctcgcggtccatcgacgacttccaccagggcaccaaggctgctctctcaggaggcaccaccatgattattgatttcgccattcctcagaaaggtggctccctcattgaggccttcgagacctggcgaagctgggctgatcccaaagtttgctgcgactacagccttcatgtggcagtgacgtggtggagtgaccaggttaaagaagaaatgaaaatccttgtgcaagataaaggtgttaactctttcaagatgtttatggcctataaagatctgtacatggtgacagacctggagctgtacgaagccttctctcggtgcaaggaaattggagcaattgcccaggtccatgcggaaaatggagacttaattgcagagggagcaaagaagatgttggctctggggataacaggccctgagggccacgagctgtgccgcccagaggcagtggaggcagaggccacgctgagagccatcaccatagccagcgctgtgaactgtcctctctacattgtgcatgtgatgagcaagtctgcagctaaggtgatagcggatgcaaggagagatgggaaggtggtctatggtgaacccatagcagccagtcttggcacagatggcactcactactggaataaagaatggcaccatgcagcccaccatgtcatgggtccacctttgcgaccagacccctcaacacccgacttcctcatgaatctgttggctaatgatgatctaaccacaacagggactgataactgcactttcaacacctgccagaaagctcttgggaaggatgattttaccaagatccccaatggggtgaatggtgttgaagatcggatgtccgtaatatgggaaaaaggcgtgcatagtggtaaaatggatgaaaacagatttgtggcagttaccagcacaaatgcagccaaaatttttaatctctatccaagaaaaggaagaatagctgtaggatcagatgctgacattgttatttgggacccaaaaggcacaaggactatctcagcaaaaactcatcatcaggctgttaacttcaacattttcgagggcatggtttgccacggggtgccccttgtgactatttcaagaggcaaagtggtatatgaagccggagtgttcagtgtcacggcaggagatgggaagtttattcctcgaaaaccatttgctgaatatatttacaaacgaataaagcagcgagaccggacttgcacacctacccctgtggagcgtgcaccctataagggagaagtcgccacactgaaatccagagtgacaaaagaagatgccacagcagggaccaggaaacaggcccacccctgaagtgtgtgccatcggtaaaaaaatcagaggaaaggaggctgccattcccttcacagccaaacattgtcaacccatggagaagcaggccttattcaactccctaggatcctttagaaaaaattcaccactataggcttctttgattttctttcagaagcaattgctgtctttctcactgtgtttttgttgctgcataagattgaaggtataaatttatattattgtgatggaaaggctgtgtggaaattcattgatgatactttaaaatgtcatctttgcttgtactagatttcttacttagaatttttaaaaatcattttcttgtttaaatagtttctttttttaaaaaaatggttacattagttttaaaatagctctgtgattttactttttattgtaattaataaacattgagatcttcattttatacctta

SEQ ID NO: 117437 - protein, 572 aa, Artificial Sequence
  derived and/or modified sequence
MSYQGKKNIPRITSDRLLIKGGKIVNDDQSFYADIYMEDGLIKQIGENLIVPGGVKTIEAHSRMVIPGGIDVHTRFQMPDQGMTSADDFFQGTKAALAGGTTMIIDHVVPEPGTSLLAAFDQWREWADSKSCCDYSLHVDISEWHKGIQEEMEALVKDHGVNSFLVYMAFKDRFQLTDCQIYEVLSVIRDIGAIAQVHAENGDIIAEEQQRILDLGITGPEGHVLSRPEEVEAEAVNRAITIANQTNCPLYITKVMSKSSAEVIAQARKKGTVVYGEPITASLGTDGSHYWSKNWAKAAAFVTSPPLSPDPTTPDFLNSLLSCGDLQVTGSAHCTFNTAQKAVGKDNFTLIPEGTNGTEERMSVIWDKAVVTGKMDENQFVAVTSTNAAKVFNLYPRKGRIAVGSDADLVIWDPDSVKTISAKTHNSSLEYNIFEGMECRGSPLVVISQGKIVLEDGTLHVTEGSGRYIPRKPFPDFVYKRIKARSRLAELRGVPRGLYDGPVCEVSVTPKTVTPASSAKTSPAKQQAPPVRNLHQSGFSLSGAQIDDNIPRRTTQRIVAPPGGRANITSLG

SEQ ID NO: 117438 - DNA, 1719 bp, Artificial Sequence
  derived and/or modified sequence
atgtcctaccagggcaagaagaacattcctaggattacctcagacaggttgctgattaaaggcgggaagatcgtgaatgatgaccagtctttctacgccgatatatacatggaggacgggttgataaaacagattggggagaatcttattgtgcccggaggtgtgaagacaatcgaggcccatagccgcatggtaatcccgggggggatcgacgtacataccaggttccagatgcctgatcagggcatgactagcgcggatgatttcttccaaggaactaaggcggccttggccggcggcactacaatgatcattgatcatgtggtgcctgaaccgggaacttccctactggccgcttttgatcagtggcgcgagtgggcagacagtaagagttgctgcgattattctttgcacgtggatattagcgaatggcataaggggatccaggaagagatggaggcactcgtgaaggatcacggcgtaaactccttccttgtgtacatggcgttcaaagatagatttcagctgacagactgccagatttatgaggtcttaagtgttatccgcgacattggcgcaatcgctcaagttcatgccgaaaacggagacataatagcagaggagcagcagagaatcctcgacctggggatcaccgggcccgaaggccacgttctaagccgaccagaagaggttgaagctgaagccgtgaatagagccataaccatcgcaaaccaaactaattgtccactatatatcaccaaggtcatgtcaaaaagttcagccgaggtaatcgcgcaggcccgcaagaagggcaccgtcgtgtacggggaaccaatcactgccagcctgggcaccgacggttcacactactggtcaaaaaattgggcgaaggcggcagctttcgtgacttctcctcctttgtcccccgatcctaccacacctgatttcctgaattccttactctcctgcggcgatcttcaggtgactggttccgcccattgtacatttaacactgcgcagaaagccgtcggaaaagataattttacactgattcccgaaggcacgaacggcacagaggagagaatgtcggtcatttgggacaaggcagtggtgaccgggaaaatggatgagaaccagttcgttgccgtcacgagtaccaacgcggccaaggtgttcaacttataccctagaaaagggagaatcgcagtggggagcgatgctgacttagtgatttgggatcctgactcagtgaagactatttctgcaaagacacacaactcaagcctagaatataatatttttgagggaatggagtgtaggggtagccctttggtggtgattagccagggaaagatcgtcttagaggatgggacactgcacgtcacagagggaagcggcaggtatattccacgcaagccatttcctgattttgtatataagcggattaaagccaggtctagactggccgagctacgaggtgtgccacgcggcctctacgacggtccagtctgcgaagtgtcagtcacccccaagacagtcacgccggcctcctcagcaaagacaagccccgcgaagcagcaggctccgccagtgaggaacctgcaccagtcaggcttcagcttatctggagcccaaatagatgacaatattccccgcaggaccacccagcgtattgtcgctcctccaggtgggcgcgctaatattaccagtctgggatag

SEQ ID NO: 117439 - DNA, 1719 bp, Artificial Sequence
  derived and/or modified sequence
atgagctaccagggcaaaaagaacatccccagaatcacatcggataggttacttatcaagggaggcaaaatcgtgaacgacgatcagagcttctacgcagacatctatatggaagatgggctaataaaacaaatcggtgagaaccttatcgtgcccggtggcgtgaaaactatcgaagcacactcccgaatggtgatccccggaggaatcgatgtccacacccggtttcaaatgccagaccagggcatgacatcggcagacgacttctttcaggggacaaaggccgcactggcaggtgggacaacgatgatcattgaccatgtggtgccggagccaggtacctccctacttgcagcattcgaccagtggcgggagtgggctgactccaaatcttgttgcgattattcgctacatgtagacatttcggaatggcacaaaggaattcaggaagaaatggaagccttggtgaaggaccatggagttaattcttttctagtgtatatggcgttcaaggatcggtttcagctgacagactgccagatctatgaagttctgtccgtgatccgcgatattggggcaatcgcacaagtgcatgccgaaaacggtgatatcatcgctgaggagcaacagcgaatcctcgaccttggtatcaccggacctgaggggcatgtgctgagcagaccagaggaggtagaggcggaggccgtaaatagagccattaccatcgcgaaccaaaccaactgtccattgtatattacaaaagttatgtcaaaatcgagtgctgaagtaatcgctcaggcaagaaaaaagggaacagtggtgtatggcgaacccatcacagcatccctcggcacagacggttctcactactggtccaagaattgggccaaggccgctgcatttgtgacatcaccccctctctctcccgaccctaccacacctgattttctgaactcccttctcagctgcggtgatcttcaggtgaccggaagcgctcattgtaccttcaacacagctcagaaggctgttgggaaagacaatttcactctcattcccgagggtacaaatggcaccgaggagcgtatgtccgtgatctgggataaggccgtagtcaccgggaaaatggacgaaaatcaatttgttgccgtgacctcgactaacgctgcaaaggtgtttaacctgtatccaagaaagggcagaattgcagttggatctgacgcggacctagtcatctgggacccggactctgtgaagaccatctccgccaaaacacataactcctctcttgagtataacatatttgaaggaatggaatgcagaggaagccctcttgtcgttattagccaggggaagattgttctggaggatgggaccttacacgtgactgaaggcagtggccggtatatacccagaaaaccctttccagactttgtttataaaagaattaaagcccggagccgactggcagaactcaggggtgtgccgcgcggcttgtacgatggacctgtgtgtgaggttagtgtgacacccaaaacagtcaccccagccagctcagctaagaccagtcccgctaagcaacaggcccctcccgtcaggaacctccaccagtcagggttcagtttatccggtgcacagatcgacgataacatcccgcgacgtacaacccaaagaattgtcgcgccaccgggaggcagagcaaatataacttccttgggttag

SEQ ID NO: 117440 - DNA, 1719 bp, Artificial Sequence
  derived and/or modified sequence
atgagctaccagggcaagaagaacatcccccgcatcaccagtgaccggctgctgatcaagggcggcaagatcgtgaatgatgaccagagcttctatgctgacatctacatggaggatggcctcatcaagcagattggagaaaatctcatcgtgcctgggggcgtgaagaccatcgaggcccacagcaggatggtgattcctgggggcattgatgtgcacacccgcttccagatgccagaccagggcatgaccagcgcagatgacttcttccagggcaccaaggccgccctggccggcggcaccaccatgatcatcgaccacgtggtgcctgagcccggcaccagcctgctggccgcctttgaccagtggagggagtgggccgacagcaagagctgctgtgactacagcctgcacgtggacatcagcgagtggcacaagggcatccaggaggagatggaggccctggtgaaggaccatggagtgaacagcttcctggtgtacatggccttcaaggaccgcttccagctgacagactgccagatctatgaggtgctgagcgtcatccgggacattggagccatcgcccaggtgcatgctgaaaatggagacatcatcgccgaggagcagcagaggatcctggacctgggcatcaccggccctgagggccacgtgctgagcaggcctgaggaggtggaggccgaggccgtgaacagagccatcaccatcgccaaccagaccaactgccccctgtacatcaccaaggtgatgagcaagagcagcgctgaggtgattgcccaggccaggaagaagggcaccgtggtgtatggagagcccatcacagccagcctgggcacagatggcagccactactggagcaagaactgggccaaggctgctgcctttgtgaccagcccccccctgagcccagaccccaccaccccagacttcctgaacagcctgctgagctgtggggacctgcaggtgactggaagtgcccactgcaccttcaacacagcccagaaggctgtgggcaaggacaacttcaccctcatccctgagggcaccaacggcacagaggagaggatgtctgtcatctgggacaaggctgtggtgacaggcaagatggatgagaaccagtttgtggccgtgaccagcaccaatgctgccaaggtgttcaacctgtaccccaggaagggcagaattgctgtgggcagtgatgctgacctggtgatctgggaccctgacagcgtgaagaccatcagcgccaagacccacaacagcagcctggagtacaacatctttgagggcatggagtgccggggcagccccctggtggtgatcagccagggcaagatcgtgctggaggatggcaccctgcacgtgacagagggcagcggccgctacatccccaggaagcccttcccagactttgtgtacaagaggatcaaggcccggagccggctggccgagctgcggggcgtgccccggggcctgtatgatggccctgtgtgtgaggtgtctgtgacccccaagacagtgaccccagccagcagcgccaagaccagccctgccaagcagcaggcccctcctgtgaggaacctgcaccagagcggcttcagcctgagcggggcccagattgatgacaacatccccaggaggaccacccagagaattgtggcccctcctgggggccgggccaacatcaccagcctgggctag

SEQ ID NO: 117441 - DNA, 1719 bp, Artificial Sequence
  derived and/or modified sequence
atgagctaccagggcaagaagaacatcccccggatcaccagcgaccgtctgctgatcaaagggggcaagatcgtgaacgacgaccagtctttttacgccgatatctacatggaggacggactgataaagcagataggggaaaatctgatcgtgccagggggtgtgaagacaattgaggcgcattccaggatggtcatcccagggggtatagacgtgcacactcgcttccagatgccagaccaagggatgacctctgctgacgactttttccagggcacaaaagctgccctggccggcggaaccacaatgataattgaccacgtagtaccagaaccaggtacatcactgttagctgccttcgatcagtggcgtgagtgggccgatagtaaaagttgttgcgattactctctgcatgttgacatttctgaatggcacaaggggatccaagaggagatggaagcattggtgaaagatcatggggtcaatagttttctggtgtatatggcctttaaagacaggtttcagctcaccgactgccagatctatgaagttctatccgtcatccgagacatcggcgccatagctcaagtgcacgccgaaaacggggatatcatcgcagaggagcagcagcgcattctcgatttaggaattaccggaccggagggacatgtcctctcaaggccagaggaagtggaagccgaggccgttaatagagccatcacaattgcaaaccagaccaactgtcctttgtatatcactaaggttatgtccaaatcctctgcggaggtgattgcacaggccagaaaaaaaggaaccgtggtgtacggggaacccatcacagcatctctcggcactgacgggtctcattactggtcgaagaactgggcgaaagcagcggcattcgtgacatctccacccttatccccagacccgaccacccccgattttttgaacagcctcctcagttgtggcgacctgcaggtgacaggaagtgcccactgcacattcaacacggcacagaaggcagttggtaaggataactttactttaatccccgagggaactaacggcaccgaagagcgtatgagcgtgatttgggataaagccgtcgttactgggaagatggacgaaaaccaattcgttgccgtcacctccaccaacgccgcgaaggtgtttaacctgtatcctcggaaaggaaggatagctgtgggatctgacgctgatctcgtgatctgggaccctgattctgtgaaaacaatttccgcaaagacacataattcttccctcgaatacaatatatttgagggtatggaatgccggggcagcccccttgtggtgattagtcagggcaaaattgttttggaggatggaactctgcacgtcacagagggaagtggaaggtatattccgcgaaaacccttccctgatttcgtgtataagaggatcaaggccaggagccgcctagctgaacttagaggcgtgcccagaggtctttatgatggccctgtatgcgaggtgtcggttaccccaaaaacggtgacccctgcgagtagcgcaaagacttccccagccaaacagcaggcccctcccgtcaggaatctgcaccaaagcggcttcagtttgtctggcgcgcaaatagatgacaatatccctagaagaactacccagcggatcgtcgccccccccggcgggcgcgcaaatatcacctctctggggtag

SEQ ID NO: 117442 - DNA, 1719 bp, Artificial Sequence
  derived and/or modified sequence
atgagctaccagggcaagaagaacatcccccggatcaccagcgacaggctcctgattaaaggcggcaaaatagttaacgacgatcagtccttctacgctgacatttacatggaggatggtttgattaagcagataggcgagaatctcatcgtaccaggtggagtaaaaactatagaggcgcatagccgaatggtcatcccaggggggattgatgtccatacaaggttccagatgcctgatcaggggatgaccagtgccgacgacttcttccaggggaccaaggcagcgttggccgggggaactaccatgatcattgaccacgttgtaccagaaccggggacttctcttttagctgcttttgatcagtggcgggaatgggcagatagcaaaagttgctgcgattattctttgcatgtagatattagcgaatggcacaagggaattcaggaggaaatggaggctctggtcaaagaccatggtgtcaattcattcctggtgtacatggcgttcaaggaccggtttcagctaacagactgccagatttacgaggtgcttagcgttatcagagacattggggctattgcccaggtgcacgcggagaatggtgatattatagccgaagagcaacagagaatccttgatctcggcataactggcccggaaggccatgtattatctcgtcccgaggaggtggaggcggaagctgtgaatcgggctatcaccatagcaaatcagacaaattgccctctgtatattactaaagtgatgtcaaagagttcagctgaggtgatcgcccaagctcggaaaaagggtaccgtggtgtacggggagcccattacagcctccctgggaaccgatggttcccactactggagcaaaaattgggctaaagcggccgcgttcgtaacaagtccccctctgtcccccgaccccacgacaccggactttctaaactctctcctctcctgtggcgacctccaggtcacgggtagtgcgcactgcacctttaacactgcacaaaaggctgtgggtaaagacaacttcacattaattcccgaagggacaaatggcaccgaggagcgtatgtccgttatatgggacaaggccgttgtcaccggcaaaatggatgaaaaccagttcgtggcagtgacctccactaacgctgcgaaagtgtttaacttatatccaaggaaaggaaggattgccgtgggttcggatgcagatctggtaatctgggatcccgatagtgtcaagacaatcagtgctaagacgcacaacagttccctggaatacaatatttttgaagggatggaatgtcgggggagcccgctggtggtcattagtcagggtaagatcgtcctcgaggacggtacgctccacgtcactgagggcagcggcagatatataccccgtaaacccttccccgacttcgtctataaaaggatcaaagccaggagccgattggccgagcttcggggggtcccccgaggactgtacgatggaccggtctgtgaggtaagtgtgacccccaagaccgtgacccctgcttctagcgccaagacatcgcctgcaaaacagcaggccccacccgtgcgtaacctgcaccagtcaggctttagcttatccggggcccagatcgatgacaatatcccaagacgtacaacacagcgaattgttgcaccacccggggggagggctaatattacaagcctgggatag

SEQ ID NO: 117443 - DNA, 1719 bp, Artificial Sequence
  derived and/or modified sequence
atgtcataccagggtaaaaaaaatataccacggatcacaagcgataggttgctgatcaagggtgggaagatagtgaatgacgatcagtccttttatgccgacatatatatggaagatgggttaatcaaacaaatcggcgagaatcttatcgtgcccggaggggtgaagacaatcgaagcccattcgagaatggtaatcccaggtggtatagacgtccacacccggtttcagatgccagatcaggggatgaccagcgctgacgacttttttcaaggaacaaaagctgcacttgccggagggacgaccatgatcatcgaccatgtggtgccagaacccggaacttccttgctggccgcattcgatcaatggagggaatgggccgactcgaagagttgttgcgactactcgctccacgtagatatctccgagtggcacaaaggcatacaggaagagatggaagctttagtgaaggaccatggcgtcaatagcttcctggtgtacatggccttcaaggaccgctttcagttgaccgactgtcaaatctacgaagttctgtctgtgatccgtgatattggagctatcgcacaggtccacgccgaaaacggagacatcatcgccgaggaacagcagcgcatcctcgacctgggcattactggtcctgaaggccacgtattgtccagaccagaggaggtggaggcagaagctgtaaaccgggcaatcaccatcgccaatcaaacaaactgcccactgtatataacaaaggtgatgagtaagtcgtcggccgaggttattgcccaagcccgaaagaagggaaccgttgtttacggtgagcctattactgctagcctggggactgacggcagccactattggtccaagaactgggccaaggccgcagcctttgtaacctctccaccccttagtcctgaccccaccacacctgactttctgaattcactgctctcttgcggtgacttgcaagtgacaggatctgcacactgcacttttaatactgcccagaaggccgtgggcaaggataatttcaccttaattcccgaaggaactaacggtaccgaagaaagaatgtctgtaatttgggacaaggccgtagtgacggggaagatggatgagaatcagtttgtggccgtcacgagcaccaacgcagccaaagtgttcaatctctaccctagaaagggaaggatcgctgtcggatctgacgctgacttggttatttgggatccagattccgttaaaactatatccgccaaaacacataactcctcactcgaatacaatatttttgaggggatggaatgtaggggatccccactcgtcgtcatttctcagggtaagatagtgctagaggatggcacccttcatgtcactgagggctccggtcggtacatccccaggaaaccattcccagacttcgtttacaagagaattaaggcgaggtctaggctcgccgagctgaggggtgtccccagaggcctgtacgacggccctgtgtgcgaagtcagcgtcacccccaagaccgtcaccccggctagctctgcgaagacctctcctgcaaaacagcaggcaccacctgtacgcaatctgcaccagtccggattttcactctccggcgctcagatcgacgacaacatcccgcgtagaaccacgcaacgtatcgtcgcaccccctggcggaagggccaatatcacctcattaggatag

SEQ ID NO: 117444 - DNA, 1719 bp, Artificial Sequence
  derived and/or modified sequence
atgtcataccagggtaagaagaacattccacgcataacctcggaccgcctccttatcaaaggcggtaaaatcgtgaatgacgatcagtccttctatgccgatatctatatggaggacgggctgatcaaacagattggtgagaatctaattgtgccaggcggtgtcaaaactatcgaggcccacagtcgcatggtcatcccagggggtatagatgtccacacccgattccagatgcccgatcagggcatgacatctgctgacgattttttccagggaaccaaggccgcactggccggtggcaccacaatgattattgaccacgtcgtgcccgagccaggcaccagccttctggcggcatttgaccagtggcgggaatgggccgattcaaagtcctgttgtgattatagtctccatgtcgatatatcagagtggcacaagggcatccaggaggaaatggaggctctggtgaaagaccacggtgtgaatagttttctggtatacatggcttttaaggacaggtttcagcttactgactgtcagatctatgaagtgctgtccgtgatcagggacataggggcaattgcccaggtgcacgcagaaaatggggatataatcgcggaggaacagcaaaggatcctcgatttagggatcaccggcccagaaggccatgtcctaagtcgacctgaggaagtggaggcagaggcagtgaaccgcgcaatcaccatcgcgaatcagacgaattgcccactgtacattaccaaggtgatgtccaaatcctcggctgaggtcattgcccaggccaggaaaaaggggacagtggtttacggcgaaccaatcactgcatccttgggaaccgatggcagccactattggagcaaaaactgggcaaaggcagctgccttcgtgacctcaccacctctgtcaccagatccgaccacccccgacttcctgaactcattgctctcatgcggcgatttacaggttaccgggagcgcacattgcactttcaataccgcacagaaggccgtgggcaaggataactttactcttattcctgagggtacgaatggaaccgaggaacgaatgtccgtcatctgggacaaggctgtcgtcaccggaaaaatggacgaaaaccaattcgtggcagtgacatccacaaacgctgcaaaggtgtttaacctctatccgcgaaagggccgtattgctgtcggcagtgatgccgatctagtgatctgggatcccgacagtgtcaaaacaatcagtgctaagacccacaactccagccttgagtacaacattttcgaggggatggagtgtcgtggctcacccctggtcgttataagccaggggaagattgtgttggaggatggcactttacacgtgactgaagggtccggaaggtatatacccaggaaacctttcccggattttgtgtacaagcgtataaaggctaggagtcggctggctgaactgcgcggagtgccccgtgggttgtacgacggccctgtctgcgaggtctccgtgactcccaagaccgtcactcctgcctcctcagctaagactagtccggctaagcaacaagcccctcctgtccgcaacttgcatcagtctggtttctctctgagtggcgcacaaatcgatgacaatattccacgcaggactacgcagagaatcgttgcacccccaggaggtcgggctaacatcaccagcctgggctag

SEQ ID NO: 117445 - DNA, 1719 bp, Artificial Sequence
  derived and/or modified sequence
atgagctaccagggcaagaagaacatccccagaatcaccagcgacagactgctgatcaagggcggcaagatcgtgaacgacgaccagagcttctacgccgacatctacatggaggacggcctgatcaagcagatcggcgagaacctgatcgtgcccggcggcgtgaagaccatcgaggcccacagcagaatggtgatccccggcggcatcgacgtgcacaccagattccagatgcccgaccagggcatgaccagcgccgacgacttcttccagggcaccaaggccgccctggccggcggcaccaccatgatcatcgaccacgtggtgcccgagcccggcaccagcctgctggccgccttcgaccagtggagagagtgggccgacagcaagagctgctgcgactacagcctgcacgtggacatcagcgagtggcacaagggcatccaggaggagatggaggccctggtgaaggaccacggcgtgaacagcttcctggtgtacatggccttcaaggacagattccagctgaccgactgccagatctacgaggtgctgagcgtgatcagagacatcggcgccatcgcccaggtgcacgccgagaacggcgacatcatcgccgaggagcagcagagaatcctggacctgggcatcaccggccccgagggccacgtgctgagcagacccgaggaggtggaggccgaggccgtgaacagagccatcaccatcgccaaccagaccaactgccccctgtacatcaccaaggtgatgagcaagagcagcgccgaggtgatcgcccaggccagaaagaagggcaccgtggtgtacggcgagcccatcaccgccagcctgggcaccgacggcagccactactggagcaagaactgggccaaggccgccgccttcgtgaccagcccccccctgagccccgaccccaccacccccgacttcctgaacagcctgctgagctgcggcgacctgcaggtgaccggcagcgcccactgcaccttcaacaccgcccagaaggccgtgggcaaggacaacttcaccctgatccccgagggcaccaacggcaccgaggagagaatgagcgtgatctgggacaaggccgtggtgaccggcaagatggacgagaaccagttcgtggccgtgaccagcaccaacgccgccaaggtgttcaacctgtaccccagaaagggcagaatcgccgtgggcagcgacgccgacctggtgatctgggaccccgacagcgtgaagaccatcagcgccaagacccacaacagcagcctggagtacaacatcttcgagggcatggagtgcagaggcagccccctggtggtgatcagccagggcaagatcgtgctggaggacggcaccctgcacgtgaccgagggcagcggcagatacatccccagaaagcccttccccgacttcgtgtacaagagaatcaaggccagaagcagactggccgagctgagaggcgtgcccagaggcctgtacgacggccccgtgtgcgaggtgagcgtgacccccaagaccgtgacccccgccagcagcgccaagaccagccccgccaagcagcaggccccccccgtgagaaacctgcaccagagcggcttcagcctgagcggcgcccagatcgacgacaacatccccagaagaaccacccagagaatcgtggccccccccggcggcagagccaacatcaccagcctgggctag

SEQ ID NO: 117446 - DNA, 4603 bp, Artificial Sequence
  derived and/or modified sequence
aatcgctgctcgtctctctcgaagcggatggcttttgcctgagaggaaagggagtggctggcggcgcatgcgccacggtggccgacttgaaccgaggcttttattgctgtagtttatttccacccccttccctcctgtttctctctctccttctctctctctctctctctctctcttttttttccgccctagctggggctgtgttggaggagaggaagaaagagagacagaggattgcattcatccgttacgttcttgaaatttcctaatagcaagaccagcgaagcggttgcacccttttcaatcttgcaaaggaaaaaaacaaaacaaaacaaaaaaaacccaagtccccttcccggcagtttttgccttaaagctgccctcttgaaattaattttttcccaggagagagatgtcttatcaggggaagaaaaatattccacgcatcacgagcgatcgtcttctgatcaaaggaggtaaaattgttaatgatgaccagtcgttctatgcagacatatacatggaagatgggttgatcaagcaaataggagaaaatctgattgtgccaggaggagtgaagaccatcgaggcccactcccggatggtgatccccggaggaattgacgtccacactcgtttccagatgcctgatcagggaatgacgtctgctgatgatttcttccaaggaaccaaggcggccctggctgggggaaccactatgatcattgaccacgttgttcctgagcctgggacaagcctgctcgctgcctttgaccagtggagggaatgggccgacagcaagtcctgctgtgactactctctgcatgtggacatcagtgagtggcataagggcatccaggaggagatggaagcgcttgtgaaggatcacggggtaaattccttcctcgtgtacatggctttcaaagatcgcttccagctaacggattgccagatttatgaagtactgagtgtgatccgggatattggcgccatagcccaagtccacgcagaaaatggcgacatcattgcagaggagcagcagaggatcctggatctgggcatcacgggccccgagggacatgtgctgagccgacctgaggaggtcgaggccgaagccgtgaatcgtgccatcaccatcgccaaccagaccaactgcccgctgtatatcaccaaggtgatgagcaaaagctctgctgaggtcatcgcccaggcacggaagaagggaactgtggtgtatggcgagcccatcactgccagcttgggaacggacggctcccattactggagcaagaactgggccaaggctgctgcctttgtcacctccccacccttgagccctgatccaaccactccagactttctcaactccttgctgtcctgtggagacctccaggtcacgggcagtgcccattgcacgtttaacactgcccagaaggctgtaggaaaggacaacttcaccctgattccggagggcaccaatggcactgaggagcggatgtccgtcatctgggacaaggctgtggtcactgggaagatggatgagaaccagtttgtggctgtgaccagcaccaatgcagccaaagtcttcaacctttacccccggaaaggccgcattgctgtgggatccgatgccgacctggtcatctgggaccccgacagcgttaaaaccatctctgccaagacacacaacagctctctcgagtacaacatctttgaaggcatggagtgccgcggctccccactggtggtcatcagccaggggaagattgtcctggaggacggcaccctgcatgtcaccgaaggctctggacgctacattccccggaagcccttccctgattttgtttacaagcgtatcaaggcaaggagcaggctggctgagctgagaggggttcctcgtggcctgtatgacggacctgtgtgtgaagtgtctgtgacgcccaagacagtcactccagcctcctcggccaagacgtctcctgccaagcagcaggccccacctgtccggaacctgcaccagtctggattcagtttgtctggtgctcagattgatgacaacattccccgccgcaccacccagcgtatcgtggcgccccccggtggccgtgccaacatcaccagcctgggctagagctcctgggctgtgccgtccactggggactggggatgggacacctgaggacattctgagacttctttcttccttcctttttttttttttgtttttttttttaagagcctgtgatagttactgtggagcagccagttcatggggtcccccttggggccccacaccccgtctctcaccaagagttactgattttgctcatccacttccctacacatctatgggtatcacacccaagactacccaccaagctcatacagggaaccacacccaacacttagacatgcgaacaagcagcccccagcgagggtctccttcgccttcaacctcctagtgtctgttagcatcttccttttcatggggggagggaagataaagtgaattgcccagagctgcctttttcttttctttttaaaaattttaagaagttttctttgtggggctggggaggggccggggtcagggagagtcttttttttttttttttttaaatactaaattggaacatttaattccatattaatacaaggggtttgaactggacatcctaatgatgcaattacgtcatcacccagctgattccgggtggttggcaaactcatcgtgtctgtcctgagaggctccacaatgcccacccgcatcgccattctgtagtcttcagggtcagctgttgataaaggggcaggcttgcgttattggcctagattttgctgcagattaaatcctttgaggattctcttctcttttaccatttttctgcgtgctctcactctctctttctctctctagctttttaattcatgaatattttcgtgtctgtctctctctctctctgtgtttcctccagcccttgtctcggagacggtgttttcctcccttgccccattatcttttcacctcccaggtctaccatttcatggtggtcgttgggtccgcctaaaggatttgagcgtttgccattgcaagcatagtgctgtgtcatcctggtccatgtaggactggtgctaaccacctgccatcatgaggatgtgtgctagagtgtgggaccctggccaagtgcaggaatgggccatgccgtctcacccacagtatcacacgtggaaccgcagacagggcccagaagctttagaggtatgaggctgcagaaccggagagattttcctctgtgcagtgctctctggctaaagtcacggtcaaacctaaacaccgagcctcattaacccaagtgaaccaaccaaagtcaccagttcagaagtgctaagctaataggagtctgacccgagggcctgctgcttcctggttaagtatcttttgagattctagaacacatgggagctttttattttcggggaaaaaccgtatttttttcttgtccaattatttctaaagacacactacatagaaagaggccctataaactcaaaaagtcattgggaaacttaaagtctattctactttgcaagaggagaaatgtgttttatgaacgatagatcacatcagaactcctgtggggaggaaaccttataaattaaacacatggcccccttagagaccacaggtgatgtctgtctccatccttccctctccttttctgtcacctttccccctagctggctcctttggacctacccctgtccttgctgacttgtgttgcattgtattccaaacgtgtttacaggttctcttaagcaatgttgtatttgcaggcttttctgaataccaaatctgctttttgtaaagcgtaaaaacatcacaaagtaggtcattccatcaccacccttgtctctctacacattttgcctttggggatctggttggggttttgggttttttgttgttgttgtttatttgttattttaaaggtaaattgcacttttaaaaaaataattggttgacttaatatatttgctttttttctcacctgcacttagaggaaatttgaacaagttggaaaaaaacaatttttgtttcaattctaagaaacacttgcagctctagtattcacttgagtcttcctgtttttcctgtaccgggtcatggtaatttttggttgttttggttgttttcttaaaaaacaagttaaaacctgacgatttctgcaggctgtgtaagcatgtttacctgttggcttgctttgtgtgtctgttaaatgaatgtcatatgtaaatgctaaaataaatcgacagtgtctcagaactgaataactgcagtgacttgatgctctaaaacagtgtaggatttaagaatagatggtttttaatcctggaaattgtgattgtgacccatgagtggaggaactttcagttctaaagctgataaagtgtgtagccagaagagtacttttttttttgtaaccactgtcttgatggcaaaataattatggtaaaaaacaagtctcgtgtttattattccttaagaactctgtgttatattaccatggaacgcctaataaagcaaaatgtggttgtttcaggg

SEQ ID NO: 117447 - DNA, 4395 bp, Artificial Sequence
  derived and/or modified sequence
cttttattgctgtagtttatttccacccccttccctcctgtttctctctctccttctctctctctctctctctctctcttttttttccgccctagctggggctgtgttggaggagaggaagaaagagagacagaggattgcattcatccgttacgttcttgaaatttcctaatagcaagaccagcgaagcggttgcacccttttcaatcttgcaaaggaaaaaaacaaaacaaaacaaaaaaaacccaagtccccttcccggcagtttttgccttaaagctgccctcttgaaattaattttttcccaggagagagatgtcttatcaggggaagaaaaatattccacgcatcacgagcgatcgtcttctgatcaaaggaggtaaaattgttaatgatgaccagtcgttctatgcagacatatacatggaagatgggttgatcaagcaaataggagaaaatctgattgtgccaggaggagtgaagaccatcgaggcccactcccggatggtgatccccggaggaattgacgtccacactcgtttccagatgcctgatcagggaatgacgtctgctgatgatttcttccaaggaaccaaggcggccctggctgggggaaccactatgatcattgaccacgttgttcctgagcctgggacaagcctgctcgctgcctttgaccagtggagggaatgggccgacagcaagtcctgctgtgactactctctgcatgtggacatcagtgagtggcataagggcatccaggaggagatggaagcgcttgtgaaggatcacggggtaaattccttcctcgtgtacatggctttcaaagatcgcttccagctaacggattgccagatttatgaagtactgagtgtgatccgggatattggcgccatagcccaagtccacgcagaaaatggcgacatcattgcagaggagcagcagaggatcctggatctgggcatcacgggccccgagggacatgtgctgagccgacctgaggaggtcgaggccgaagccgtgaatcgtgccatcaccatcgccaaccagaccaactgcccgctgtatatcaccaaggtgatgagcaaaagctctgctgaggtcatcgcccaggcacggaagaagggaactgtggtgtatggcgagcccatcactgccagcttgggaacggacggctcccattactggagcaagaactgggccaaggctgctgcctttgtcacctccccacccttgagccctgatccaaccactccagactttctcaactccttgctgtcctgtggagacctccaggtcacgggcagtgcccattgcacgtttaacactgcccagaaggctgtaggaaaggacaacttcaccctgattccggagggcaccaatggcactgaggagcggatgtccgtcatctgggacaaggctgtggtcactgggaagatggatgagaaccagtttgtggctgtgaccagcaccaatgcagccaaagtcttcaacctttacccccggaaaggccgcattgctgtgggatccgatgccgacctggtcatctgggaccccgacagcgttaaaaccatctctgccaagacacacaacagctctctcgagtacaacatctttgaaggcatggagtgccgcggctccccactggtggtcatcagccaggggaagattgtcctggaggacggcaccctgcatgtcaccgaaggctctggacgctacattccccggaagcccttccctgattttgtttacaagcgtatcaaggcaaggagcaggctggctgagctgagaggggttcctcgtggcctgtatgacggacctgtgtgtgaagtgtctgtgacgcccaagacagtcactccagcctcctcggccaagacgtctcctgccaagcagcaggccccacctgtccggaacctgcaccagtctggattcagtttgtctggtgctcagattgatgacaacattccccgccgcaccacccagcgtatcgtggcgccccccggtggccgtgccaacatcaccagcctgggctagagctcctgggctgtgccgtccactggggactggggatgggacacctgaggacattctgagacttctttcttccttcctttttttttttttgtttttttttttaagagcctgtgatagttactgtggagcagccagttcatggggtcccccttggggccccacaccccgtctctcaccaagagttactgattttgctcatccacttccctacacatctatgggtatcacacccaagactacccaccaagctcatacagggaaccacacccaacacttagacatgcgaacaagcagcccccagcgagggtctccttcgccttcaacctcctagtgtctgttagcatcttccttttcatggggggagggaagataaagtgaattgcccagagctgcctttttcttttctttttaaaaattttaagaagttttctttgtggggctggggaggggccggggtcagggagagtcttttttttttttttttttaaatactaaattggaacatttaattccatattaatacaaggggtttgaactggacatcctaatgatgcaattacgtcatcacccagctgattccgggtggttggcaaactcatcgtgtctgtcctgagaggctccacaatgcccacccgcatcgccattctgtagtcttcagggtcagctgttgataaaggggcaggcttgcgttattggcctagattttgctgcagattaaatcctttgaggattctcttctcttttaccatttttctgcgtgctctcactctctctttctctctctagctttttaattcatgaatattttcgtgtctgtctctctctctctctgtgtttcctccagcccttgtctcggagacggtgttttcctcccttgccccattatcttttcacctcccaggtctaccatttcatggtggtcgttgggtccgcctaaaggatttgagcgtttgccattgcaagcatagtgctgtgtcatcctggtccatgtaggactggtgctaaccacctgccatcatgaggatgtgtgctagagtgtgggaccctggccaagtgcaggaatgggccatgccgtctcacccacagtatcacacgtggaaccgcagacagggcccagaagctttagaggtatgaggctgcagaaccggagagattttcctctgtgcagtgctctctggctaaagtcacggtcaaacctaaacaccgagcctcattaacccaagtgaaccaaccaaagtcaccagttcagaagtgctaagctaataggagtctgacccgagggcctgctgcttcctggttaagtatcttttgagattctagaacacatgggagctttttattttcggggaaaaaccgtatttttttcttgtccaattatttctaaagacacactacatagaaagaggccctataaactcaaaaagtcattgggaaacttaaagtctattctactttgcaagaggagaaatgtgttttatgaacgatagatcacatcagaactcctgtggggaggaaaccttataaattaaacacatggcccccttagagaccacaggtgatgtctgtctccatccttccctctccttttctgtcacctttccccctagctggctcctttggacctacccctgtccttgctgacttgtgttgcattgtattccaaacgtgtttacaggttctcttaagcaatgttgtatttgcaggcttttctgaataccaaatctgctttttgtaaagcgtaaaaacatcacaaagtaggtcattccatcaccacccttgtctctctacacattttgcctttggggatctggttggggttttgggttttttgttgttgttgtttatttgttattttaaaggtaaattgcacttttaaaaaaataattggttgacttaatatatttgctttttttctcacctgcacttagaggaaatttgaacaagttggaaaaaaacaatttttgtttcaattctaagaaacacttgcagctctagtattcacttgagtcttcctgtttttcctgtaccgggtcatggtaatttttggttgttttggttgttttcttaaaaaacaagttaaaacctgacgatttctgcagtgacttgatgctctaaaacagtgtaggatttaagaatagatggtttttaatcctggaaattgtgattgtgacccatgagtggaggaactttcagttctaaagctgataaagtgtgtagccagaagagtacttttttttttgtaaccactgtcttgatggcaaaataattatggtaaaaaacaagtctcgtgtttattattccttaagaactctgtgttatattaccatggaacgcctaataaagcaaaatgtggttgtttca

SEQ ID NO: 117448 - DNA, 2130 bp, Artificial Sequence
  derived and/or modified sequence
cctttctgttgctaacggaggcgatggtgatggtggtggtggttgtgggagatgcagtgatccaggattagaagtcgcatcgtttgcaaggcattaaacaggagcgcgagtgcacgaaggtagccttagagcgatcgtcttctgatcaaaggaggtaaaattgttaatgatgaccagtcgttctatgcagacatatacatggaagatgggttgatcaagcaaataggagaaaatctgattgtgccaggaggagtgaagaccatcgaggcccactcccggatggtgatccccggaggaattgacgtccacactcgtttccagatgcctgatcagggaatgacgtctgctgatgatttcttccaaggaaccaaggcggccctggctgggggaaccactatgatcattgaccacgttgttcctgagcctgggacaagcctgctcgctgcctttgaccagtggagggaatgggccgacagcaagtcctgctgtgactactctctgcatgtggacatcagtgagtggcataagggcatccaggaggagatggaagcgcttgtgaaggatcacggggtaaattccttcctcgtgtacatggctttcaaagatcgcttccagctaacggattgccagatttatgaagtactgagtgtgatccgggatattggcgccatagcccaagtccacgcagaaaatggcgacatcattgcagaggagcagcagaggatcctggatctgggcatcacgggccccgagggacatgtgctgagccgacctgaggaggtcgaggccgaagccgtgaatcgtgccatcaccatcgccaaccagaccaactgcccgctgtatatcaccaaggtgatgagcaaaagctctgctgaggtcatcgcccaggcacggaagaagggaactgtggtgtatggcgagcccatcactgccagcttgggaacggacggctcccattactggagcaagaactgggccaaggctgctgcctttgtcacctccccacccttgagccctgatccaaccactccagactttctcaactccttgctgtcctgtggagacctccaggtcacgggcagtgcccattgcacgtttaacactgcccagaaggctgtaggaaaggacaacttcaccctgattccggagggcaccaatggcactgaggagcggatgtccgtcatctgggacaaggctgtggtcactgggaagatggatgagaaccagtttgtggctgtgaccagcaccaatgcagccaaagtcttcaacctttacccccggaaaggccgcattgctgtgggatccgatgccgacctggtcatctgggaccccgacagcgttaaaaccatctctgccaagacacacaacagctctctcgagtacaacatctttgaaggcatggagtgccgcggctccccactggtggtcatcagccaggggaagattgtcctggaggacggcaccctgcatgtcaccgaaggctctggacgctacattccccggaagcccttccctgattttgtttacaagcgtatcaaggcaaggagcaggctggctgagctgagaggggttcctcgtggcctgtatgacggacctgtgtgtgaagtgtctgtgacgcccaagacagtcactccagcctcctcggccaagacgtctcctgccaagcagcaggccccacctgtccggaacctgcaccagtctggattcagtttgtctggtgctcagattgatgacaacattccccgccgcaccacccagcgtatcgtggcgccccccggtggccgtgccaacatcaccagcctgggctagagctcctgggctgtgccgtccactggggactggggatgggacacctgaggacattctgagacttctttcttccttcctttttttttttttgtttttttttttaagagcctgtgatagttactgtggagcagccagttcatggggtcccccttggggccccacaccccgtctctcaccaagagttactgattttgctcatccacttccctacacatctatgggtatcacacccaagactacccaccaagctcatacagggaaccacacccaacacttagacatgcgaacaagcagcccccagcgagggtctccttcgccttc

SEQ ID NO: 117449 - protein, 570 aa, Artificial Sequence
  derived and/or modified sequence
MSYQGKKNIPRITSDRLLIKGGRIVNDDQSFYADIYMEDGLIKQIGDNLIVPGGVKTIEANGKMVIPGGIDVHTHFQMPYKGMTTVDDFFQGTKAALAGGTTMIIDHVVPEPESSLTEAYEKWREWADGKSCCDYALHVDITHWNDSVKQEVQNLIKDKGVNSFMVYMAYKDLYQVSNTELYEIFTCLGELGAIAQVHAENGDIIAQEQTRMLEMGITGPEGHVLSRPEELEAEAVFRAITIASQTNCPLYVTKVMSKSAADLISQARKKGNVVFGEPITASLGIDGTHYWSKNWAKAAAFVTSPPLSPDPTTPDYINSLLASGDLQLSGSAHCTFSTAQKAIGKDNFTAIPEGTNGVEERMSVIWDKAVATGKMDENQFVAVTSTNAAKIFNLYPRKGRISVGSDSDLVIWDPDAVKIVSAKNHQSAAEYNIFEGMELRGAPLVVICQGKIMLEDGNLHVTQGAGRFIPCSPFSDYVYKRIKARRKMADLHAVPRGMYDGPVFDLTTTPKGGTPAGSARGSPTRPNPPVRNLHQSGFSLSGTQVDEGVRSASKRIVAPPGGRSNITSLS

SEQ ID NO: 117450 - protein, 92 aa, Artificial Sequence
  derived and/or modified sequence
MSYQGKKNIPRITSDRLLIKGGRIVNDDQSFYADIYMEDGLIKQIGDNLIVPGGVKTIEANGKMVIPGGIDVHTHFQMPYKGMTTVDDFFQG

SEQ ID NO: 117451 - DNA, 1713 bp, Artificial Sequence
  derived and/or modified sequence
atgagctaccagggcaaaaagaatatcccaagaataacctctgaccggctgctgatcaagggaggaaggattgttaacgacgatcagagtttctatgctgatatttatatggaggacggattgatcaaacagattggcgataatctgattgtccccggcggcgtgaaaactatagaggcaaacggcaagatggtgatccccggtggcatagatgtccacacccacttccagatgccatataagggaatgaccacagtagatgatttttttcaggggacgaaggctgctctggcagggggaactactatgattattgatcacgtcgtgcctgagcccgagtccagcttaacagaggcctatgaaaagtggcgggaatgggcagatggcaaaagttgttgcgactatgcactccacgtcgatatcacgcactggaatgattctgtgaagcaggaggtgcagaatcttatcaaagacaagggtgtgaatagtttcatggtttacatggcttacaaagacctatatcaagtaagcaataccgaattgtacgagatattcacatgcttgggcgaactgggggctatcgcgcaggtccacgcggagaatggcgatattatcgctcaggaacagactcggatgctggagatgggaatcaccggccccgagggacatgtgctatcccggccagaagagctggaagccgaggccgtatttagagcgataactatcgcttctcagacgaactgccccttgtacgtcaccaaggtcatgagcaaatcagccgcagacttaatttcccaggctagaaagaaagggaatgtggttttcggggaacctattaccgccagcctcggcatcgatgggactcactattggtctaaaaactgggccaaagctgctgcgtttgtgacaagtccccctctcagccccgatccaacaactcccgactatatcaactctctcttagcgagcggagacttacagcttagcgggagcgcccactgtacattctcaaccgcccaaaaagcaatcggcaaggataattttaccgccatcccggagggcactaatggagtcgaggagagaatgagcgttatttgggataaggccgtggccaccgggaagatggatgagaaccagtttgtcgccgtgacaagcaccaatgcagcaaagatctttaatctatatcctcgaaaagggcgcatatcagtagggtccgatagcgacctcgtgatttgggaccccgacgcagtgaaaatcgtgagcgccaagaaccatcagagtgcagcagagtacaatatcttcgaaggcatggagctcaggggggccccgttagtggtcatatgtcaaggtaagatcatgctggaggatgggaaccttcacgtgacccaaggggctggaaggttcatcccctgctcccccttttctgactacgtctacaagcggataaaggctagaagaaagatggcagacttacatgccgtgccccgcggtatgtacgacgggcccgtattcgatttgacgactacaccgaaggggggtacccccgctggcagtgcgcgggggagtcctacccggccaaacccccccgtgcgcaacctgcaccagagtggttttagcctctcaggtacacaggtggacgaaggggtgcgcagtgccagtaaacgaatcgtggcaccacccggtggtcgctcaaacattacttctctgtcgtag

SEQ ID NO: 117452 - DNA, 279 bp, Artificial Sequence
  derived and/or modified sequence
atgtcataccagggcaaaaaaaacatacctagaataacaagcgacagactgttaattaagggaggccgcatcgtgaacgatgatcagtctttctacgcagacatctatatggaagatggccttatcaagcagatcggggataacctaattgttcctggaggagttaagacaatcgaggctaacggaaagatggtaattccaggcggcatcgatgttcatacccatttccaaatgccatataaaggcatgactactgtggacgatttctttcagggctag

SEQ ID NO: 117453 - DNA, 1713 bp, Artificial Sequence
  derived and/or modified sequence
atgagctaccagggcaagaagaacatcccccgcatcaccagtgaccggctgctgatcaagggcggccgcatcgtgaatgatgaccagagcttctatgctgacatctacatggaggatggcctcatcaagcagattggagacaacctgattgtgcctgggggcgtgaagaccatcgaggccaacgggaagatggtgattcctgggggcattgatgtgcacacccacttccagatgccctacaagggcatgaccaccgtggatgacttcttccagggcaccaaggccgccctggccggcggcaccaccatgatcatcgaccacgtggtgcctgagcctgagagcagcctgacagaggcctatgagaagtggagggagtgggcagatggcaagagctgctgtgactatgccctgcacgtggacatcacccactggaatgattctgtgaagcaggaggtgcagaacctgatcaaggacaagggcgtgaacagcttcatggtgtacatggcctacaaggacctgtaccaggtgagcaacacagagctgtatgagatcttcacctgcctgggggagctgggcgccatcgcccaggtgcatgctgaaaatggagacatcatcgcccaggagcagaccaggatgctggagatgggcatcaccggccctgagggccacgtgctgagcaggcctgaggagctggaggccgaggccgtgttccgggccatcaccatcgccagccagaccaactgccccctgtatgtgaccaaggtgatgagcaagtctgctgctgacctgatcagccaggccaggaagaagggaaatgtggtgtttggagagcccatcacagccagcctgggcattgatggcacccactactggagcaagaactgggccaaggctgctgcctttgtgaccagcccccccctgagcccagaccccaccaccccagactacatcaacagcctgctggccagcggggacctgcagctgagcggcagcgcccactgcaccttcagcacagcccagaaggccatcggcaaggacaacttcaccgccatccctgagggcaccaacggggtggaggagaggatgtctgtcatctgggacaaggctgtggccaccgggaagatggatgagaaccagtttgtggccgtgaccagcaccaatgctgccaagatcttcaacctgtaccccaggaagggccgcatctctgtgggcagtgacagcgacctggtgatctgggaccctgatgctgtgaagatcgtgtctgccaagaaccaccagagcgctgctgagtacaacatctttgagggcatggagctgcggggggcccccctggtggtgatctgccagggcaagatcatgctggaggatggcaacctgcacgtgacccagggcgccggccgcttcatcccctgcagccccttcagtgactatgtgtacaagaggatcaaggcccggaggaagatggctgacctgcatgctgtgccccggggcatgtatgatggccctgtgtttgacctgaccaccacccccaagggcggcaccccagctggcagcgcccggggcagccccacccggcccaacccccctgtgaggaacctgcaccagagcggcttcagcctgagcggcacccaggtggatgagggcgtgcgcagcgccagcaagagaattgtggcccctcctgggggccgcagcaacatcaccagcctgtcctag

SEQ ID NO: 117454 - DNA, 279 bp, Artificial Sequence
  derived and/or modified sequence
atgagctaccagggcaagaagaacatcccccgcatcaccagtgaccggctgctgatcaagggcggccgcatcgtgaatgatgaccagagcttctatgctgacatctacatggaggatggcctcatcaagcagattggagacaacctgattgtgcctgggggcgtgaagaccatcgaggccaacgggaagatggtgattcctgggggcattgatgtgcacacccacttccagatgccctacaagggcatgaccaccgtggatgacttcttccagggctag

SEQ ID NO: 117455 - DNA, 1713 bp, Artificial Sequence
  derived and/or modified sequence
atgagctaccagggcaagaagaacatcccccggatcaccagcgaccgcctgcttataaaggggggtcgtattgtgaacgacgatcagagcttctatgctgacatatacatggaggacggcctgatcaagcagatcggcgacaacctaattgtgccaggcggtgtgaaaacaattgaagccaatggaaagatggtgattcctggcgggatagacgtacacacccactttcagatgccgtacaagggcatgactacagtggatgatttttttcaggggaccaaggctgcccttgccggcggcaccacgatgattattgatcacgtcgtgcctgaacccgagtcctccctgaccgaggcttacgagaaatggcgggaatgggcagacggcaagtcttgctgtgactatgccttacatgttgacataacgcattggaatgactccgtgaaacaggaagtccaaaacctgattaaggataagggcgttaactcctttatggtatatatggcctacaaagacctgtaccaggtttcaaataccgagctttacgagatcttcacatgtcttggggagctgggcgcaatcgctcaggtgcacgctgagaatggcgacataatcgcacaggaacagacgcggatgctggaaatgggaataacgggacccgaaggacacgttctctcccggcccgaggagcttgaagccgaagcggtgttccgagctatcacaatcgccagtcaaacaaactgccctctgtacgttacaaaagttatgtccaaaagcgctgccgacctcatttcccaggctcgaaagaaaggcaacgtcgtctttggtgaaccaatcactgcttcgttggggatcgacggaacacactattggtctaaaaactgggctaaggcagctgctttcgtcacaagtccgcccctatctcccgaccccacgactcctgactacatcaacagcttacttgcatcaggggacctgcagttaagtggttccgcccattgtacgttctctacagcccaaaaggctattggcaaggacaacttcacggccatccccgagggtacgaacggcgtagaggaaagaatgagcgtgatttgggataaagccgttgctaccggaaagatggacgagaaccaattcgtggccgtgacatccacaaatgctgcaaaaatatttaacttgtaccctcgaaaggggaggatctcggtgggcagcgacagtgatcttgttatttgggaccccgatgccgtgaagattgtgagcgccaagaatcaccagagtgcagccgaatacaatattttcgaaggcatggaacttagaggcgctcccttagtggttatttgtcagggcaaaattatgcttgaggatgggaaccttcacgtgactcaaggcgccgggaggtttattccatgctctccattcagcgactacgtgtacaaaagaatcaaggcgagacgcaagatggccgacctccatgctgtcccccgcggaatgtacgatggaccagtattcgacctcacgaccacccccaaaggcgggactcccgcaggttctgccagaggatccccgaccagaccaaatccgcccgtccgaaacctgcaccagtccgggtttagcctgtcaggaacgcaagttgacgagggggtacgctccgcaagtaagcggatcgtagctccccccggggggcgcagcaatattacgtccttgagttag

SEQ ID NO: 117456 - DNA, 279 bp, Artificial Sequence
  derived and/or modified sequence
atgagctaccagggcaagaagaacatcccccggatcaccagcgaccggctcctcattaagggtggaagaatcgtgaatgatgatcagagcttttacgctgacatctacatggaagatggattgatcaagcagatcggcgacaacctaatcgtgccaggcggcgttaagacgatcgaagctaatggaaagatggttattccaggcggaattgacgtacacacacacttccaaatgccctataagggcatgaccactgtcgacgacttcttccaggggtag

SEQ ID NO: 117457 - DNA, 1713 bp, Artificial Sequence
  derived and/or modified sequence
atgtcatatcagggtaaaaagaacatccctcgaattaccagtgacaggctgctgattaaaggtggcaggatcgtgaacgacgatcagagtttttacgcggatatttacatggaggacggtctgattaagcaaattggggataatctcattgtgcctggcggagtaaaaacaatcgaggctaacggcaagatggtgattcctgggggaattgatgttcatacccattttcaaatgccctacaagggcatgactactgtggatgatttttttcagggcacgaaggccgcactggcaggaggcaccaccatgataatcgatcacgtcgttccggagcctgaaagcagtctgacagaggcctatgaaaaatggagggagtgggctgacgggaaatcatgctgtgactacgcccttcacgtcgacattactcattggaatgatagcgtgaagcaggaagtccagaatcttatcaaggacaaaggcgtcaattcatttatggtgtacatggcgtataaagacctctaccaagtatccaacacagagctatacgagatttttacatgtcttggagagttaggtgccattgcccaagttcatgccgaaaacggagatattattgcccaggagcagaccaggatgctggagatggggatcacaggcccagagggtcacgtgctgtctcgtccagaagaactcgaggccgaggccgtgttccgcgctatcacaatcgctagccagactaattgtcctctctacgtcaccaaggttatgagcaaaagtgcagccgatttgatctctcaggctcggaagaaaggtaacgtagtgtttggcgagccaatcaccgcttcactgggaattgatggcactcactattggagtaaaaattgggccaaagcggcagcgttcgttactagtccccctttgtcccctgaccctacgactcccgattacatcaactcactgctggcgtccggcgacctgcagctgagcgggagcgcccattgtaccttttccacagcccagaaggcaattgggaaggataactttactgccattccagaggggaccaatggcgtggaggagcggatgagcgtgatctgggacaaggctgtggcaactgggaagatggacgagaaccaatttgtggccgttacgagtaccaatgccgcaaagatcttcaacctgtacccccgaaaggggcgaatctccgtggggtcagacagcgacctggtcatctgggaccctgacgctgtgaaaatcgtctcagctaagaaccaccagtctgcagcggagtataacatctttgaggggatggagctgcgcggtgcacccttggtggtcatatgtcagggaaagataatgttggaagacggcaaccttcacgtcacccagggtgcgggacgattcattccttgctcccccttctcagactacgtgtacaaacgcatcaaggctaggcgtaaaatggctgatttacacgcggtgccacggggaatgtatgatggaccagtctttgacctcactaccacaccaaaaggcggaacccccgctggttcagccaggggcagccccactaggccaaatccccctgtcaggaacctgcatcagtccggattctcgctgtcaggtacacaggttgatgagggagtcaggtctgcatctaagcgaatcgtggcgcctcccggtggaaggagcaatatcacctccctcagttag

SEQ ID NO: 117458 - DNA, 279 bp, Artificial Sequence
  derived and/or modified sequence
atgagctatcagggcaagaagaacatacctcgcataacttctgatcggctgttgattaagggcggtcgcatcgttaatgatgatcagtctttttacgccgacatatacatggaagacggcctgattaagcagattggcgacaatctaattgttccgggtggagtgaagacgattgaagcaaacgggaaaatggtgatacctggtggcattgatgtgcatacccactttcaaatgccttacaaaggcatgaccactgtcgatgatttctttcaggggtag

SEQ ID NO: 117459 - DNA, 1713 bp, Artificial Sequence
  derived and/or modified sequence
atgagctaccagggcaagaagaacatccccagaatcaccagcgacagactgctgatcaagggcggcagaatcgtgaacgacgaccagagcttctacgccgacatctacatggaggacggcctgatcaagcagatcggcgacaacctgatcgtgcccggcggcgtgaagaccatcgaggccaacggcaagatggtgatccccggcggcatcgacgtgcacacccacttccagatgccctacaagggcatgaccaccgtggacgacttcttccagggcaccaaggccgccctggccggcggcaccaccatgatcatcgaccacgtggtgcccgagcccgagagcagcctgaccgaggcctacgagaagtggagagagtgggccgacggcaagagctgctgcgactacgccctgcacgtggacatcacccactggaacgacagcgtgaagcaggaggtgcagaacctgatcaaggacaagggcgtgaacagcttcatggtgtacatggcctacaaggacctgtaccaggtgagcaacaccgagctgtacgagatcttcacctgcctgggcgagctgggcgccatcgcccaggtgcacgccgagaacggcgacatcatcgcccaggagcagaccagaatgctggagatgggcatcaccggccccgagggccacgtgctgagcagacccgaggagctggaggccgaggccgtgttcagagccatcaccatcgccagccagaccaactgccccctgtacgtgaccaaggtgatgagcaagagcgccgccgacctgatcagccaggccagaaagaagggcaacgtggtgttcggcgagcccatcaccgccagcctgggcatcgacggcacccactactggagcaagaactgggccaaggccgccgccttcgtgaccagcccccccctgagccccgaccccaccacccccgactacatcaacagcctgctggccagcggcgacctgcagctgagcggcagcgcccactgcaccttcagcaccgcccagaaggccatcggcaaggacaacttcaccgccatccccgagggcaccaacggcgtggaggagagaatgagcgtgatctgggacaaggccgtggccaccggcaagatggacgagaaccagttcgtggccgtgaccagcaccaacgccgccaagatcttcaacctgtaccccagaaagggcagaatcagcgtgggcagcgacagcgacctggtgatctgggaccccgacgccgtgaagatcgtgagcgccaagaaccaccagagcgccgccgagtacaacatcttcgagggcatggagctgagaggcgcccccctggtggtgatctgccagggcaagatcatgctggaggacggcaacctgcacgtgacccagggcgccggcagattcatcccctgcagccccttcagcgactacgtgtacaagagaatcaaggccagaagaaagatggccgacctgcacgccgtgcccagaggcatgtacgacggccccgtgttcgacctgaccaccacccccaagggcggcacccccgccggcagcgccagaggcagccccaccagacccaacccccccgtgagaaacctgcaccagagcggcttcagcctgagcggcacccaggtggacgagggcgtgagaagcgccagcaagagaatcgtggccccccccggcggcagaagcaacatcaccagcctgagctag

SEQ ID NO: 117460 - DNA, 279 bp, Artificial Sequence
  derived and/or modified sequence
atgagctaccagggcaagaagaacatccccagaatcaccagcgacagactgctgatcaagggcggcagaatcgtgaacgacgaccagagcttctacgccgacatctacatggaggacggcctgatcaagcagatcggcgacaacctgatcgtgcccggcggcgtgaagaccatcgaggccaacggcaagatggtgatccccggcggcatcgacgtgcacacccacttccagatgccctacaagggcatgaccaccgtggacgacttcttccagggctag

SEQ ID NO: 117461 - DNA, 5309 bp, Artificial Sequence
  derived and/or modified sequence
ggcagatgcaaagaggaaaatcaatagggataagagagaagagggaggagtcgcagatcagccattcttgtcttatggggtcccagctggcgcagcaaaagaaaaaaaaaaacaaaacccgggcgtgaacgcgggtggaggagggtgtgcgtgggggggcgggggtgaaagggggaccggggagatttactattgtctctggcagccgccgcgggagcccgggaggggggcggaggcgggcggaggcggcggcgcggccagcgcaccattcactccacctgatctcggggcgctgtgcgctgaggaaggcgcgggcgagccggagcagaagaaggagggagggagccagccgctgcagccaccaccgccaccatgtcctaccaaggcaagaagaacatcccgcggatcacgagtgaccgtctccttatcaagggaggcagaatcgtcaatgatgatcagtccttttatgctgatatttacatggaagatggcttaataaaacaaattggagacaatctgattgttcctggaggagtgaagaccattgaagccaatgggaagatggtgatccctggaggcatcgatgtccatactcacttccagatgccatataagggaatgaccacagtagatgacttcttccaagggacaaaggcggccttagcaggtggcaccaccatgatcattgaccatgtggtgcctgagcctgagtccagcctgactgaggcctatgagaaatggagagagtgggctgatgggaagagttgctgtgactatgccctgcatgtggacatcacccactggaatgacagcgtcaagcaggaagtgcagaacctcatcaaggacaaaggggttaactccttcatggtttatatggcttataaggatttgtatcaagtatctaacacagagctctatgagatcttcacctgcctgggagagctgggggccattgctcaagttcatgctgagaatggggatatcattgcccaggagcaaacccgcatgttggaaatggggataactggcccagaaggccatgtactgagcaggccagaagagctggaagctgaggctgtgttccgtgccatcaccattgccagccaaaccaattgccctctctacgtcacaaaggtcatgagcaagagtgcagctgacctcatctcacaagccaggaaaaaaggaaatgtagtctttggtgagcccatcactgccagcctcggcatagatggaacccattattggagcaagaactgggccaaggcggctgcatttgtgacatccccacccctgagccctgacccaactactccggactacatcaactccttgctggccagcggggatctgcagctatctgggagtgcccactgcaccttcagcactgcccagaaagcaattgggaaggacaacttcacagccattcctgagggcaccaatggtgtggaggagcggatgtctgtcatctgggacaaggctgtggccacagggaaaatggacgaaaaccagttcgtggctgtgacaagcacaaacgctgccaagatcttcaacctgtatccccgcaagggaagaatatctgtgggttctgacagcgacctcgtcatctgggatccagatgctgtgaagatcgtctctgccaagaaccaccagtctgcggcagagtacaacatctttgaagggatggagctgcgcggggctcctctggttgtcatctgccagggcaagatcatgctggaagatggcaacctgcacgtgacccagggggctggccgcttcataccctgcagcccgttctccgactatgtctacaagcgcattaaagcacggaggaagatggcagacctgcatgccgtcccaaggggcatgtacgatgggcctgtgtttgacctgaccaccacccccaaaggtggcacccccgcaggctctgctcggggctctcctactcggccgaacccacctgtgaggaatcttcatcagtcgggatttagcctgtcaggcacccaagtggatgagggggttcgctcagccagcaagcgcatcgtggcgcccccaggcggccgttctaatatcacatctctgagttaagcaagccttcctcaaagagaggggcagaagcaagaagagattgttttgaagccaaaatggtacaccgatatttaagaaggaaagcgaatccaaacggttgtgatctaaagaatcaataagcctcaagccttatgtttctccaatgttacgctcgcttgcctagctttacgaatattgctttgttttctgtttatgcatagccttgatttgtttgactcccctccccccatttacatgcatgcaatcagacaggccactaaggtaaaagagtctgctctatcatagtgttgagagcgtgtgtagtgctgcatcttatgacaaggggacagacaagctgggacgtcagggaaatgaacaaaagggacgcaggttatttggggtgagtgggtggtgggagcctggagcaaggtggagggtgcagaggggctggggtagggcatgtaggagggaggtgggtgggtcaggtgagtggaaggggtgttgtatattgtgttgatgacgtacgttatttccatggaagatagccgctgtggcagctgtcacatcaccacagctccctagggtctgccgagaaggcaggcagtctttgggttctgttctttgtcacgtcccctacaagtaaattttgtttctttgaacgtttattaaaatgccaagacccaaccatttcttccacctgcttgattgtgccagtgtttgctcaggcctctttcttagtgttgctttcaaatccttctctttcctgggttgggaaggccaggcagggacagagcaaatgacacttctcttcctcttgccctccctgcctctttggtgctcttaaaagccagcagctgagaacatagcacaggcccacgtggtgagggcacccacagcttaaagacgcttccttctaaacacggcgaggtcacctctcactcttctgtctttgcaaaccgagaagagtggcatgcttctggcatcccaagtcaggattttagctcagatgaggcagaatgaagggcctctcttacaggcagtttgtgtttgattctctcgatcctggcacatccatgataaataggagtttttgaaagttggttttattaggtgttccctaatttttaccgtaataggtcatctcagcttatatgaaagtcaagtggggaactgggaaagccaaagtcagtcttgagcagagggagcacattttgtggacctggttccacctttccattccaaaccacctgtttccccttccattagcagaaactctgggggaactttgtgtctcagtcctagaatctccccaagtgagtggaagtgacatgatgcagtcttcctcatggggcacctgaaagaaattagtgtgggtgcttcgatctaccttgtctgtcagagttgaatatctctttccctatcatgctgcttctgaaaattcagttttggagcaagtcctgtgagcaagataagaatctatagaaccaagatgctcattttcagaagaaatatgttcaacctgggatcagacttccatgctctggggaatccaagtggtagcacctgtaaccctgtgtactaagtgctttgaagagaagagcaggcctcagacaccttttaattgcttaggagaaaccattgtctctgactgcaggtttgaataagttgaagaccagagaaaagtacacactgggctacaaaggaatttggagatagccaaggaacaggatttcccctagcaagctaccttctgttcaaatcatgaaaaaagactatttccccttagaatagggaagcttgctattttaaagctcttgtagtgcttttcttttaagggagatgtagtaaaagggaaaatgtagctcttagtttacacttcaaagatgtgggggtctttcagagaactaagaataacagttttatgtgcagagagagtttgccagatctgaagcatatacctcattgactaggctgttactttgggataggttgcagtaccagccacagccagcagatagaggaaaagacacacataaactcgcttctgagcgtccacttctgcactctctgctctgctgttactcagcccctgagtctgactcatctctgcacaacctctctgtgccatgaagataagtcttccatggccaaatcggtcatccgcactgcccttgggacttccgaagtgaaccattccaccagaacctttgattctgcacaagatttccttgctctgggaacaacccccaaatgcccttgggaggaacaacatgagctcaggaagcctctctttcttcacttaccattactaactctccaagcatagaaatccctgggaattgcgagaataactcccactattttaaaatttatattcagatttgtttcgtttcataagacacatcaaacaggcctatacaaaaggtttaggaaaagaaaacaatggtgagtcccggccctcttcgaattcactggcacctcatgcaagtgtaggaaggcacgctggatcgtctatctgattccaaagctgtcctttgccatctcatcccttggcctgccccccaaccctgaggatgcccctgccatccccccaacctcctcatattgcctctgaacccagatggcaatccatcccggttctctctgagggccacgggcttgggtagtggaaagggtgtttgggaaattgttaaatcagttacccgtagtagagctatttcttgtacttctaagttttctagaagtggaaggattgtagtcatcctgaaaatgggtttacttcaaaatccctcagccttgttcttcacgactgtctatactgagagtgtcatgtttccacaaagggctgacacctgagcctggattttcactcatccctgagaagccctttccagtagggtgggcaattcccaacttccttgccacaagcttcccaggctttctcccctggaaaactccagcttgagtcccagatacactcatgggctgccctgggcagccagcattcattgtaagttccctctttgaaaactggtgtgtgggtgttcagttctgtgtctggtgggtatggacagacagtaatctcctgtgatctgtgctagctgtgaggcagctctggaacgtgaagagctgtttggtttgaaccgtgaacaaaactgtgttttgagtttagctgacattaaagaaaaaagttcatcacgtgactgttaatgtaaacctggttattaaaataactatgaaattac

SEQ ID NO: 117462 - DNA, 539 bp, Artificial Sequence
  derived and/or modified sequence
gcggccgccgcattcgacccgcgccatggcagaggagagcgggtgccgggagggaagccgggaaccgtctccattctgaaactagggcggggaagccgccgcgggagcccgggaggggggcggaggcgggcggaggcggcggcgcggccagcgcaccattcactccacctgatctcggggcgctgtgcgctgaggaaggcgcgggcgagccggagcagaagaaggagggagggagccagccgctgcagccaccaccgccaccatgtcctaccaaggcaagaagaacatcccgcggatcacgagtgaccgtctccttatcaagggaggcagaatcgtcaatgatgatcagtccttttatgctgatatttacatggaagatggcttaataaaacaaattggagacaatctgattgttcctggaggagtgaagaccattgaagccaatgggaagatggtgatccctggaggcatcgatgtccatactcacttccagatgccatataagggaatgaccacagtagatgacttcttccaaggga

SEQ ID NO: 117463 - protein, 2012 aa, Artificial Sequence
  derived and/or modified sequence
MWILALSLFQSFANVFSEDLHSSLYFVNASLQEVVFASTTGTLVPCPAAGIPPVTLRWYLATGEEIYDVPGIRHVHPNGTLQIFPFPPSSFSTLIHDNTYYCTAENPSGKIRSQDVHIKAVLREPYTVRVEDQKTMRGNVAVFKCIIPSSVEAYITVVSWEKDTVSLVSGSRFLITSTGALYIKDVQNEDGLYNYRCITRHRYTGETRQSNSARLFVSDPANSAPSILDGFDHRKAMAGQRVELPCKALGHPEPDYRWLKDNMPLELSGRFQKTVTGLLIENIRPSDSGSYVCEVSNRYGTAKVIGRLYVKQPLKATISPRKVKSSVGSQVSLSCSVTGTEDQELSWYRNGEILNPGKNVRITGINHENLIMDHMVKSDGGAYQCFVRKDKLSAQDYVQVVLEDGTPKIISAFSEKVVSPAEPVSLMCNVKGTPLPTITWTLDDDPILKGGSHRISQMITSEGNVVSYLNISSSQVRDGGVYRCTANNSAGVVLYQARINVRGPASIRPMKNITAIAGRDTYIHCRVIGYPYYSIKWYKNSNLLPFNHRQVAFENNGTLKLSDVQKEVDEGEYTCNVLVQPQLSTSQSVHVTVKVPPFIQPFEFPRFSIGQRVFIPCVVVSGDLPITITWQKDGRPIPGSLGVTIDNIDFTSSLRISNLSLMHNGNYTCIARNEAAAVEHQSQLIVRVPPKFVVQPRDQDGIYGKAVILNCSAEGYPVPTIVWKFSKGAGVPQFQPIALNGRIQVLSNGSLLIKHVVEEDSGYYLCKVSNDVGADVSKSMYLTVKIPAMITSYPNTTLATQGQKKEMSCTAHGEKPIIVRWEKEDRIINPEMARYLVSTKEVGEEVISTLQILPTVREDSGFFSCHAINSYGEDRGIIQLTVQEPPDPPEIEIKDVKARTITLRWTMGFDGNSPITGYDIECKNKSDSWDSAQRTKDVSPQLNSATIIDIHPSSTYSIRMYAKNRIGKSEPSNELTITADEAAPDGPPQEVHLEPISSQSIRVTWKAPKKHLQNGIIRGYQIGYREYSTGGNFQFNIISVDTSGDSEVYTLDNLNKFTQYGLVVQACNRAGTGPSSQEIITTTLEDVPSYPPENVQAIATSPESISISWSTLSKEALNGILQGFRVIYWANLMDGELGEIKNITTTQPSLELDGLEKYTNYSIQVLAFTRAGDGVRSEQIFTRTKEDVPGPPAGVKAAAASASMVFVSWLPPLKLNGIIRKYTVFCSHPYPTVISEFEASPDSFSYRIPNLSRNRQYSVWVVAVTSAGRGNSSEIITVEPLAKAPARILTFSGTVTTPWMKDIVLPCKAVGDPSPAVKWMKDSNGTPSLVTIDGRRSIFSNGSFIIRTVKAEDSGYYSCIANNNWGSDEIILNLQVQVPPDQPRLTVSKTTSSSITLSWLPGDNGGSSIRGYILQYSEDNSEQWGSFPISPSERSYRLENLKCGTWYKFTLTAQNGVGPGRISEIIEAKTLGKEPQFSKEQELFASINTTRVRLNLIGWNDGGCPITSFTLEYRPFGTTVWTTAQRTSLSKSYILYDLQEATWYELQMRVCNSAGCAEKQANFATLNYDGSTIPPLIKSVVQNEEGLTTNEGLKMLVTISCILVGVLLLFVLLLVVRRRRREQRLKRLRDAKSLAEMLMSKNTRTSDTLSKQQQTLRMHIDIPRAQLLIEERDTMETIDDRSTVLLTDADFGEAAKQKSLTVTHTVHYQSVSQATGPLVDVSDARPGTNPTTRRNAKAGPTARNRYASQWTLNRPHPTISAHTLTTDWRLPTPRAAGSVDKESDSYSVSPSQDTDRARSSMVSTESASSTYEELARAYEHAKMEEQLRHAKFTITECFISDTSSEQLTAGTNEYTDSLTSSTPSESGICRFTASPPKPQDGGRVMNMAVPKAHRPGDLIHLPPYLRMDFLLNRGGPGTSRDLSLGQACLEPQKSRTLKRPTVLEPIPMEAASSASSTREGQSWQPGAVATLPQREGAELGQAAKMSSSQESLLDSRGHLKGNNPYAKSYTLV

SEQ ID NO: 117464 - DNA, 6039 bp, Artificial Sequence
  derived and/or modified sequence
atgtggattctggcattgagcctgttccagtccttcgccaacgtattcagcgaagatctgcactccagcctgtactttgtgaacgcatccctgcaggaagtggttttcgcttcaactactggtaccctcgtcccctgccctgccgccgggatcccccccgttacactccggtggtacctcgcaaccggcgaagaaatctacgatgtaccaggcatccgccatgtgcacccaaacggcaccctgcagatttttcctttcccacccagcagcttttcaacgctcattcacgacaacacttactactgcacagccgagaatccttcaggcaagatacggagccaagatgtccacattaaggctgtactgcgggagccgtatacggtgcgggtggaggaccaaaaaaccatgcgaggaaacgtcgccgtattcaaatgcataataccttcgtcagttgaggcatatatcactgtagtgtcttgggaaaaggataccgtttctcttgtttctggttcaaggttcctcatcacatcgacaggagctctgtatatcaaggatgtgcaaaatgaagacgggctttacaactacaggtgtattacgcgacatcgctataccggcgagacccgacagagcaacagtgctcgtctctttgtttcggaccctgccaacagtgcaccatccattctggacggattcgaccaccgaaaggcaatggcgggacaacgggtggaactgccctgcaaggccctcggtcaccccgaacctgactatcgatggttgaaagacaacatgcccctggagctttcaggacgttttcaaaagaccgtgacgggcttgctaatcgagaatattcgaccatcagactctggtagctacgtgtgcgaggtgagcaacagatatggaaccgccaaggtcattgggcgactttatgtcaaacagcctcttaaagcgaccatatcacctcggaaggtaaagagctctgttggatctcaggtttcccttagctgcagcgtcactggaactgaagatcaggagctgagttggtaccgaaacggcgaaatcctgaatcccgggaaaaacgtccggatcaccgggatcaaccacgagaacctgataatggatcacatggtcaagtcagacggtggggcttaccagtgctttgtgcggaaggataaacttagtgctcaggactacgtgcaggttgtgctcgaggatgggactccaaaaattatctcagccttctctgaaaaagtagtatctccagctgaacccgtctcccttatgtgcaacgtcaaaggcacacctttacccacgataacctggacactagatgatgatccaattctgaagggcggttctcaccgcatctctcagatgattacatcagagggcaacgtagtctcctacctgaacatcagcagctctcaagttcgcgacggtggggtttacagatgcaccgccaacaattctgctggggtggtgttgtatcaggcccgtataaatgttcgtgggccagctagcatcagacctatgaagaatataaccgcgattgccggtagagatacatacattcattgccgggtgattggctatccatactattcaatcaagtggtataagaatagcaaccttcttccatttaatcatcgccaggttgcattcgagaacaatggtaccttaaagctgagtgacgtgcagaaggaggtcgatgaaggcgagtatacatgtaacgtgcttgttcagcctcaactttcaacctcccagagcgtccacgtgactgtgaaggtccctcctttcattcagccatttgaatttcccaggttctctatcgggcagagggtgtttatcccttgcgtagtcgtgtccggtgatttaccaattaccatcacatggcaaaaggatggtcgcccgattccagggtctttgggggtgaccattgataacatcgacttcacctcatcattacgtattagtaacctctcattaatgcacaatggaaattatacgtgcattgctagaaatgaggcagccgcggtggagcaccagtcccaacttattgtgcgcgttccgcccaagttcgtggtccagccacgcgatcaggacgggatatatggtaaggcagtcattctaaactgctccgctgaggggtaccctgtgcctactattgtctggaaattcagtaagggagctggtgtgcctcagtttcagccaatcgctctgaatggccgtatacaagtactctctaacgggtctctattaatcaaacacgtcgtagaggaggactctggctactacctgtgtaaggtctcaaacgacgttggtgccgacgtgtccaaatctatgtacctgaccgtaaaaatccccgctatgatcaccagttacccaaacacaacactcgcgactcaaggccagaagaaagagatgtcttgtacagctcatggagagaagccaatcatcgtacgttgggaaaaggaagaccggatcattaaccccgaaatggccagatacctcgtctcaaccaaagaggttggcgaagaggttatctcaacgttacaaatcctgcccaccgtccgtgaggattcaggcttctttagttgtcacgctattaactcatacggagaggataggggcatcatccagcttactgtgcaggaaccccctgaccctccggagattgagatcaaagatgtgaaggctaggaccataacccttcgatggacaatggggtttgatggaaacagccctatcactggctatgatatcgagtgcaagaataagagcgactcctgggatagtgcccagcgcaccaaggatgtgagtccccagctgaacagcgcaacgatcatcgacatccacccttcgtcaacttacagcatcagaatgtatgctaaaaacaggattggcaaatctgagcctagcaacgagctgaccatcacggctgatgaggcagcacccgatgggccccctcaggaggttcatctggaacctataagctcccaatccattagggtgacatggaaggcccctaaaaagcacctgcaaaatggcattatcagggggtatcaaatcggctatcgcgagtattctactggaggcaattttcagtttaatatcatttcagttgacactagtggcgattccgaggtgtataccctggacaatcttaataaattcactcagtatgggctggtggtccaggcttgcaaccgcgccggcacaggcccatcctcccaggaaatcatcactacgacactcgaggacgtgccaagctaccctcccgaaaacgtgcaagccatagctacctctccagagagcatttccatctcatggtccacactctctaaggaggccctgaacggtattctccagggtttcagggtaatatattgggcaaacctgatggatggcgaacttggagaaattaagaatatcactactacccagcctagtttagagctcgacggcctggagaagtatacgaattactcgattcaggtattggctttcactcgcgccggcgatggagtgcgaagtgagcagatattcacgaggaccaaagaagatgtgcctggacctcccgcaggagtcaaagctgccgcagcatcagcatctatggtcttcgtctcctggttaccacctctgaagttgaatggaattatacgaaaatacacagtcttctgtagccatccctaccccactgttatatccgaattcgaggctagtccagatagctttagctatcgcatccccaatctaagtcgtaaccgacagtactcagtgtgggtggtggctgtgactagtgctggacgaggtaattcctctgagattataactgtggaaccactcgccaaagcaccggctaggattctcacatttagtgggaccgtcaccactccatggatgaaagacatcgtgctgccctgcaaagcggtaggagatccttcaccagcggttaaatggatgaaggactccaatggcactccctctttggtgactatcgatgggcgacgctccatcttcagcaacggatccttcatcatcaggacagtgaaggcggaagacagcggctactacagttgtatcgccaacaacaactggggatctgatgagatcattctcaacttgcaggtccaggtccctccagatcaaccacgactcaccgttagcaaaacaaccagctccagcataaccttatcttggctgccgggggacaacggggggtcatcaatacgtgggtatatcttacaatattctgaagataattccgagcaatggggaagctttccgatctcaccgtcagagcgaagttatcggttggaaaacctgaagtgcggaacttggtataaatttactttgaccgctcagaacggcgtcggacctgggcggatcagtgaaattattgaagcaaaaaccctgggcaaagagccgcaatttagtaaagagcaggagttatttgcgtccattaataccacgcgggtccgtttgaacttaattggttggaacgacggaggttgtcccataaccagcttcacccttgaataccgccctttcgggactaccgtgtggactaccgcacaacgcacctcattaagtaaatcctatatactgtacgaccttcaagaggctacttggtatgagcttcagatgcgggtgtgtaatagcgctgggtgcgccgagaaacaggccaattttgctacactcaactacgatggttctaccatccccccgctgattaagagcgttgtccagaacgaagagggcttgactaccaatgaaggcttgaaaatgctcgtcacaatctcttgcattttggtcggcgtactgttactgttcgtcctattactcgtggtacgtcgtcggaggagagaacaaagacttaagaggctgcgtgatgccaaatctctggccgagatgttaatgagtaaaaatacacgcacttctgacaccctgtctaagcagcaacagacccttaggatgcacattgacattccacgggcccaattgctcatcgaggagagagacactatggaaacgatagacgacaggagcactgttctgcttactgacgctgattttggagaagccgctaagcaaaagtctctgacggtaacccatacagtccactaccaatcagtgagccaggcaaccggacctctggtagacgtgagtgatgcccgcccaggaacaaaccctaccacccggagaaatgccaaggccggtcctactgcccggaaccgctatgcttcccagtggaccctcaatcggccccaccctacgatctctgcacacacactaacaactgattggcgccttcctacccctagagcagcggggtcagtcgataaagagtccgattcatattcagtctcacccagccaagatacagatcgagctcgatcaagcatggtctcaacggagtcggcatcgtcgacttacgaagagctggctcgggcctatgaacacgctaagatggaggaacaactaaggcatgccaaattcacaatcaccgagtgtttcatctcagatactagtagcgagcaactcactgctggcacgaatgaatacacagattcactcaccagcagtactccctctgaaagcggaatatgtcgcttcactgcatcaccacccaagcctcaggatgggggccgcgtcatgaatatggcagtgccgaaggcccatcggcccggcgatctgatccacttgcccccttatctgcgcatggatttcctcctgaaccgcggcggcccaggaacttctagagacctctcattgggccaggcctgtctcgagccacaaaaatctcgtactctcaagcgccctaccgtgttggagcctatcccgatggaagctgcatctagcgcctcttctactcgcgaggggcaatcttggcaaccaggcgccgtggcgaccctcccccagagggaaggtgctgagctggggcaagcagcgaagatgagtagttcccaggagagtttgctggattcaagaggccatttgaaggggaacaatccctacgccaagagctataccctcgtctag

SEQ ID NO: 117465 - DNA, 6039 bp, Artificial Sequence
  derived and/or modified sequence
atgtggatcctggccctgagcctcttccagagctttgccaacgtgttttctgaggacctgcacagcagcctgtactttgtgaatgccagcctgcaggaggtggtgtttgccagcaccaccggcaccctggtgccctgcccagctgctggcatcccccctgtgaccctgcgctggtacctggccaccggggaggagatctatgatgtgcccggcatccgccacgtgcaccccaacggcaccctgcagatcttccccttcccccccagcagcttcagcaccctcatccatgacaacacctactactgcacagctgagaaccccagcggcaagatccgcagccaggatgtgcacatcaaggctgtgctgcgggagccctacacagtgcgggtggaggaccagaagaccatgagaggaaatgtggccgtgttcaagtgcatcatccccagctctgtggaggcctacatcaccgtggtgtcctgggagaaggacacagtgtccctggtgtctggcagccgcttcctgatcaccagcactggagccctgtacatcaaggatgtgcagaatgaagatggcctgtacaactaccgctgcatcaccaggcaccgctacaccggggagacccggcagagcaacagcgcccggctgtttgtgtctgaccctgccaacagcgcccccagcatcctggatggctttgaccacaggaaggccatggccggccagagggtggagctgccctgcaaggccctgggccaccctgagccagactaccgctggctgaaggacaacatgcccctggagctgagcggccgcttccagaagacagtgacaggcctgctgattgagaacatccggcccagcgacagcggcagctatgtgtgtgaggtgagcaacagatatggaacagccaaggtgattggccgcctgtatgtgaagcagcccctgaaggccaccatcagccccaggaaggtgaagagctctgtgggcagccaggtgtccctgagctgcagcgtgactggaacagaggaccaggagctgtcctggtacagaaatggagagatcctgaaccctgggaagaatgtgcgcatcaccggcatcaaccacgagaacctgatcatggaccacatggtgaagagtgatggaggagcctaccagtgctttgtgaggaaggacaagctgagcgcccaggactatgtgcaggtggtgctggaggatggcacccccaagatcatcagcgccttcagcgagaaggtggtgtccccagctgagcctgtgtccctgatgtgcaatgtgaagggcacccccctgcccaccatcacctggaccctggatgatgaccccatcctgaagggcggcagccaccgcatcagccagatgatcaccagcgagggcaatgtggtgtcctacctgaacatcagcagcagccaggtgagagatggcggcgtgtaccgctgcacagccaacaacagcgctggggtggtgctgtaccaggcccgcatcaacgtgcggggccctgccagcatccggcccatgaagaacatcacagccatcgccggccgggacacctacatccactgcagggtcatcggctacccctactacagcatcaagtggtacaagaacagcaacctgctgcccttcaaccaccggcaggtggcctttgagaacaacggcaccctgaagctgagtgatgtgcagaaggaggtggatgaaggagagtacacctgcaatgtgctggtgcagccccagctgagcaccagccagagcgtgcacgtgacagtgaaggtgccccccttcatccagccctttgagttcccccgcttcagcatcggccagagggtcttcatcccctgtgtggtggtgtctggggacctgcccatcaccatcacctggcagaaggatggccggcccatccctggcagcctgggcgtgaccatcgacaacatcgacttcaccagcagcctgcgcatcagcaacctgagcctgatgcacaacggcaactacacctgcatcgccagaaatgaagctgctgctgtggagcaccagagccagctgattgtgcgggtgccccccaagtttgtggtgcagccccgggaccaggacggcatctacggcaaggccgtcatcctgaactgcagcgctgagggctaccctgtgcccaccatcgtgtggaagttcagcaaaggagctggggtgccccagttccagcccatcgccctgaatggccgcatccaggtgctgagcaatggcagcctgctgatcaagcacgtggtggaggaggacagcggctactacctgtgcaaggtgtccaatgatgtgggcgcagatgtgtccaagtccatgtacctgactgtgaagatcccagccatgatcaccagctaccccaacaccaccctggccacccagggccagaagaaggagatgagctgcacagcccacggggagaagcccatcatcgtgcgctgggagaaggaggaccgcatcatcaaccctgagatggcccgctacctggtgtccaccaaggaggtgggggaggaggtgatcagcaccctgcagatcctgcccaccgtgcgggaggacagcggcttcttcagctgccacgccatcaacagctatggagaagatcggggcatcatccagctgactgtgcaggagcccccagaccccccagaaattgagatcaaggatgtgaaggcccggaccatcaccctgcgctggaccatgggctttgatggcaacagccccatcaccggctatgacatcgagtgcaagaacaagagtgacagctgggacagcgcccagaggaccaaggatgtgagcccccagctgaacagcgccaccatcatcgacatccaccccagcagcacctacagcatccgcatgtatgccaagaaccgcatcggcaagtctgagcccagcaatgagctgaccatcacagcagatgaggccgccccagatggccccccccaggaggtgcacctggagcccatcagcagccagagcatccgggtgacctggaaggcccccaagaagcacctgcagaatggcatcatccggggctaccagatcggctaccgggagtacagcactggaggcaacttccagttcaacatcatctctgtggacaccagcggggacagcgaggtgtacaccctggacaacctgaacaagttcacccagtatggcctggtggtgcaggcctgcaacagagctggcaccggccccagcagccaggagatcatcaccaccaccctggaggatgtgcccagctaccccccagaaaatgtgcaggccatcgccaccagccctgagagcatcagcatctcctggagcaccctgagcaaggaggccctgaatggcatcctgcagggcttccgggtcatctactgggccaacctgatggatggagagctgggggagatcaagaacatcaccaccacccagcccagcctggagctggatggcctggagaagtacaccaactacagcatccaggtgctggccttcaccagggctggagatggagtgcgctctgagcagatcttcaccaggaccaaggaggatgtgcccggccccccagctggggtgaaggctgctgctgccagcgcctccatggtgtttgtgtcctggctgccccccctgaagctgaatggcatcatcaggaagtacacagtgttctgcagccacccctaccccaccgtcatcagcgagtttgaggccagcccagacagcttctcctaccgcatccccaacctgagcaggaaccggcagtacagcgtgtgggtggtggccgtgaccagcgctggccggggcaacagcagcgagatcatcaccgtggagcccctggccaaggccccagcccgcatcctgaccttcagcggcaccgtgaccaccccctggatgaaggacatcgtgctgccctgcaaggctgtgggggaccccagccctgctgtgaagtggatgaaggacagcaatggcacccccagcctggtgaccattgatggaagaagaagcatcttcagcaatggcagcttcatcatcagaacagtgaaggccgaggacagcggctactacagctgcatcgccaacaacaactggggcagtgatgagatcatcctgaacctgcaggtgcaggtgcccccagaccagccccggctgactgtgtccaagaccaccagcagcagcatcaccctgtcctggctgcccggggacaatggaggcagcagcatccggggctacatcctgcagtacagcgaggacaacagcgagcagtggggcagcttccccatcagccccagcgagaggagctaccgcctggagaacctgaagtgtggcacctggtacaagttcaccctgacagcccagaatggagtgggccctggccgcatcagcgagatcatcgaggccaagaccctgggcaaggagccccagttcagcaaggagcaggagctgtttgccagcatcaacaccaccagggtgcggctgaacctgattggctggaatgatggcggctgccccatcaccagcttcaccctggagtaccggcccttcggcaccaccgtgtggaccacagcccagaggaccagcctgagcaagagctacatcctgtatgacctgcaggaggccacctggtatgagctgcagatgagggtgtgcaacagcgctggctgtgccgagaagcaggccaactttgccaccctgaactatgatggcagcaccatccccccactcatcaagtctgtggtgcagaatgaggagggcctgaccaccaatgaaggcctgaagatgctggtgaccatcagctgcatcctggtgggcgtgctgctgctgtttgtgctgctgctggtggtgagaagaagaagaagagagcagaggctgaagaggctgagagatgccaagagcctggccgagatgctgatgagcaagaacaccaggaccagtgacaccctgagcaagcagcagcagaccctgaggatgcacatcgacatcccccgggcccagctgctgattgaggagcgggacaccatggagaccattgatgacaggagcacagtgctgctgacagatgctgactttggagaggccgccaagcagaagagcctgactgtgacccacacagtgcactaccagagcgtgtcccaggccaccggccccctggtggatgtgtctgatgcccggcccggcaccaaccccaccaccaggagaaatgccaaggccggccccacagccaggaacagatatgccagccagtggaccctgaaccggccccaccccaccatcagcgcccacaccctgaccacagactggaggctgcccacccccagggctgctggctctgtggacaaggagagtgacagctacagcgtgagccccagccaggacacagaccgggcccggagctccatggtgtccacagagagcgccagcagcacctatgaggagctggcccgggcctatgagcacgccaagatggaggagcagctgcggcatgccaagttcaccatcacagagtgcttcatcagtgacaccagcagcgagcagctgacagctggcaccaatgagtacacagacagcctgaccagcagcacccccagcgagagcggcatctgccgcttcaccgccagcccccccaagccccaggacggcggccgggtgatgaacatggctgtgcccaaggcccacaggcctggggacctgatccacctgcccccctacctgaggatggacttcctgctgaacagaggaggccctggcaccagccgggacctgagcctgggccaggcctgcctggagccccagaagagcaggaccctgaagaggcccaccgtgctggagcccatccccatggaggccgccagcagcgccagcagcacccgggagggccagagctggcagcctggagctgtggccaccctgccccagcgggagggcgctgagctgggccaggccgccaagatgagcagcagccaggagagcctgctggacagccggggccacctgaagggcaacaacccctatgccaagagctacaccctggtgtag

SEQ ID NO: 117466 - DNA, 6039 bp, Artificial Sequence
  derived and/or modified sequence
atgtggatcctggccctgagcctgttccagagcttcgccaacgtgttctccgaggatctgcattcaagcctgtactttgtgaatgcttccctccaggaggttgtctttgcttctacgaccggaaccctggtgccctgtcctgccgccggcatcccccccgtgactcttcgttggtacctcgccaccggagaagagatctatgacgtgccagggattaggcatgtgcaccctaacggcacactgcagatatttccattccctccaagtagcttcagcactttaatccacgacaatacatactactgtaccgctgaaaatcccagcggcaagataaggagccaggatgttcatataaaagcagtgctccgcgagccttataccgttcgtgtggaagaccaaaagaccatgaggggtaatgtcgccgtgttcaaatgcattatcccatcttcggtggaagcatatattaccgttgttagctgggagaaagatactgtcagcttagtatccggaagccggttccttatcacatccactggggccctgtacatcaaggacgtccagaatgaagatggattgtataattacaggtgcatcaccagacatcgatataccggcgagacgcggcaatccaactcagcccgcctttttgtgagcgatcccgcgaactccgcaccaagcatccttgatgggttcgatcacagaaaggccatggcaggacagagagtggagctgccttgcaaagcgctcggccatcctgagccagattataggtggctcaaggataacatgcccttggagctctctggtcgcttccagaaaacggtgactgggctgctgatcgagaatatccgaccctccgacagtggaagttatgtgtgtgaggttagtaatcgctacggcacagccaaagtaattgggagactgtacgtgaaacaacctttaaaagcgacaattagtccacggaaagtgaagtcatctgtagggtcacaggtctccctaagctgcagtgtcactgggaccgaagaccaggagctttcttggtatcgtaatggcgagattctgaaccctggcaaaaatgtcaggatcaccgggataaatcacgaaaatctcatcatggatcacatggttaagagcgatggaggagcataccagtgcttcgtacggaaggataagctgagtgcgcaagattacgttcaagtagtgctagaagatggcactccaaaaattatctctgccttttccgaaaaagtagtctcccccgcagaaccagtttctctgatgtgcaatgtaaaagggacccccctgccaactatcacctggacactggacgatgaccccattttgaaagggggcagtcataggatctcccaaatgatcacaagcgagggaaacgttgtttcatacctcaacatttcgagctcccaggttcgtgatggcggagtgtacaggtgcactgccaacaacagtgccggggtcgtcctctaccaggccaggatcaacgtcaggggtccagctagcattaggccaatgaagaacattaccgccattgctggccgggatacatacattcattgccgtgtgatcgggtatccctactattctatcaaatggtataaaaacagcaatctattgccgttcaatcatagacaggttgcctttgagaacaacggtaccttaaagcttagcgacgtgcagaaggaagttgacgagggagaatacacatgcaacgtcctcgtgcaacctcaactgtccacgagtcagagtgtgcacgtcactgtcaaggttcccccatttatccagccctttgagtttcctagattcagcatcggacaaagggtgtttatcccgtgtgtagttgtgtccggtgatcttcccatcaccatcacatggcagaaggatgggagaccaatcccaggcagcttgggtgtgacgattgacaacatagacttcaccagcagcctccgtatctccaatctctctcttatgcacaatggcaattatacttgtatcgcacgcaacgaagccgccgcagttgaacatcagtcccaactgattgtgagagtccctccaaaatttgtggtgcagccacgggatcaagatggtatctacggtaaagcggtgatactgaactgttccgcagaaggctaccccgtccccactatcgtgtggaaattcagcaaaggggctggcgtgccccaattccagcctatcgcactgaatggccgcatccaggtcctctccaatgggagcctgctgataaagcatgtggttgaagaggattcaggctattacctgtgcaaagtgtctaacgacgtcggtgctgacgtgtctaaatcaatgtacctgacagtcaaaattcctgccatgatcacatcttatccaaatacgaccctcgctacacagggtcaaaaaaaggaaatgtcctgtaccgcgcatggggaaaagcctattatcgtccgatgggaaaaagaagacagaatcattaacccagaaatggccagatacctggttagtaccaaggaagtgggcgaggaggtgatatcgactcttcagatactccccacggtccgcgaagactctggcttcttctcatgtcacgcaatcaatagttacggcgaagaccggggcataatacagctcacggttcaggagcccccagatccacctgagattgagatcaaggacgtcaaagcacgcactattactctgcgttggacgatggggtttgacggaaatagccctatcaccggctatgacattgaatgcaaaaataaatcagacagttgggactctgctcagcgcacgaaggacgtgtcccctcagttaaacagcgcgaccattatagatatacaccctagttctacttactctatcagaatgtacgccaagaacagaattgggaaaagcgaaccctccaatgagctgactataaccgctgatgaggcggctcctgacggtcctcctcaggaggtgcacttagagccgatttcttcacagagcatccgcgttacttggaaggctcctaagaagcacctccagaatggaataatccgcgggtaccagatcgggtatagggaatacagcacaggaggaaacttccagttcaatatcatttcggtggacacgagcggcgacagtgaggtttataccctggacaacttaaataaattcacacagtacggcctggtggttcaggcgtgtaaccgcgctgggaccggaccctccagtcaggaaattattacaacaacactggaggacgttccctcctaccccccagagaacgtccaggccattgctacatcgcccgaatccattagtatcagctggagcacgctctccaaggaggcactcaatggcatcctgcagggcttccgtgtgatttattgggctaacctgatggatggggagctgggggaaattaaaaacattactactactcagccatccctggagcttgatgggttggagaagtacacgaattatagcattcaagtgctcgcgttcacacgtgctggagacggcgttcgaagcgagcaaattttcacccgaacgaaggaagatgttccagggcctccagcaggcgtcaaagccgccgccgcatcagcttcaatggtttttgtgtcctggttgcctcctctgaagttaaacggtataatccggaaatacaccgtgttctgctcccatccctacccgacagtgatcagcgagtttgaggcttctcctgattcttttagctacagaattccaaatctgtcacgcaacaggcagtacagtgtctgggttgtagctgtaaccagtgctggaaggggcaactcatccgagatcattactgtggaaccccttgccaaagcgccagcacgcatcctgactttcagtggcactgtgactacaccctggatgaaagacattgttctcccctgcaaagctgttggtgatccaagtcccgccgtgaagtggatgaaggactctaacggaaccccatcactcgtaacgatcgatggtcgaaggagcatcttctccaatggaagctttatcattagaaccgtaaaggccgaagactcagggtactattcctgcatagccaacaataattggggatcggatgagattattcttaacctacaagtccaggtgccacctgaccaacctaggctgacggttagcaagaccacctcaagcagtattacgcttagctggctacctggcgacaatggaggttcgtctattaggggatacatcttacaatactcagaagataactctgaacagtggggcagctttcctatatcgccttccgaacgcagttatcgccttgagaatctgaagtgcggaacttggtataagtttactctcaccgcccagaacggcgtggggccagggcgcatcagcgagattattgaggccaagaccctcggaaaagagccccaattcagtaaagagcaagagctgttcgcctctatcaatacgaccagagtcagactgaatttgatcggctggaatgacggcggctgtcctatcacctcatttaccctagaatatcgtcctttcggaaccaccgtctggaccactgcccaacgcacaagcctcagcaaatcttacatcttatacgacctccaagaggcaacctggtacgaactgcagatgagagtgtgcaactcggccggatgtgcagaaaaacaagccaacttcgctacactcaattatgatggctctacaattcctcctctgattaagtctgtcgtccaaaatgaggaagggttgacaactaacgagggcttgaaaatgctggtgacaatctcatgtatactggtgggtgtgctgttactgttcgttctactgcttgttgtccggcgacgacgcagagaacagagactgaaacggttgcgagatgcgaagtctctagctgagatgctgatgagcaaaaacacaagaacgagcgacactctgagcaaacaacaacagaccttgcgtatgcatatagacatcccccgggcccagctgctcatcgaggagcgagataccatggaaacaatagatgatcgctccacagttctgttaaccgatgcggactttggggaggctgctaaacagaagtcgctaaccgtaacccacactgtgcactaccagtccgtgtctcaagccaccgggccgctggttgatgtgtcagacgctcggccaggaaccaatcccacgacgcgtcggaatgccaaggcaggtcctacagcgcgcaataggtacgcttcccaatggaccctgaatcgacctcaccccaccatctcagcccacactctcacaacagactggcgactgcctacacccagggccgcgggcagtgtggataaggaatccgacagttattctgttagtccctcccaggacacagatcgggccagatctagtatggtctcaaccgagtccgcgagcagcacctacgaagagctggcccgggcatatgaacacgcaaagatggaggagcaacttcgccatgccaaatttacaatcaccgagtgcttcatcagtgacacctcttcggagcagctgaccgcaggaaccaatgagtatacagacagtttaacaagctcaacccctagcgaatctggaatctgtagattcacagcatccccacctaagccgcaggatggtggccgggttatgaatatggccgtcccaaaagcacaccggcccggagacctgattcatttgcccccttatctgagaatggacttcctacttaatagaggcggcccgggcacaagtcgagatctctcactgggccaagcttgcttggagccccagaaatccagaacactgaagcggccaactgtgctggagcctattcccatggaggcagcttcgtctgctagcagcaccagggaaggacaaagctggcaacccggggccgttgctacactgccccaaagggagggagctgaactcggccaggccgctaaaatgagttcctctcaagagtcccttctagattctaggggtcatctcaagggtaacaacccatacgcaaagtcctatactctcgtttag

SEQ ID NO: 117467 - DNA, 6038 bp, Artificial Sequence
  derived and/or modified sequence
atgtggatcctggctctctccctgttccagagcttcgcaaacgtgttttccgaagatctccacagctcactgtactttgtcaacgctagcttgcaggaggtggtttttgcctccaccactggaacccttgtcccttgtccggctgctgggattcctcccgtaaccctgcgctggtacctggcaaccggcgaagaaatttatgacgtgccgggtatcaggcatgtgcaccctaacgggaccctgcagatttttcccttcccaccttcaagcttcagcacactgatccatgataatacgtactactgcactgcagaaaaccccagtggtaaaatacggtcacaggatgtgcacatcaaggccgtcctgcgtgagccatacactgtacgcgttgaagaccagaaaactatgagaggcaatgtggccgtttttaaatgcatcatcccgtcaagcgtcgaagcatacataaccgtggtctcctgggaaaaagatactgtgtctctggtgagtggaagccgctttctgatcacctccacaggagctctctatatcaaagacgtgcagaacgaagacggactctataattatcggtgtatcactcgtcatcgatacactggtgagacacgccagtccaacagcgccagactattcgtctccgatcctgcgaactccgctccaagcatccttgatggcttcgatcacaggaaggcaatggcaggacaacgggtggagctgccgtgcaaggctctcggccacccggaacccgactaccgctggctcaaagacaatatgccccttgagctctcgggaagatttcagaagacagtgacaggcctcttaatcgagaacatccggccttctgacagcgggagttacgtttgcgaggtgtccaaccgctacggtaccgccaaagtgatagggagactctatgttaagcaaccgctgaaagccaccatctccccacgaaaagtgaagagctctgtgggatcccaggtgtcccttagctgtagcgtgacgggcacggaagatcaggaattgagctggtacaggaacggagagattctcaatcccggtaaaaacgtgagaataacaggcattaatcatgagaacttaatcatggaccacatggtgaaatctgacggcggtgcatatcaatgcttcgttagaaaggacaaattatccgcacaggattatgtgcaggtggttttagaagacgggacccccaaaatcatctcggctttttccgagaaggtagtcagcccagctgaaccggtctctctcatgtgcaacgtcaagggcacaccccttcctaccatcacatggacattggatgatgatccaatactgaaaggcggatcacacaggatatcccagatgattactagcgagggaaatgtggtgtcctatttgaatatcagctcatcccaggtgagagacggaggggtgtataggtgcaccgcaaataattccgccggtgtcgtactgtaccaggccagaatcaatgtacggggacctgccagtatcagacccatgaaaaacattacagcaatagctggtagggatacatacatccattgtcgcgtgatcgggtacccgtattactccatcaagtggtacaaaaactcgaaccttctccccttcaatcacaggcaggtggcttttgaaaataacggcactttgaagctttctgatgtgcaaaaagaggtagatgagggggagtacacatgtaacgttctggtgcagcctcaattgagcacttcacaatctgtgcacgttactgtaaaagtcccacctttcatccagccattcgagtttcctaggttctcaatcgggcagcgcgtgtttattccatgcgtggtggtctcgggcgacctgcccatcaccattacgtggcagaaggatggcaggccaatccccggaagcctgggggtgacaatcgataacattgatttcacttcaagtttgaggataagtaacctatcactgatgcataacggcaactacacctgcatagctcgtaacgaggccgctgccgtcgaacatcagtcccagcttattgtgagggtgcctcctaagttcgtagtgcagccccgagaccaagatgggatttacggtaaggcagttattcttaattgttccgctgagggatatccagtgcctactatcgtctggaaattttccaagggagcaggtgtcccccagtttcaaccaatcgcactcaatggcaggattcaggtactgtccaacggctctctacttattaagcacgtggttgaagaggattctggatattatttgtgcaaagtgagcaacgatgttggagctgatgtcagtaagtcgatgtatttgacagtgaaaatccctgcgatgattacaagctatccaaacactactcttgccacccagggccagaagaaagagatgtcttgtacggctcatggcgaaaaacccatcatagtccgctgggagaaagaggatcgtattatcaacccggaaatggcaagatatttggtgtcaactaaggaggttggggaggaagtaatatccactctacagatactgcccaccgtaagggaagattccggcttttttagctgccacgccatcaactcctacggcgaagacaggggtatcatacaacttactgttcaggaaccacccgatccgcctgagatcgaaataaaggacgtaaaggccagaactataacgctccgctggaccatggggtttgatgggaatagtccaattaccggctatgatatcgaatgcaagaataagtctgacagctgggattcagcccagcgaaccaaggatgtgtccccacagctcaactccgcaacaataatcgatatccacccctcaagtacctactccatcaggatgtatgccaagaaccgaattgggaagtctgaaccatctaacgaactgaccatcaccgccgacgaggctgcacctgacggacctcctcaggaagtccatctagagccgataagctcacaatcaattagggtaacctggaaagcccctaaaaagcacttgcaaaatgggatcattagaggttaccagatcgggtatagggaatattccactggaggaaactttcaatttaacattatctccgtagatacatcgggcgattccgaggtttatacgcttgataatctcaacaagtttacccaatatggtttagttgtgcaggcttgcaatagagcgggtactggcccatcatcacaggagatcattaccaccacgttagaggatgtgccttcttaccctccggagaacgtgcaagcaatagcaaccagtcccgaaagcatcagcatttcctggtccacgctgagtaaggaggctctgaatgggatcttacagggctttagagtaatttattgggccaatcttatggatggcgagctgggtgagatcaagaatattactacaacacagccttccctcgagcttgacggcctggagaagtacactaactacagtattcaagttctcgcgtttacgagggctggagacggagtcagaagcgagcagatttttacaagaacaaaggaagatgtgccgggaccgcctgccggagtgaaagcagccgcagctagtgcctccatggtgtttgtcagctggctgcccccattgaaactgaacggcatcattaggaagtatacagtcttctgttcccacccctatcccacagtcatcagcgagtttgaggcttcccctgactcgtttagttatagaatccccaatctcagtcggaaccggcagtattctgtctgggtggtggcagtcacttctgccggaaggggtaacagctccgaaatcatcacagttgaacctctggcgaaggcaccggctcgtattttaacatttagtgggactgtgacaaccccctggatgaaagacatcgtcttgccatgtaaagcagttggcgacccgtcccccgctgtgaagtggatgaaggacagtaacggtaccccatctcttgtgaccatagacgggaggcgcagcatctttagcaacggaagctttatcatccggacggtcaaagctgaggactctggttactattcatgtattgccaataataattggggttcagacgagattatcctaaacctgcaggtgcaggttccgccagaccagcccaggctgacagtttctaaaaccacctctagcagcatcaccctctcttggctgccgggagataatgggggaagctctatcagaggttacatccttcagtattccgaagacaatagtgagcagtggggctcgtttcccatctctccctcagagaggtcctatcgattagaaaatctgaaatgtgggacatggtacaagtttacccttaccgcccagaacggagtgggccctggcagaatatccgagatcatcgaggcgaaaacgctcggcaaggagccccagttttccaaagaacaagagttgttcgcctccattaatactacgcgggtgagacttaatttgataggctggaatgatgggggatgtcccattacaagcttcaccctagaatatagacctttcggaacaaccgtgtggacaactgcacagcgaacaagtctaagcaagtcatatatcctgtatgacctgcaagaagccacctggtatgaactgcagatgagggtgtgcaatagcgctgggtgtgccgagaagcaagcaaactttgccaccctcaactacgacggttctaccattccccctttaataaagagcgtcgtccaaaacgaggagggattgacaaccaatgagggattgaagatgctggtcactattagttgcatattagtcggggtacttttgctgttcgtgctgttgctagtggtccgacggaggcgtcgagagcagcggctcaagagactccgtgacgcaaaaagcctggcagagatgctgatgtcaaaaaatacaagaacatctgacaccttgtcaaaacagcagcagactctcagaatgcatattgacattcccagagcccagctgctgatagaagagagagataccatggagacaatcgatgatagaagcacagtgcttcttactgatgctgattttggggaagccgctaaacagaaaagcttgaccgttacgcacactgtgcactatcagtccgtgagccaagctacaggaccactggtcgatgtgtccgatgctagacccggtacaaaccccactacccgcaggaatgcaaaggcgggaccgactgcccgaaatagatacgcttcgcaatggacactgaataggccgcatccgactatttccgctcataccttaaccactgactggcgacttcccacaccgcgtgccgctggaagtgtggacaaggagtcagacagttactccgtgagtccttctcaagacacagatagagctcgtagcagcatggtgagcaccgagtccgctagttcaacgtacgaggagctggcacgcgcttacgaacacgccaagatggaggaacaactgagacacgcaaagttcaccattaccgagtgttttatctctgacacgagctccgaacagctgactgccggaaccaatgaatatactgatagccttaccagctcaaccccctcggagagcggcatttgtcgctttacagccagcccacccaagccccaggatgggggtagagtcatgaacatggccgtcccaaaggcacatcgacccggagatctaatccacctgccaccttacctcagaatggatttcctgttgaacagggggggacccggaacaagcagggacctgtctctgggccaagcttgcctggaacctcagaaatcccgtactctgaagcggcctacagtgctggagccaattcctatggaggctgcaagctccgcttcaagcactagagaaggtcagtcctggcaacccggagctgttgcgactctcccgcagcgggagggcgcagagctgggccaagctgcaaagatgagctcttcacaggagagtctgctggatagtcgcggacacctcaaaggtaataatccctacgcaaagagctacacgttagtgta

SEQ ID NO: 117468 - DNA, 6039 bp, Artificial Sequence
  derived and/or modified sequence
atgtggatcctggccctgagcctgttccagagcttcgccaacgtgttcagcgaggacctgcacagcagcctgtacttcgtgaacgccagcctgcaggaggtggtgttcgccagcaccaccggcaccctggtgccctgccccgccgccggcatcccccccgtgaccctgagatggtacctggccaccggcgaggagatctacgacgtgcccggcatcagacacgtgcaccccaacggcaccctgcagatcttccccttcccccccagcagcttcagcaccctgatccacgacaacacctactactgcaccgccgagaaccccagcggcaagatcagaagccaggacgtgcacatcaaggccgtgctgagagagccctacaccgtgagagtggaggaccagaagaccatgagaggcaacgtggccgtgttcaagtgcatcatccccagcagcgtggaggcctacatcaccgtggtgagctgggagaaggacaccgtgagcctggtgagcggcagcagattcctgatcaccagcaccggcgccctgtacatcaaggacgtgcagaacgaggacggcctgtacaactacagatgcatcaccagacacagatacaccggcgagaccagacagagcaacagcgccagactgttcgtgagcgaccccgccaacagcgcccccagcatcctggacggcttcgaccacagaaaggccatggccggccagagagtggagctgccctgcaaggccctgggccaccccgagcccgactacagatggctgaaggacaacatgcccctggagctgagcggcagattccagaagaccgtgaccggcctgctgatcgagaacatcagacccagcgacagcggcagctacgtgtgcgaggtgagcaacagatacggcaccgccaaggtgatcggcagactgtacgtgaagcagcccctgaaggccaccatcagccccagaaaggtgaagagcagcgtgggcagccaggtgagcctgagctgcagcgtgaccggcaccgaggaccaggagctgagctggtacagaaacggcgagatcctgaaccccggcaagaacgtgagaatcaccggcatcaaccacgagaacctgatcatggaccacatggtgaagagcgacggcggcgcctaccagtgcttcgtgagaaaggacaagctgagcgcccaggactacgtgcaggtggtgctggaggacggcacccccaagatcatcagcgccttcagcgagaaggtggtgagccccgccgagcccgtgagcctgatgtgcaacgtgaagggcacccccctgcccaccatcacctggaccctggacgacgaccccatcctgaagggcggcagccacagaatcagccagatgatcaccagcgagggcaacgtggtgagctacctgaacatcagcagcagccaggtgagagacggcggcgtgtacagatgcaccgccaacaacagcgccggcgtggtgctgtaccaggccagaatcaacgtgagaggccccgccagcatcagacccatgaagaacatcaccgccatcgccggcagagacacctacatccactgcagagtgatcggctacccctactacagcatcaagtggtacaagaacagcaacctgctgcccttcaaccacagacaggtggccttcgagaacaacggcaccctgaagctgagcgacgtgcagaaggaggtggacgagggcgagtacacctgcaacgtgctggtgcagccccagctgagcaccagccagagcgtgcacgtgaccgtgaaggtgccccccttcatccagcccttcgagttccccagattcagcatcggccagagagtgttcatcccctgcgtggtggtgagcggcgacctgcccatcaccatcacctggcagaaggacggcagacccatccccggcagcctgggcgtgaccatcgacaacatcgacttcaccagcagcctgagaatcagcaacctgagcctgatgcacaacggcaactacacctgcatcgccagaaacgaggccgccgccgtggagcaccagagccagctgatcgtgagagtgccccccaagttcgtggtgcagcccagagaccaggacggcatctacggcaaggccgtgatcctgaactgcagcgccgagggctaccccgtgcccaccatcgtgtggaagttcagcaagggcgccggcgtgccccagttccagcccatcgccctgaacggcagaatccaggtgctgagcaacggcagcctgctgatcaagcacgtggtggaggaggacagcggctactacctgtgcaaggtgagcaacgacgtgggcgccgacgtgagcaagagcatgtacctgaccgtgaagatccccgccatgatcaccagctaccccaacaccaccctggccacccagggccagaagaaggagatgagctgcaccgcccacggcgagaagcccatcatcgtgagatgggagaaggaggacagaatcatcaaccccgagatggccagatacctggtgagcaccaaggaggtgggcgaggaggtgatcagcaccctgcagatcctgcccaccgtgagagaggacagcggcttcttcagctgccacgccatcaacagctacggcgaggacagaggcatcatccagctgaccgtgcaggagccccccgacccccccgagatcgagatcaaggacgtgaaggccagaaccatcaccctgagatggaccatgggcttcgacggcaacagccccatcaccggctacgacatcgagtgcaagaacaagagcgacagctgggacagcgcccagagaaccaaggacgtgagcccccagctgaacagcgccaccatcatcgacatccaccccagcagcacctacagcatcagaatgtacgccaagaacagaatcggcaagagcgagcccagcaacgagctgaccatcaccgccgacgaggccgcccccgacggccccccccaggaggtgcacctggagcccatcagcagccagagcatcagagtgacctggaaggcccccaagaagcacctgcagaacggcatcatcagaggctaccagatcggctacagagagtacagcaccggcggcaacttccagttcaacatcatcagcgtggacaccagcggcgacagcgaggtgtacaccctggacaacctgaacaagttcacccagtacggcctggtggtgcaggcctgcaacagagccggcaccggccccagcagccaggagatcatcaccaccaccctggaggacgtgcccagctacccccccgagaacgtgcaggccatcgccaccagccccgagagcatcagcatcagctggagcaccctgagcaaggaggccctgaacggcatcctgcagggcttcagagtgatctactgggccaacctgatggacggcgagctgggcgagatcaagaacatcaccaccacccagcccagcctggagctggacggcctggagaagtacaccaactacagcatccaggtgctggccttcaccagagccggcgacggcgtgagaagcgagcagatcttcaccagaaccaaggaggacgtgcccggcccccccgccggcgtgaaggccgccgccgccagcgccagcatggtgttcgtgagctggctgccccccctgaagctgaacggcatcatcagaaagtacaccgtgttctgcagccacccctaccccaccgtgatcagcgagttcgaggccagccccgacagcttcagctacagaatccccaacctgagcagaaacagacagtacagcgtgtgggtggtggccgtgaccagcgccggcagaggcaacagcagcgagatcatcaccgtggagcccctggccaaggcccccgccagaatcctgaccttcagcggcaccgtgaccaccccctggatgaaggacatcgtgctgccctgcaaggccgtgggcgaccccagccccgccgtgaagtggatgaaggacagcaacggcacccccagcctggtgaccatcgacggcagaagaagcatcttcagcaacggcagcttcatcatcagaaccgtgaaggccgaggacagcggctactacagctgcatcgccaacaacaactggggcagcgacgagatcatcctgaacctgcaggtgcaggtgccccccgaccagcccagactgaccgtgagcaagaccaccagcagcagcatcaccctgagctggctgcccggcgacaacggcggcagcagcatcagaggctacatcctgcagtacagcgaggacaacagcgagcagtggggcagcttccccatcagccccagcgagagaagctacagactggagaacctgaagtgcggcacctggtacaagttcaccctgaccgcccagaacggcgtgggccccggcagaatcagcgagatcatcgaggccaagaccctgggcaaggagccccagttcagcaaggagcaggagctgttcgccagcatcaacaccaccagagtgagactgaacctgatcggctggaacgacggcggctgccccatcaccagcttcaccctggagtacagacccttcggcaccaccgtgtggaccaccgcccagagaaccagcctgagcaagagctacatcctgtacgacctgcaggaggccacctggtacgagctgcagatgagagtgtgcaacagcgccggctgcgccgagaagcaggccaacttcgccaccctgaactacgacggcagcaccatcccccccctgatcaagagcgtggtgcagaacgaggagggcctgaccaccaacgagggcctgaagatgctggtgaccatcagctgcatcctggtgggcgtgctgctgctgttcgtgctgctgctggtggtgagaagaagaagaagagagcagagactgaagagactgagagacgccaagagcctggccgagatgctgatgagcaagaacaccagaaccagcgacaccctgagcaagcagcagcagaccctgagaatgcacatcgacatccccagagcccagctgctgatcgaggagagagacaccatggagaccatcgacgacagaagcaccgtgctgctgaccgacgccgacttcggcgaggccgccaagcagaagagcctgaccgtgacccacaccgtgcactaccagagcgtgagccaggccaccggccccctggtggacgtgagcgacgccagacccggcaccaaccccaccaccagaagaaacgccaaggccggccccaccgccagaaacagatacgccagccagtggaccctgaacagaccccaccccaccatcagcgcccacaccctgaccaccgactggagactgcccacccccagagccgccggcagcgtggacaaggagagcgacagctacagcgtgagccccagccaggacaccgacagagccagaagcagcatggtgagcaccgagagcgccagcagcacctacgaggagctggccagagcctacgagcacgccaagatggaggagcagctgagacacgccaagttcaccatcaccgagtgcttcatcagcgacaccagcagcgagcagctgaccgccggcaccaacgagtacaccgacagcctgaccagcagcacccccagcgagagcggcatctgcagattcaccgccagcccccccaagccccaggacggcggcagagtgatgaacatggccgtgcccaaggcccacagacccggcgacctgatccacctgcccccctacctgagaatggacttcctgctgaacagaggcggccccggcaccagcagagacctgagcctgggccaggcctgcctggagccccagaagagcagaaccctgaagagacccaccgtgctggagcccatccccatggaggccgccagcagcgccagcagcaccagagagggccagagctggcagcccggcgccgtggccaccctgccccagagagagggcgccgagctgggccaggccgccaagatgagcagcagccaggagagcctgctggacagcagaggccacctgaagggcaacaacccctacgccaagagctacaccctggtgtag

SEQ ID NO: 117469 - DNA, 8552 bp, Artificial Sequence
  derived and/or modified sequence
agggaaggttggcagagggatccatgtgactgaggccggagcacggcaaagatgagcctgcccgcccgcctgctgcctggatgcggagggtgagggctggcgcacgggaggccgctggctgcgcattctgggcgccgagtgcccgggatgagctcacgcccgcgtctgcggctctctccacctgccgacctgccgggggcccactgagctgacggcgcacctgggctccggccgcagcgtggggcgcggcgcccgggagcaggtgtgcaggagcgcagcgcgcggcgagcgcagccctcgctccggagcccggccgcgccgcgtgcccgggcggctaggcagcggcggcggcggcggcgggcggcgggcgggcggcggcccccgggcaggtgccgagcggcgagcggagccgggccgggcggagcgcggggggcgaggccggcgcgtcgctcgcgggaggccggggagcggcaggggcatgtggatactggctctctccttgttccagagcttcgcgaatgttttcagtgaagacctacactccagcctctactttgtcaatgcatctctgcaagaggtagtgtttgccagcaccacggggactctggtgccctgccccgcagcaggcatccctcctgtgactctcagatggtacctagccacgggcgaggagatctacgatgtccccgggatccgccacgtccaccccaacggcactctccaaattttccccttccctccttcaagcttcagtaccttaatccatgataatacttattattgcacagctgaaaatccttcagggaaaattagaagtcaggatgtccacatcaaggctgttttacgggagccctatacagtccgtgtggaggaccagaaaaccatgagaggcaatgttgcggtcttcaagtgcattatcccctcctcggtggaggcgtacatcactgtcgtctcatgggagaaagacactgtttcacttgtctcaggatctagatttctcatcacatccacgggagccttgtatattaaagatgtacagaatgaagatggattgtataactaccgctgcatcacgcggcatcgatacaccggagagacgaggcagagcaacagcgccagactttttgtatcagacccagcgaactcagccccatccatactggatgggtttgaccatcgcaaagccatggctgggcagcgtgtggagctgccttgcaaagcgctcgggcaccctgagccagattaccgctggctgaaggacaacatgcccctggaactttcagggaggttccagaagaccgtgacggggctgctcattgagaacattcgcccctcggactcaggcagctatgtttgtgaagtgtccaacagatacggaactgctaaggtgataggccgcctgtacgtgaaacagccactgaaagccaccatcagtcccaggaaggttaaaagcagcgtgggtagccaagtttccttgtcctgcagcgtgacaggaactgaggaccaggaactctcctggtaccgcaatggtgaaatcctcaaccctggaaaaaatgtgaggatcacagggatcaaccacgaaaaccttataatggatcacatggtcaaaagtgacgggggcgcataccagtgctttgtgcgcaaggacaagctgtccgctcaagactatgtgcaggtggtccttgaagatggaactcccaaaattatttctgcctttagtgaaaaggtggtgagtccagcagagccggtttcccttatgtgcaacgtgaagggaacacctttgcccacgatcacgtggaccctggacgatgacccgattctcaagggtggcagtcaccgcatcagccagatgatcacgtcggaggggaacgtggtcagctacctgaacatctccagctcccaggtccgggacgggggagtctaccgctgcactgccaacaactcggcgggagtcgtcctgtaccaggctcgaataaacgtaagagggcctgcaagcattcgaccaatgaaaaacatcacagcaatagcaggacgggacacatacattcactgtcgtgtgattggctatccgtattactccattaaatggtacaagaactctaacctgcttcctttcaaccaccgccaagtggcatttgagaacaatggaactcttaaactttcagatgtgcaaaaggaagtggacgagggggagtacacgtgcaacgtgttggttcaaccacaactctccaccagccagagcgtccacgtgaccgtgaaagttccgcctttcatacaaccctttgagtttccaagattctccattgggcagcgggtcttcatcccctgtgttgtggtctcaggggacttacccatcacgatcacctggcagaaggatggccggccaatccctgggagccttggggtgaccattgacaatattgacttcacgagctccttgaggatttccaatctctcgctcatgcacaatgggaattacacctgcatagcccggaatgaggccgccgctgtggagcaccaaagccagttgattgtcagagttcctcccaagtttgtggttcagccacgggaccaggacgggatttatggcaaagcagtcatcctcaattgttctgctgagggttaccctgtacctaccatcgtgtggaaattctctaaaggtgctggggttccccagttccagccaattgccctaaatggccgaatccaagttctcagcaatgggtcgttgctgatcaagcatgtcgtggaggaagacagtggctactacctctgcaaggtcagcaacgatgtgggcgcagacgtcagcaagtccatgtacctcacggttaaaattcctgcgatgataacatcctatccaaatactaccctggccacgcaggggcagaaaaaggagatgagctgcacggcgcatggtgagaagcccattatagtccgctgggagaaggaggaccgaatcattaaccctgagatggcccgttatcttgtgtccaccaaggaggtgggagaagaggtgatttctactctgcagattttgccaactgtgagagaagattctggtttcttttcctgccatgctattaattcttatggggaggaccgtggaataattcagctcacagtgcaagagcccccagaccctcccgaaattgagatcaaagatgtcaaagcacgcacaattacgctcaggtggaccatggggtttgatggaaacagtcccatcacaggctacgatattgaatgcaaaaataaatcagactcctgggattctgctcagagaaccaaagatgtttcccctcagctgaactcggccaccatcattgatatccacccttcctccacctacagcatccgcatgtacgccaagaaccggattggcaagagcgagcccagcaacgagctcaccatcacggcggacgaggcagctcctgatggtccacctcaggaagttcacctggagcctatatcatctcagagcatcagggtcacatggaaggctcccaagaaacatttgcaaaatgggattatccgtggctaccaaataggttaccgagagtacagcactgggggtaacttccaattcaacattatcagtgtcgacaccagcggggacagtgaggtttacaccctggacaacctgaataagttcactcagtacggcctggtggtgcaggcctgtaaccgggccggcacggggccttcttctcaggaaatcatcaccaccactctcgaggatgtgcccagttacccccccgaaaatgtccaagccatagcaacatcaccagaaagcatatcaatatcctggtccacactttccaaggaagccttgaatggaattctccaggggttcagagtcatttactgggccaacctcatggacggagagctgggtgagattaaaaacatcaccaccacacagccttcactggagctggacgggctggaaaagtacaccaactacagcatccaggtgctggccttcacccgcgcaggagacggggtcaggagtgagcagatcttcacccggaccaaagaggatgttccaggtcctcccgcgggtgtgaaggcagcggcggcctcagcctccatggtctttgtgtcctggcttccccctctcaagctgaacggcatcatccgaaagtacactgtattctgctcccacccctatcccacagtgatcagcgagtttgaggcctctcccgactcgttttcctacagaattcccaacctgagtaggaatcgtcagtacagcgtctgggtggtggctgttacttcagccggaagaggcaacagcagtgaaatcatcacagtcgagccactagcaaaagctcctgcacgaatcctgaccttcagtgggacagtgactactccatggatgaaagacattgtcttgccttgtaaggctgttggggacccttctcctgcagtcaaatggatgaaagacagtaacgggacacccagtctagtaacgattgatgggcggaggagcatctttagcaacggaagcttcattattcgcacggtgaaagcagaagactccggctattacagctgcattgccaataacaactggggatctgatgaaattattttaaacttacaagtacaagttccaccagatcagcctcggcttacagtctccaagaccacgtcttcctccatcaccctttcttggctccctggagacaacgggggcagctctatcagaggatacatactgcagtactccgaggacaatagtgagcagtgggggagttttccaatcagccccagcgaacgttcctatcgcttggaaaatctcaaatgtgggacttggtataagttcacactgacagcccaaaatggagtgggcccagggcgcataagtgaaatcatagaagcaaagaccttaggaaaagagccccagttctcaaaggagcaggagctgtttgccagcatcaacaccacacgcgtgaggctgaacctcattggctggaatgatggcggctgccccatcacctccttcacactagagtacaggccctttgggaccacagtttggaccacagctcagaggacctctctctccaagtcctacatcctgtatgacctgcaggaagccacctggtatgagctgcagatgcgggtgtgcaacagtgcgggctgcgcggagaagcaggccaacttcgctacgctgaactacgatggcagtacaattcctccactcattaagtcagttgtccaaaacgaagaagggctgacgaccaacgaggggctcaagatgctggtgaccatctcctgtatcctggtgggggtcttgctgctgtttgtgctcctgctggttgtgcggaggaggcggcgggagcagaggctaaagaggctgcgagatgcaaagagtttagctgaaatgctcatgagtaagaatacccggacttcagatacgttaagcaagcaacagcagaccctgcgaatgcacatcgacatacccagggctcagcttttgattgaagagagagacacgatggagaccattgatgatcgctccacggttctgttgacggatgctgactttggagaggcagctaagcagaagtccctgacggtcactcacacggtccattaccaatcggtgtctcaggccactgggcccttagtggatgtttcagacgctcggccgggaacgaatcccaccaccaggaggaatgccaaggctgggcccacagcgagaaaccgctatgccagccagtggaccctcaaccgaccccaccccaccatctcagcacacaccctcaccacagactggaggctgccaacacccagggctgcaggatcagtagacaaagagagcgacagttacagcgtcagcccctcgcaagacacagatcgagcaagaagcagcatggtctccacagaaagtgcctcctccacttacgaagaactggccagggcctacgaacacgccaagatggaagagcaactgaggcacgccaagttcaccatcacggagtgcttcatatcagacacgtcatcggagcagttgacggcagggacaaatgagtacacggacagtctgacctccagcaccccttccgaatcgggaatctgcaggttcactgcatctccccccaaacctcaggatggaggaagagtaatgaatatggcagttccaaaggcacatcggccaggtgacctcatacatttgcctccataccttagaatggactttttgttaaaccgaggtggtccaggcaccagcagggacctgagcttaggacaagcatgcttggaacctcagaaaagccggaccctgaagcgccccacggtcctggagcccatcccgatggaagccgcctcctccgcctcctccacgagagaaggacagtcgtggcagccgggggccgtggccacattacctcagcgggagggagcagagctgggacaggcagctaaaatgagcagctcccaagaatcactgctcgactcccggggccatttgaaaggaaacaatccttacgcaaaatcttacaccctggtataacagacagcatgactggacagcggttgtaaatacaattcaaacaattcaatcaaagctaccttttttttacggaattccaatatttataattaaagaaaattgccaaaatatattaaaaaaaaaaaagagaaaatactgaaaccacagacagtgcaaagactctcctgctttttttctgtctgagtgtgagctccatccgcctgggcatctgattttttgggaaagaagtccagttttatgatcttcacaggctattgcatttttactgattttctacaaaagtgcatgggggggattaattaaaccttctgactggaagttctatcacacaagaggcaagaaagaaaacagggtgggtgggaaatcagcctatttgtgaatttaaaaggaacaccgatttgcgggcaggggaaaacttcagtcacgtttgcacacctttctttcccattagaaaccgggttctcaatttggtcttcttttgttgttaattaggatgagtgccgtcagtgaaggggtggggggaatcaatttggttttctctcttgtttcttttttaatttaatgagacactctttgcattttgtctaagcgaaataaaaaagaaaaggttgtctgcctttatttccatgtctgcttctctcgtcttctgccagtggcctggtcctccttcccattgacacttctgtttggaaacaccaggcctgaacccagagcccaattcaataaaccagagtcgatactaacaccctgaactcctcaggaatctccaggaagcacaaagaaggtgcagctcctgctctcaagctggagaggacaaaatgcaggctggtctccaccgcaaccagaggccagcccaagtattcgaagcccgtcgcaaagctctgccccttgcctgcccatggccagagttcaactgactgtggcctatgggccaaatccagcctcctgctgttttttaaataaagttttattgaaacaaggccacatgcactatttgctattgtctatggctgctttcatggcacaatggtagagctgaatagttgcagcagagatggtatagcccatgaagcctaaaatatttattacctggcccattacaggaaacatttgccagacccgtgctctggagtctgaaatgtagccccagcttgcgtgacaaggggcaagatcgtgcatcttaccctccatgacttttcctatctccactatgcctggtatgcaaatttgtgatagaccatcttaataaacattgcctgaatcctctgtaaccagaggaaagtgatgttcctctaaaatctaagtttttactttcctttccctcactttatctcccatgtggctcatcctaagagagaatttactcataaatagtcggaactgcattctttatcccacaaccctcacagggtttgctttatgaaagaggatgtaatcctcccctggctgcaacactccattccaggctcacttccataaaatggaaagataaacaggtctttgtgtcagagatttggcattaaccagaaaacatgatcaaatatccacagctgctcagtctcccaggctgaagattctctacaggcttccattaaggccaccaacatagactggtgccagttattaccatcttgggaacatattcagaaatgtctttccttccctccctccctccttctttcccatcctttcttccttctatttattttccaggcaggcccatttgtctgcttagattcagtgacacagaatgggtccaggaccatgtcaagaccacctgctgatgctagtgttagatgactccaggaatgtgaggtgtgcatccatggtttcagaatgtaatccgtgttgacgtgtactgtttgcatactctcagactgttttttttttatgcaaaagaaatgttactttctgggggaaaaaattaaaagtctatctttcatcaacctaaaacttctatatcccccaaacatagaagtttacctttttaacatttttctctcaacctgtacaaaaataaaaaaattctacatta

SEQ ID NO: 117470 - protein, 744 aa, Artificial Sequence
  derived and/or modified sequence
MIEDSGKRGNTMAERRQLFAEMRAQDLDRIRLSTYRTACKLRFVQKKCNLHLVDIWNVIEALRENALNNLDPNTELNVSRLEAVLSTIFYQLNKRMPTTHQIHVEQSISLLLNFLLAAFDPEGHGKISVFAVKMALATLCGGKIMDKLRYIFSMISDSSGVMVYGRYDQFLREVLKLPTAVFEGPSFGYTEQSARSCFSQQKKVTLNGFLDTLMSDPPPQCLVWLPLLHRLANVENVFHPVECSYCHSESMMGFRYRCQQCHNYQLCQDCFWRGHAGGSHSNQHQMKEYTSWKSPAKKLTNALSKSLSCASSREPLHPMFPDQPEKPLNLAHIVLDNMPPRPVTSMNDTLFSHSVPSSGSPFITRSSPPKDSEVEQNKLLARAAPAFLKGKGIQYSLNVADRLADEHVLIGLYVNMLRNNPSCMLESSNRLDEEHRLIARYAARLAAESSSSQPPQQRSAPDISFTIDANKQQRQLIAELENKNREILQEIQRLRLEHEQASQPTPEKAQQNPTLLAELRLLRQRKDELEQRMSALQESRRELMVQLEGLMKLLKTQGAGSPRSSPSHTISRPIPMPIRSASACSTPTHTPQDSLTGVGGDVQEAFAQSSRRNLRNDLLVAADSITNTMSSLVKELNSEVGSETESNVDSEFARTQFEDLVPSPTSEKAFLAQIHARKPGYIHSGATTSTMRGDMVTEDADPYVQPEDENYENDSVRQLENELQMEEYLKQKLQDEAYQVSLQG

SEQ ID NO: 117471 - protein, 743 aa, Artificial Sequence
  derived and/or modified sequence
MIEDSGKRGNTMAERRQLFAEMRAQDLDRIRLSTYRTACKLRFVQKKCNLHLVDIWNVIEALRENALNNLDPNTELNVSRLEAVLSTIFYQLNKRMPTTHQIHVEQSISLLLNFLLAAFDPEGHGKISVFAVKMALATLCGGKIMDKLRYIFSMISDSSGVMVYGRYDQFLREVLKLPTAVFEGPSFGYTEQSARSCFSQQKKVTLNGFLDTLMSDPPPQCLVWLPLLHRLANVENVFHPVECSYCHSESMMGFRYRCQQCHNYQLCQDCFWRGHAGGSHSNQHQMKEYTSWKSPAKKLTNALSKSLSCASSREPLHPMFPDQPEKPLNLAHIVDTWPPRPVTSMNDTLFSHSVPSSGSPFITRSSPPKDSEVEQNKLLARAAPAFLKGKGIQYSLNVADRLADEHVLIGLYVNMLRNNPSCMLESSNRLDEEHRLIARYAARLAAESSSSQPPQQRSAPDISFTIDANKQQRQLIAELENKNREILQEIQRLRLEHEQASQPTPEKAQQNPTLLAELRLLRQRKDELEQRMSALQESRRELMVQLEGLMKLLKTQGAGSPRSSPSHTISRPIPMPIRSASACSTPTHTPQDSLTGVGGDVQEAFAQSSRRNLRNDLLVAADSITNTMSSLVKELNSEVGSETESNVDSEFARTQFEDLVPSPTSEKAFLAQIHARKPGYIHSGATTSTMRGDMVTEDADPYVQPEDENYENDSVRQLENELQMEEYLKQKLQDEAYQVSLQG

SEQ ID NO: 117472 - protein, 743 aa, Artificial Sequence
  derived and/or modified sequence
MIEDSGKRGNTMAERRQLFAEMRAQDLDRIRLSTYRTACKLRFVQKKCNLHLVDIWNVIEALRENALNNLDPNTELNVSRLEAVLSTIFYQLNKRMPTTHQIHVEQSISLLLNFLLAAFDPEGHGKISVFAVKMALATLCGGKIMDKLRYIFSMISDSSGVMVYGRYDQFLREVLKLPTAVFEGPSFGYTEQSARSCFSQQKKVTLNGFLDTLMSDPPPQCLVWLPLLHRLANVENVFHPVECSYCHSESMMGFRYRCQQCHNYQLCQDCFWRGHAGGSHSNQHQMKEYTSWKSPAKKLTNALSKSLSCASSREPLHPMFPDQPEKPLNLAHIVCFRPPRPVTSMNDTLFSHSVPSSGSPFITRSSPPKDSEVEQNKLLARAAPAFLKGKGIQYSLNVADRLADEHVLIGLYVNMLRNNPSCMLESSNRLDEEHRLIARYAARLAAESSSSQPPQQRSAPDISFTIDANKQQRQLIAELENKNREILQEIQRLRLEHEQASQPTPEKAQQNPTLLAELRLLRQRKDELEQRMSALQESRRELMVQLEGLMKLLKTQGAGSPRSSPSHTISRPIPMPIRSASACSTPTHTPQDSLTGVGGDVQEAFAQSSRRNLRNDLLVAADSITNTMSSLVKELNSEVGSETESNVDSEFARTQFEDLVPSPTSEKAFLAQIHARKPGYIHSGATTSTMRGDMVTEDADPYVQPEDENYENDSVRQLENELQMEEYLKQKLQDEAYQVSLQG

SEQ ID NO: 117473 - DNA, 2235 bp, Artificial Sequence
  derived and/or modified sequence
atgattgaagattcaggaaagaggggcaacactatggcggagaggcgtcagctgtttgctgaaatgagggcacaagatctcgatcgcataaggctgagcacttaccggacagcttgcaagttgcgtttcgtgcagaagaaatgtaatctgcacttggtcgatatctggaacgtgattgaagcgctgcgcgaaaacgctttaaacaacctagacccaaatacagaactgaacgttagccgcctggaggccgtgttgtccaccatcttctaccaacttaataagagaatgcctaccacccatcagattcacgtggagcagtccatcagcctgctgctcaatttcctgctggccgcattcgaccccgagggccatgggaaaatttcggtctttgcagtaaaaatggccctagctactctgtgtggaggcaagataatggataaattacgttacatcttctccatgatctcagactcttctggcgtgatggtgtacggaaggtatgatcagtttctacgtgaagtcctgaaactgccaaccgccgtgttcgaagggccttccttcggctatacagaacagagtgcaagatcatgttttagtcagcagaagaaagtgaccctgaatgggtttctcgacaccctaatgagtgaccctccccctcagtgcctagtttggctgccgctactgcatcgcctagccaatgtggagaacgtgttccaccccgttgaatgtagctattgtcactctgagtctatgatgggcttcagatatagatgccagcagtgtcataactaccagctgtgtcaggactgtttctggagaggacacgccggtgggagtcactctaatcaacaccagatgaaagagtacacctcatggaagtcacccgccaagaagcttacaaacgcactgagcaagtcactctcctgtgcctcttccagagaacccctacatccgatgtttccagaccagcccgaaaaacctctgaatctggcacacatcgtgctcgacaatatgcctccccgccccgttacttccatgaacgataccttgttctcgcattcagtcccatcctctggatcccctttcatcacccgctcaagccctccaaaggactcagaagttgagcagaacaaactgctggctcgcgccgcacctgcatttctaaagggtaaaggaattcagtactccctgaacgttgccgaccgcctggcggatgagcacgtactgatcgggttgtatgttaacatgttacgcaataaccctagctgtatgttggaatcttctaatcgcctggatgaagaacatcggttaattgccagatatgcggcccgcttggcggcggagtcaagcagttcccaaccccctcaacagcgttctgccccagatatcagcttcactatcgatgccaacaagcaacagagacagctgattgcggaactggaaaacaagaaccgggagatcctgcaagagatccagaggctgcgcctggaacacgagcaggccagccagcctactcctgagaaggctcagcaaaatccgacactgctggccgaactcaggcttctgcgccaacgcaaagatgagctggagcaacgcatgagcgctctgcaggaatcccggcgagagctcatggtgcagctagaaggcctcatgaagctccttaagacccaaggtgccggctctccccggtctagccccagtcacaccattagtcgacccatccccatgcccatccgctctgccagcgcatgttctaccccaacacatacaccgcaggattccttaacaggggtggggggggatgtccaggaagctttcgctcaaagctcgcggagaaatcttagaaacgaccttctggtcgctgcagatagcatcaccaacaccatgtcctctctcgtcaaggagctcaactctgaggtgggctccgagaccgaaagcaacgttgacagtgagttcgctcgcactcaattcgaagaccttgtaccaagcccgactagcgaaaaagctttcctagcccaaattcatgcccgtaagcccggctatatccatagcggggctaccactagcacaatgagaggggacatggtgactgaggatgctgatccctatgtgcagccggaggacgagaactacgagaatgattcagttaggcaactcgagaatgaactccaaatggaagagtacctcaaacaaaaactgcaggatgaggcttaccaggtttccctgcagggatag

SEQ ID NO: 117474 - DNA, 2232 bp, Artificial Sequence
  derived and/or modified sequence
atgatcgaggacagtggaaaaaggggtaatacaatggcagagcgtcggcagcttttcgccgagatgcgtgctcaagacttagatcggatccgcctgtcaacgtacagaacggcgtgcaagttacgattcgtgcagaagaagtgtaatctacacctagtcgatatttggaatgtcattgaagccctgcgcgagaatgctctgaacaacctggatccaaatacagaactcaacgtgagtagactcgaagccgtcctctccactatcttctaccagctgaataagagaatgccaaccacccaccagatccatgtggaacagtccatctctttattgttgaacttcctccttgctgcatttgatcctgaaggccacgggaaaatatccgtatttgccgtgaagatggcattggccaccctctgcggaggaaaaattatggacaaactgcgctacattttttcaatgatcagcgattcctctggagtcatggtttatggaagatatgaccagttcctgagagaagtgctgaaacttcccactgccgtgtttgaaggacccagttttggatacaccgaacaaagcgcaaggtcgtgtttttcacagcagaaaaaggttacactgaatggttttttggatactttgatgtctgacccgcctccgcaatgtctcgtctggttgcccctgttgcacaggctggctaacgtggagaacgtgtttcatccagtggagtgctcatattgccattcagaatccatgatgggcttcagatatcggtgccagcagtgccacaactaccaattgtgtcaagactgtttctggagaggccacgcaggggggtcccattcgaatcagcatcagatgaaagagtacactagttggaaaagcccggccaagaaactaacaaatgcactgtccaagtcacttagctgtgcgagctcccgagaacctctgcatcctatgttccctgatcagccagagaagcctctgaatctagcccatatcgtcgacacctggcccccaagacccgttacttcaatgaacgacaccctgttttcccactctgtccccagttctggttccccttttattactagaagctcccctcctaaagacagcgaagttgaacaaaataagttactggcccgcgctgcaccggcgttcctcaaaggcaaaggtattcagtattctctcaatgttgcagataggctggcggatgaacatgtgctgatcggcctatacgtgaatatgctgagaaataatccttcctgtatgctcgagagctctaacagactggacgaggagcatcgattgatagcacgttacgctgcaaggttggccgccgaaagctctagcagccagccacctcagcagagaagtgctcctgacattagttttaccatcgacgcaaataaacagcagcgccaacttatcgccgagttggaaaataagaatcgggagatattgcaggaaattcagcgcctccggctggagcatgaacaggctagtcagccgaccccggagaaagcccagcagaaccccactctcctcgcagagctgagacttctccgccagcggaaggacgaactggaacagagaatgtccgccctccaggaatctcgaagagagctgatggtgcagctggagggactgatgaagctacttaaaacgcagggcgccggatccccccgttcttcccccagtcacactatatccagacctatccctatgccaatcaggtccgccagcgcctgctctactcccacacacactccgcaggatagtttaacgggtgtgggaggtgacgtgcaagaggccttcgcccagagctcccggcgcaacctgcgtaatgacctcttagtggctgctgactccattacaaatacgatgagtagcctggtgaaagagttgaactccgaggtaggatccgaaaccgaatctaacgttgatagcgagttcgccagaacccagtttgaggacctggtaccttcaccaacatctgaaaaggctttcctggcccaaattcatgcaagaaaacctgggtatattcatagtggggccaccacgtctacgatgagaggcgatatggtgaccgaagacgcagacccctatgtgcagcccgaagacgagaattatgaaaacgatagtgtgaggcaactggagaacgagctgcagatggaagaatacctgaagcagaaactccaggatgaggcctaccaagtgtcccttcagggatag

SEQ ID NO: 117475 - DNA, 2232 bp, Artificial Sequence
  derived and/or modified sequence
atgattgaggactcaggcaagcggggcaacacaatggctgaaagaaggcagctgtttgccgaaatgcgcgctcaagaccttgaccgcatcagactcagcacttacagaacagcttgtaagttacgcttcgtgcagaagaagtgtaacctccaccttgtcgacatctggaacgttatagaggcccttagggagaacgcactcaataacctcgaccccaatactgaactcaacgtatctaggcttgaggccgtgttaagtacaattttttaccaactcaataagcggatgccaaccacgcatcaaattcacgtggaacagtcaatcagccttctcctgaactttttgcttgcggcttttgaccccgaagggcacgggaagatcagcgtattcgcggtgaagatggcactggcgacactctgtggcggaaaaataatggataaacttcggtatatcttctccatgatctctgattcatctggggttatggtatacggcaggtacgatcagtttctgcgggaggtgcttaagcttccaacggctgtattcgaagggcctagttttggatacactgagcagtccgcccgctcctgcttttcccagcagaagaaggttactcttaacggatttctggataccttgatgagcgaccctcccccgcagtgtctagtatggttgccccttctccaccgactcgctaacgtggaaaatgtgtttcaccctgtcgaatgctcttattgtcatagcgagagtatgatggggttcaggtacagatgccagcaatgtcacaattaccagttgtgccaggattgcttttggcgtggacacgccggcggatcccactctaatcagcatcaaatgaaagagtatacgagctggaaaagccccgcaaaaaagctaaccaatgctctgagcaagagcttatcctgtgcttcttctcgagaacctttacatcctatgttccccgaccagcccgagaaaccgttaaacttagctcacatcgtgtgcttcagacctcctagacctgtcacttctatgaatgacacactgttcagtcatagtgttccatcctctggttctccctttataacaaggagctcaccccctaaagactctgaggtggagcagaacaaacttctcgccagggcagcaccagccttcctgaagggtaagggtattcagtacagcctgaatgtggccgaccgtttagctgacgaacacgtgcttataggcctgtacgtcaacatgctgcgaaataatccctcttgtatgctggaaagtagtaataggttggacgaagaacacaggctaattgccaggtatgccgccagactggcggccgaaagttcctcttcccagcctccccagcagaggagtgcaccggatataagtttcaccattgacgccaacaagcagcagaggcaactcatcgcagagctggagaataaaaacagggaaatccttcaggagattcagaggctgcggctggaacatgagcaggcctcacagcccacccctgagaaagcacaacaaaatccaaccctgctggcggagttaagactgctgaggcagagaaaagacgaactcgaacagaggatgtcagccctgcaggagagcaggagggaactgatggtgcagctcgagggactaatgaagttgctgaaaactcagggggccggtagcccacgatcgagtccatcacacaccatctcccggccaatccccatgcctatcagaagcgcctccgcttgcagtacccccacgcacacgccgcaggattccctgacgggagtcggaggcgatgtgcaagaggcgttcgctcagagctcaagacgaaatctgcgtaacgacttgctcgttgctgccgactctatcaccaataccatgagttcgcttgtgaaggagctaaactcagaagtgggctcagaaactgagagcaacgtagacagcgagtttgctaggacacagttcgaagaccttgtgccgagcccaacctctgagaaggcttttctcgcacaaatccatgcccgcaagcctgggtacatccattctggagccactaccagcactatgcgcggtgacatggtcacagaggacgcggatccctatgtgcagcctgaggacgagaactatgaaaacgacagcgtgcgccagttggagaacgaactgcagatggaggagtatctgaaacaaaagctgcaggacgaggcctaccaggtttcacttcagggttag

SEQ ID NO: 117476 - DNA, 2232 bp, Artificial Sequence
  derived and/or modified sequence
atgattgaggattctgggaagcgggggaacaccatggcggagcggagacaattgttcgccgagatgcgtgcccaggacttggacaggattagattgagtacatatcgtaccgcctgcaaacttagattcgtccagaagaaatgcaacctacatcttgtcgatatctggaatgttatcgaggcactgcgcgagaacgcccttaacaatcttgacccgaacactgagttaaatgtgagtagattggaagcagtcctgtcaactattttctaccagctgaacaaacgcatgccaaccactcatcagatccacgtcgaacaatccatttccttgcttctaaacttcctgctggctgcgttcgaccccgaggggcacgggaagattagtgtctttgccgttaagatggccctggccaccctgtgtggggggaagattatggacaaattgagatatatttttagtatgatctccgactcttcaggagtgatggtgtacggccggtacgaccaatttctgagggaggttctgaagctgccaacagccgtgttcgagggcccaagcttcggatacaccgaacagtctgcaagatcttgtttcagccagcagaaaaaggttactctcaacggctttttggacacccttatgtccgaccctcccccacagtgccttgtctggctccccttattacaccggctcgcaaatgtggaaaatgtctttcacccagtggagtgttcatattgccacagtgagtcaatgatgggctttaggtatcgatgtcagcagtgtcataattatcagctttgccaggactgcttctggaggggacacgctggaggcagtcacagcaatcaacatcagatgaaagagtacacctcctggaagagcccagctaagaaactgaccaacgcactgtcaaagtcccttagctgcgcctcaagtcgcgagcctctccacccaatgttccccgaccaacctgagaagcctctcaaccttgcccatattgttgatacatggccccctaggcctgtgacatctatgaacgacacattgttctcgcactctgtcccgtctagcggcagtccctttatcactcggtcctctcctccaaaagatagcgaagtagaacaaaacaagctgttggctagggcagctccggcctttctgaagggtaagggcattcaatacagtttgaacgtcgcagatagacttgcagacgagcacgtcctcattggactctacgtaaatatgctcagaaataatcccagctgcatgctggaatccagcaaccgactcgacgaggagcaccgactaattgctaggtacgcggccagacttgctgccgaatctagtagctctcagcccccacaacagaggagcgccccagatatttcgtttacaatcgacgctaataaacagcagcggcaattaatagctgagctagagaacaagaatcgcgaaatcctgcaggaaattcagcgcctgcgcctggaacacgaacaggccagccagcccaccccagaaaaggcccagcaaaatccaacactcctcgccgaactaaggctgctgaggcagcgcaaggacgagctcgagcagaggatgagtgccctccaggagagccgccgggagctgatggtgcaactggaaggtcttatgaagctgcttaagacacagggtgcgggctcgccccggagcagcccgtcgcatacaatatctagacccatcccaatgcctattcgcagtgccagtgcatgctcgactccaacacacacaccccaggacagcttgactggggtcggcggtgatgtgcaggaagcatttgctcagagctcgcgcaggaatctgcgcaacgacctgctcgtcgcagctgactcaattacaaacactatgtcatcgctggtgaaggagcttaactctgaggttggatctgagactgaatctaacgtcgatagcgaatttgcccggacacagttcgaggacctagtaccttcccccacttccgaaaaggcatttttagcccaaattcatgcgcgaaagcctgggtacatacattcaggggctacgacttctacgatgaggggcgatatggtgaccgaggatgctgatccttatgtgcaaccagaggacgaaaactatgaaaacgattccgtgaggcaactggagaacgagctgcaaatggaggaatatttgaagcagaaactgcaggacgaagcatatcaggttagcctgcaggggtag

SEQ ID NO: 117477 - DNA, 2235 bp, Artificial Sequence
  derived and/or modified sequence
atgattgaagattctgggaagaggggcaacaccatggccgagcggcggcagctgtttgctgagatgagggcccaggacctggaccgcatccggctgagcacctacagaacagcctgcaagctgcgctttgtgcagaagaagtgcaacctgcacctggtggacatctggaatgtgattgaggccctgcgggagaatgccctgaacaacctggaccccaacacagagctgaatgtgtcccggctggaggccgtgctgagcaccatcttctaccagctgaacaagaggatgcccaccacccaccagatccacgtggagcagagcatcagcctgctgctgaacttcctgctggccgcctttgatcctgagggccacggcaagatctctgtgtttgctgtgaagatggccctggccaccctgtgtggcggcaagatcatggacaagctgcgctacatcttctccatgatcagtgacagcagtggagtgatggtgtatggccgctatgaccagttcctgcgggaggtgctgaagctgcccacagctgtgtttgagggccccagctttggctacacagagcagagcgcccggagctgcttcagccagcagaagaaggtgaccctgaatggcttcctggacaccctgatgtctgaccccccaccccagtgcctggtgtggctgcccctgctgcaccggctggccaacgtggagaatgtgttccaccctgtggagtgcagctactgccacagcgagagcatgatgggcttccgctaccgctgccagcagtgccacaactaccagctgtgccaggactgcttctggaggggccacgccggcggcagccacagcaaccagcaccagatgaaggagtacacctcctggaagagccctgccaagaagctgaccaatgccctgagcaagagcctgagctgtgccagcagccgggagcccctgcaccccatgtttcctgaccagcctgagaagcccctgaacctggcccacatcgtgctggacaacatgccacccaggcctgtgacctccatgaatgacaccctcttcagccacagcgtgcccagcagcggcagccccttcatcaccaggagcagcccccccaaggacagcgaggtggagcagaacaagctgctggcccgggccgccccagccttcctgaagggcaagggcatccagtacagcctgaatgtggccgaccggctggctgatgaacatgtgctgattggcctgtatgtgaacatgctgaggaacaaccccagctgcatgctggagagcagcaaccggctggatgaggagcacaggctcatcgcccgctatgctgcccggctggccgctgagagcagcagcagccagcccccccagcagaggtctgccccagacatctccttcaccattgatgccaacaagcagcagaggcagctgattgctgagctggagaacaagaaccgggagatcctgcaggagatccagaggctgcggctggagcacgagcaggccagccagcccaccccagagaaggcccagcagaaccccaccctgctggccgagctgcggctgctgcggcagaggaaggatgagctggagcagaggatgtctgccctgcaggagagccggcgggagctgatggtgcagctggagggcctgatgaagctgctgaagacccagggcgccggcagccccaggagcagccccagccacaccatcagccggcccatccccatgcccatccgcagcgccagcgcctgcagcacccccacccacaccccccaggacagcctgactggagtgggcggagatgtgcaggaggcctttgcccagagcagcagaagaaacctgagaaatgacctgctggtggccgctgacagcatcaccaacaccatgagcagcctggtgaaggagctgaacagcgaggtgggcagcgagacagagagcaatgtggacagcgagtttgcccggacccagtttgaggacctggtgcccagccccaccagcgagaaggccttcctggcccagatccacgccaggaagccaggctacatccacagcggggccaccaccagcaccatgagaggagacatggtgacagaagatgctgacccctacgtgcagccagaagatgaaaattatgaaaatgattctgtgcggcagctggagaatgagctgcagatggaggagtacctgaagcagaagctgcaggatgaggcctaccaggtgtccctgcagggctag

SEQ ID NO: 117478 - DNA, 2232 bp, Artificial Sequence
  derived and/or modified sequence
atgattgaagattctgggaagaggggcaacaccatggccgagcggcggcagctgtttgctgagatgagggcccaggacctggaccgcatccggctgagcacctacagaacagcctgcaagctgcgctttgtgcagaagaagtgcaacctgcacctggtggacatctggaatgtgattgaggccctgcgggagaatgccctgaacaacctggaccccaacacagagctgaatgtgtcccggctggaggccgtgctgagcaccatcttctaccagctgaacaagaggatgcccaccacccaccagatccacgtggagcagagcatcagcctgctgctgaacttcctgctggccgcctttgatcctgagggccacggcaagatctctgtgtttgctgtgaagatggccctggccaccctgtgtggcggcaagatcatggacaagctgcgctacatcttctccatgatcagtgacagcagtggagtgatggtgtatggccgctatgaccagttcctgcgggaggtgctgaagctgcccacagctgtgtttgagggccccagctttggctacacagagcagagcgcccggagctgcttcagccagcagaagaaggtgaccctgaatggcttcctggacaccctgatgtctgaccccccaccccagtgcctggtgtggctgcccctgctgcaccggctggccaacgtggagaatgtgttccaccctgtggagtgcagctactgccacagcgagagcatgatgggcttccgctaccgctgccagcagtgccacaactaccagctgtgccaggactgcttctggaggggccacgccggcggcagccacagcaaccagcaccagatgaaggagtacacctcctggaagagccctgccaagaagctgaccaatgccctgagcaagagcctgagctgtgccagcagccgggagcccctgcaccccatgtttcctgaccagcctgagaagcccctgaacctggcccacatcgtggacacctggccacccaggcctgtgacctccatgaatgacaccctcttcagccacagcgtgcccagcagcggcagccccttcatcaccaggagcagcccccccaaggacagcgaggtggagcagaacaagctgctggcccgggccgccccagccttcctgaagggcaagggcatccagtacagcctgaatgtggccgaccggctggctgatgagcacgtgctgattggcctgtatgtgaacatgctgaggaacaaccccagctgcatgctggagagcagcaaccggctggatgaggagcaccggctgattgcccgctatgctgcccggctggccgctgagagcagcagcagccagcccccccagcagaggtctgccccagacatctccttcaccattgatgccaacaagcagcagaggcagctgattgctgagctggagaacaagaaccgggagatcctgcaggagatccagaggctgcggctggagcacgagcaggccagccagcccaccccagagaaggcccagcagaaccccaccctgctggccgagctgcggctgctgcggcagaggaaggatgagctggagcagaggatgtctgccctgcaggagagcagaagagagctgatggtgcagctggagggcctgatgaagctgctgaagacccagggcgccggcagccccaggagcagccccagccacaccatcagccggcccatccccatgcccatccgcagcgccagcgcctgcagcacccccacccacaccccccaggacagcctgactggagtgggcggagatgtgcaggaggcctttgcccagagcagcagaagaaacctgagaaatgacctgctggtggccgctgacagcatcaccaacaccatgagcagcctggtgaaggagctgaacagcgaggtgggcagcgagacagagagcaatgtggacagcgagtttgcccggacccagtttgaggacctggtgcccagccccaccagcgagaaggccttcctggcccagatccacgccaggaagccaggctacatccacagcggggccaccaccagcaccatgagaggagacatggtgacagaagatgctgacccctacgtgcagccagaagatgagaactatgaaaatgacagcgtgcggcagctggagaatgagctgcagatggaggagtacctgaagcagaagctgcaggatgaggcctaccaggtgtccctgcagggctag

SEQ ID NO: 117479 - DNA, 2232 bp, Artificial Sequence
  derived and/or modified sequence
atgattgaagattctgggaagaggggcaacaccatggccgagcggcggcagctgtttgctgagatgagggcccaggacctggaccgcatccggctgagcacctacagaacagcctgcaagctgcgctttgtgcagaagaagtgcaacctgcacctggtggacatctggaatgtgattgaggccctgcgggagaatgccctgaacaacctggaccccaacacagagctgaatgtgtcccggctggaggccgtgctgagcaccatcttctaccagctgaacaagaggatgcccaccacccaccagatccacgtggagcagagcatcagcctgctgctgaacttcctgctggccgcctttgatcctgagggccacggcaagatctctgtgtttgctgtgaagatggccctggccaccctgtgtggcggcaagatcatggacaagctgcgctacatcttctccatgatcagtgacagcagtggagtgatggtgtatggccgctatgaccagttcctgcgggaggtgctgaagctgcccacagctgtgtttgagggccccagctttggctacacagagcagagcgcccggagctgcttcagccagcagaagaaggtgaccctgaatggcttcctggacaccctgatgtctgaccccccaccccagtgcctggtgtggctgcccctgctgcaccggctggccaacgtggagaatgtgttccaccctgtggagtgcagctactgccacagcgagagcatgatgggcttccgctaccgctgccagcagtgccacaactaccagctgtgccaggactgcttctggaggggccacgccggcggcagccacagcaaccagcaccagatgaaggagtacacctcctggaagagccctgccaagaagctgaccaatgccctgagcaagagcctgagctgtgccagcagccgggagcccctgcaccccatgtttcctgaccagcctgagaagcccctgaacctggcccacatcgtgtgcttccggccccccaggcctgtgacctccatgaatgacaccctcttcagccacagcgtgcccagcagcggcagccccttcatcaccaggagcagcccccccaaggacagcgaggtggagcagaacaagctgctggcccgggccgccccagccttcctgaagggcaagggcatccagtacagcctgaatgtggccgaccggctggctgatgagcacgtgctgattggcctgtatgtgaacatgctgaggaacaaccccagctgcatgctggagagcagcaaccggctggatgaggagcaccggctgattgcccgctatgctgcccggctggccgctgagagcagcagcagccagcccccccagcagaggtctgccccagacatctccttcaccattgatgccaacaagcagcagaggcagctgattgctgagctggagaacaagaaccgggagatcctgcaggagatccagaggctgcggctggagcacgagcaggccagccagcccaccccagagaaggcccagcagaaccccaccctgctggccgagctgcggctgctgcggcagaggaaggatgagctggagcagaggatgtctgccctgcaggagagcagaagagagctgatggtgcagctggagggcctgatgaagctgctgaagacccagggcgccggcagccccaggagcagccccagccacaccatcagccggcccatccccatgcccatccgcagcgccagcgcctgcagcacccccacccacaccccccaggacagcctgactggagtgggcggagatgtgcaggaggcctttgcccagagcagcagaagaaacctgagaaatgacctgctggtggccgctgacagcatcaccaacaccatgagcagcctggtgaaggagctgaacagcgaggtgggcagcgagacagagagcaatgtggacagcgagtttgcccggacccagtttgaggacctggtgcccagccccaccagcgagaaggccttcctggcccagatccacgccaggaagccaggctacatccacagcggggccaccaccagcaccatgagaggagacatggtgacagaagatgctgacccctacgtgcagccagaagatgagaactatgaaaatgacagcgtgcggcagctggagaatgagctgcagatggaggagtacctgaagcagaagctgcaggatgaggcctaccaggtgtccctgcagggctag

SEQ ID NO: 117480 - DNA, 2235 bp, Artificial Sequence
  derived and/or modified sequence
atgatcgaggacagcggcaagcggggcaacaccatggccgagcggcgccaactgtttgccgagatgagggcccaagatttggatcgcattagactgtctacctacaggactgcttgtaaactgagattcgtgcagaagaagtgtaatctgcatctggtggacatatggaacgtgatcgaggccctgagagagaacgcccttaataatttagaccccaacaccgagctgaatgttagccgactagaagctgtgctcagcacgatcttctatcagctgaacaagcgaatgcctacaacccaccagattcacgtagaacagtctatctccctgttgctgaactttctcctggcagcctttgatcctgaaggccatgggaaaatctccgtcttcgcggtaaagatggctctggcaacactgtgcgggggcaaaattatggacaaactaaggtacattttcagcatgatctccgactcctccggggtaatggtttacgggaggtatgatcagtttctccgggaggtactgaagctccctaccgcagtgttcgaaggaccgtcatttggctatacagagcagagtgctcgtagttgcttcagccagcaaaaaaaggtaacactaaacggcttcctagacactctgatgtccgaccctcctcctcagtgcctggtttggttgccccttctgcatagactggccaacgtcgaaaatgtatttcacccagtcgaatgtagttattgtcacagtgaatccatgatggggtttcgctatcgttgccaacagtgccacaactaccagctatgtcaggattgcttttggaggggccatgctggcggtagccacagcaaccagcaccagatgaaggagtatacaagttggaaatcccccgcaaaaaaactgactaacgccctgtcaaaatcattgtcctgtgcatccagcagggaacctcttcaccccatgttccccgatcagcccgagaagccactgaaccttgcccacatagtactggacaatatgcctcctcgacccgtcacctcgatgaacgatactctgttcagccattcagtcccgagcagcgggtctccattcattacaagatcctccccccctaaagactccgaagtggaacagaataagctgctggctagggccgctccagcatttttgaaaggcaaagggattcagtactctctgaacgtggctgatcggctggcagatgaacatgtgctaattgggctgtatgtcaacatgctccggaacaatcctagctgcatgcttgagagttctaacaggctcgatgaggagcaccggctgatcgcacggtacgctgcaagactagctgcagagtcttcttcttcccaaccccctcaacaaaggtctgctcccgacatttcgttcacgatcgacgctaacaaacagcagagacagttgatcgcagagctcgagaataaaaatagggaaatcttacaagagattcagcgtctgcgacttgaacatgagcaggcttcgcagcctacacctgagaaagcccagcagaatccgacccttctcgctgaactaaggctgctgcgccagcggaaggacgagctggaacagcggatgtccgctctgcaagaaagtcgccgcgagttaatggtgcagctcgagggactcatgaagctgctgaaaacccagggagccggctcaccaagatcgtcccctagccacacaatcagtcggcctatcccaatgcccattaggtccgcctcggcgtgctctaccccaactcatacacctcaagactctctgactggcgtcggcggcgacgtgcaggaggcattcgcccaaagcagtcgccggaatttgaggaacgacctcctggtggcggctgattccatcacaaacaccatgagtagcttagtgaaagaacttaacagcgaggtaggctccgaaacagagtctaacgtggactcggaattcgcgcggacccaatttgaggatctggtgccatctccgactagcgagaaagcattcctggctcagattcatgctagaaaaccaggatacattcacagtggcgccaccacctcgacaatgcgtggcgatatggtcaccgaagatgctgatccctatgtgcagcccgaggacgagaactacgagaacgacagcgtacgtcagcttgagaatgaactgcagatggaggaatatctgaagcagaaactgcaagatgaggcttatcaggtctccctccaggggtag

SEQ ID NO: 117481 - DNA, 2232 bp, Artificial Sequence
  derived and/or modified sequence
atgatcgaggacagcggcaagcggggcaacaccatggccgagcggcggcagctgttcgcagaaatgagagcacaggatctagacagaataaggttgtccacatacagaaccgcctgtaaactgcgctttgtgcaaaaaaagtgtaatctccacttagtggacatatggaacgtgattgaggctctgagggagaatgctctgaacaatctggacccgaacaccgaacttaacgtgagccggctggaggcagttctgagcactattttttaccagctgaacaaacgaatgcccactacccaccagattcatgttgaacagagcatcagtctgctgctgaacttcttgctcgcagcatttgacccagaaggccatgggaagatatctgtttttgcggtcaagatggccctggcaactctgtgtgggggaaaaatcatggacaagctcaggtacatctttagcatgattagcgactcatctggagtgatggtttacggtaggtacgaccagtttttgcgcgaggtccttaagctgcccactgctgtgttcgaaggcccatcattcggttatactgaacagtccgccagatcttgtttctctcagcagaaaaaagtcactttgaacggcttcttagacactctgatgtctgatccccccccacagtgtctggtgtggttgccattgctccacagattggcgaatgtcgaaaatgtgttccatccggtggagtgcagctattgtcattccgagagtatgatgggctttagataccgatgtcagcagtgccataattatcagctgtgccaggattgcttctggcgcgggcacgcaggtgggtcccacagcaatcagcaccagatgaaggagtacacaagttggaagtccccagctaaaaagcttacaaacgccctcagcaagtctctctcgtgtgccagcagccgcgaaccactccatcctatgtttcctgatcaacccgagaaaccacttaacctggcccatattgtcgacacttggcctccaaggcccgtgactagcatgaacgatacacttttcagccatagcgttccatcctcggggtctccattcatcacacgtagttctccccctaaagattctgaggttgagcaaaataagctcctggcacgcgcggctcccgcattcctgaagggaaaggggatccaatacagcctgaatgtcgctgacaggctggctgatgagcacgtcctgatcgggctgtatgtcaacatgcttcggaataatccaagctgtatgctcgagagtagcaatcggttggacgaagaacataggctaattgcccggtatgctgcaaggcttgctgccgagtctagcagctcacaaccacctcagcagaggtctgctccagatatttcttttacaatagacgcaaacaagcagcagcgacagctgatcgccgagctcgagaataagaatcgggagattctgcaggagattcaacggctgcgtctcgaacatgaacaagcttcgcaaccgactccggagaaagcacaacagaaccctacattgttggcggagctaaggctgctgcggcagcgcaaggatgaactggagcagagaatgagcgccctgcaagagtctaggcgagagctcatggtccaactggagggtttgatgaaactgctgaagactcaaggggccgggtccccacgaagcagccctagccatacgatttcccggccgattcccatgccgatacgttccgcttcagcttgtagcacaccaacgcatacaccacaggactccctgacaggagttggcggcgatgtgcaggaagcattcgctcaaagctcaagacgcaacctacggaacgacctgctggtggccgccgattctatcacaaatacgatgagcagtttggtaaaagaactcaatagtgaggtcggatctgaaactgaaagtaacgtcgacagcgaattcgcccggacccagttcgaggatctcgttccgagtccaacttccgaaaaggcttttctcgctcaaatccacgctcggaagccaggatatattcacagtggagccaccacttccaccatgcgcggggatatggtgactgaggacgccgatccatacgtccaaccagaggacgaaaactatgaaaatgactctgttaggcagttggagaacgagctgcagatggaagagtatcttaaacagaagctgcaggatgaggcataccaggtgagcctgcagggttag

SEQ ID NO: 117482 - DNA, 2232 bp, Artificial Sequence
  derived and/or modified sequence
atgatcgaggacagcggcaagcggggcaacaccatggccgagcggcgacagctgtttgcggagatgcgtgcccaggacttggacagaatccggctctccacttacaggaccgcctgcaaattgaggttcgtgcaaaaaaagtgtaacctgcacctggtcgacatctggaacgtcatagaagctctcagagagaacgcactgaataatcttgatccaaataccgaactgaacgtgagtcggttagaggccgtgctctccactatcttttaccagcttaataagcgaatgccaactacccatcaaatccacgtggagcagagcatcagcttgcttcttaactttttgctggctgcatttgaccccgaagggcacggcaagatttccgtgtttgcggttaagatggcgcttgctacgctgtgcggcggtaagattatggataagctcaggtacattttttccatgatttctgatagttcgggggttatggtgtacggccgatatgaccagtttctgcgagaggtgttgaaattgccaactgccgtgttcgagggcccaagctttggttacacggaacagtccgctcgctcgtgtttcagtcagcaaaagaaggtcacattaaacgggttcctggatacccttatgagcgatccacctccgcagtgcctagtatggctccccctcctacacagactggccaacgttgaaaatgtgttccatccagtcgagtgctcctactgtcacagcgagtctatgatgggatttcgatataggtgtcagcagtgccacaattaccaattatgccaggactgtttctggcgggggcacgctgggggatctcactctaaccagcatcagatgaaggaatatacctcatggaaatcccctgctaaaaagctgacaaacgccttgtctaaaagcctctcttgtgcaagttccagagaacctttacaccctatgtttccggatcagcccgaaaaacccctgaatcttgcgcacatcgtctgcttccgtccacccaggccggtgacctccatgaatgacacacttttttcccactcggtgcccagctccggttccccatttataacgaggagtagccctccaaaggactcggaggtggaacagaacaagctgttggcccgagcggctccagccttcttgaaggggaagggcatccaatactctctcaatgtggctgaccgcttggctgatgaacatgtgctaataggactttacgtaaatatgttgaggaataacccctcttgtatgttggagtcctctaatcgcctggacgaggaacacaggttgatcgcccggtatgccgctagactggccgctgaatctagcagttctcagcctccacagcagcggagcgctcccgatatctcgttcacaatcgacgctaataaacaacagcgacaattgattgcggagttagaaaacaaaaatagggaaatcctgcaggaaatccaacgactcaggcttgaacacgagcaggcctcccagcctacgcctgaaaaagcacagcagaaccccacgttgcttgctgagctcagactgctgcgacaacgaaaggatgaacttgagcagcggatgagcgcattgcaagaatcccggcgagagttaatggttcagttagaaggtctcatgaaactgctaaagacacagggcgcagggagcccccgaagctccccttcacatacaattagcagaccaattcccatgcctatccgtagtgcaagcgcctgctccacacccactcacaccccccaggatagcttaaccggcgtgggcggtgacgtgcaggaagcctttgcccagtcttccaggcggaacttgaggaacgaccttctggtcgccgctgatagcattactaacactatgtcaagtttggttaaggagcttaactcagaggtcggttccgaaactgaatctaacgtggacagtgaatttgctcgcacccaattcgaggacctggttccttcccccacttctgagaaggcttttctggcccaaatacatgcccgcaagcccggttacattcacagcggtgcaaccaccagtactatgcgcggggacatggtgacagaggatgctgatccctatgttcaacccgaggatgagaattatgagaatgactccgtgcggcaactggagaatgagctccagatggaggagtacttaaaacagaagttacaggatgaggcataccaggtgagtctccagggctag

SEQ ID NO: 117483 - DNA, 2232 bp, Artificial Sequence
  derived and/or modified sequence
atgatcgaggacagcggcaagcggggcaacaccatggccgagcggaggcagctgttcgcagaaatgagagcccaagatttagatcggatcagactctcaacgtatcgcaccgcatgcaaactccgtttcgtacaaaagaagtgtaacctgcacctggttgacatatggaatgtgatcgaagccctgagggagaatgctttaaataatcttgatcctaatactgaactgaacgtgagtaggttggaggccgtgctttcaaccatcttttaccaactcaataaacgtatgcccaccactcaccagatccacgttgaacagagtatctctctcttactcaatttccttttggccgcgtttgaccccgaaggacacggtaagatcagcgtgtttgctgtaaaaatggctcttgccacactctgtgggggaaagattatggacaaactgcgctacatattttccatgatcagtgacagttccggtgttatggtctatggcagatatgaccagtttctgagggaggtccttaagttgcccacagccgtgttcgagggaccttctttcggctacacagaacagtcagctcggtcctgcttttctcaacagaaaaaggtcacactcaatggatttctggatacacttatgagcgaccctccgccccaatgtctagtgtggctgccactgcttcataggctggcgaacgtcgagaacgtgtttcatccagttgagtgcagttactgtcactccgagagcatgatgggattccgctaccggtgccagcagtgccacaattatcagctgtgtcaagactgcttttggaggggtcatgccggaggttcccattcaaaccagcatcaaatgaaagagtatacctcctggaaatcacccgcaaaaaaactcacaaacgctttgtctaaatcattatcttgtgctagcagtcgggagccactccaccccatgttcccagatcaaccggagaagccactcaatctggctcacatagtagatacatggccccctcgcccagtgactagtatgaacgacaccctgttttcccactccgtgccgtctagcggctccccatttatcacccggtccagcccaccaaaagattctgaggtagaacagaacaagctgttggcccgggcagcccctgcttttctgaagggaaagggcatccagtattctttgaacgtggcagatcgtctcgcggacgaacacgtcttgatcggtctctatgtgaatatgttgcggaacaacccctcctgtatgctggaatcttcaaatcgactggacgaggagcatcggctgattgcgcgatacgctgcgcgccttgccgccgagtcatcatcttcccaacctccacagcagcggtcagctcccgatatcagcttcacaattgatgcaaacaaacagcaacgtcaattaatcgccgagctcgagaacaagaaccgggagattttgcaagaaatccagcgactccggctggagcatgagcaggcaagtcagcccacccccgagaaagctcagcagaatccgactctactggctgaattaagactgctgaggcagaggaaggacgaactggagcagaggatgtctgcccttcaggagagccgccgcgagctgatggtccagctcgagggcctcatgaagctgctgaaaacacaaggagcgggctcaccaagatccagcccaagccatacaatcagtcgacccattcccatgcctatccgctccgccagtgcctgttcaactcccacacacaccccgcaggattctctgacaggcgtggggggtgacgtacaggaagccttcgcccagtcttcacgccggaatctccgaaacgatctcctcgtcgccgcagacagcattacaaacacaatgagctctctggtcaaggaactgaattcggaggtaggttccgaaaccgaatctaatgtggattctgagtttgcccgtacccagttcgaggatctagtaccgagcccgacttcagaaaaagcttttctggcccagatccatgctcgtaaacctggttacattcattcaggagctaccacatctaccatgaggggcgacatggtaactgaggatgctgatccctacgtccaacccgaagacgaaaattatgaaaatgacagcgtgcgtcagctggagaatgaacttcagatggaggagtacctgaagcaaaagttgcaggacgaggcttaccaggtgagcttgcagggttag

SEQ ID NO: 117484 - DNA, 2235 bp, Artificial Sequence
  derived and/or modified sequence
atgattgaggacagcggcaaacggggaaatacaatggccgaacgcagacaactgttcgccgagatgcgggctcaggacttggaccggattagactttccacctacagaacggcttgcaaattaagatttgttcagaagaaatgcaatctgcatttggtggacatttggaacgtgatcgaggccctgagagagaacgcactgaataacctcgatcccaataccgagcttaacgtgtcccgtctggaggctgtcctgagcaccatattttaccagctgaacaagaggatgccaactacgcatcagatccacgtggaacaaagcatttcattgcttttgaacttcctcctcgccgctttcgacccagagggacatgggaagatcagcgtctttgcggtcaagatggcccttgccactctctgcgggggaaagataatggacaagctccgctacatattctctatgatatccgatagctcaggcgtcatggtttatggcaggtacgatcagtttctgcgggaggtgttgaagctaccaacagcggtgtttgaagggccaagcttcggatacacagagcagagcgccagatcttgcttcagccagcagaagaaggtgacattgaatggttttttagatactctcatgtccgatcccccacctcagtgcctggtgtggcttcccctactccataggttagcgaacgtggagaacgtgttccaccctgtagaatgttcttactgtcattcagaatccatgatgggtttccgttatagatgtcagcaatgtcataattaccagctctgccaggactgcttttggagaggacacgctggcggatcacatagcaaccagcaccagatgaaggagtataccagttggaaatcccctgctaagaagcttacgaacgccttatctaagagcctctcgtgcgccagctccagggaacctctacatccgatgtttccagaccaaccagagaaacccctgaatctggctcatatcgtcctggataatatgccccctcgcccagtgaccagtatgaacgacacccttttttcacacagcgtgccaagttccgggtcaccatttataacccggtccagcccccctaaagactctgaggtcgaacagaacaagctccttgcccgagccgcaccggctttcctgaaaggaaagggaattcagtactccctgaacgtcgcagatcgcctcgccgacgaacatgtacttatcggactatacgtcaatatgctccggaataatcctagctgtatgctggaaagctctaatcgcctggacgaagaacatagactgattgccagatacgccgcacggctcgccgctgagtcgtccagcagccagcctccccagcaacgtagcgcgccagacattagctttaccatcgatgcaaataagcaacagcgtcagctgattgccgaattggaaaataaaaaccgtgagatcctccaggagatccagaggctccgactggagcacgaacaggcatcacaaccaacgccagagaaagcccagcagaacccaaccttgctagcagaattaagattgttaaggcagagaaaggacgaattagaacagcgcatgtccgctctccaggaatcacgtagagagctgatggtccagctggaaggcctgatgaagctcctgaagacccagggggctggttcccctcgcagctcgcctagtcatacgatcagccgccctataccgatgcctattcggagtgcatcggcctgttccacccccacccataccccccaggatagtctaaccggggtagggggagatgtgcaggaagccttcgcacagtcatcaaggaggaacctccggaacgacctgctggtggcggcagattccattaccaacaccatgagctcactggtcaaagagctgaatagcgaggtcggcagtgagactgagagcaatgtcgactcagagtttgccagaacccaatttgaagatctcgtgccgagtcctaccagcgagaaggcttttctagcccagatccacgcccgaaaaccaggatacatacactcgggggcaacaaccagtacaatgagaggagacatggtcacagaggacgccgacccatacgtccagcctgaagacgagaactacgaaaatgatagtgtgcgccagcttgagaatgaactgcaaatggaagaatatctaaagcagaaactgcaggacgaggcataccaggtaagcttgcaagggtag

SEQ ID NO: 117485 - DNA, 2232 bp, Artificial Sequence
  derived and/or modified sequence
atgattgaagactctggtaaaagggggaataccatggcagaacggcgtcagctgtttgccgagatgcgcgctcaagatctggatcggatacgcttgtcaacctatagaaccgcctgtaagctacggtttgtgcagaagaagtgcaacctgcacctggtcgacatttggaatgtgattgaggcgcttagagagaacgcccttaacaatctggatcccaacactgagctcaacgtgtccaggctcgaggccgtactgagtacaatcttctaccaacttaacaagcggatgccgaccacccaccagattcacgtcgagcaatccatttcactgttgctaaactttttgctggccgcttttgatcctgaggggcatgggaagataagtgtgttcgcagttaagatggccctggcaaccctctgcgggggaaagataatggacaagctgagatatattttcagcatgatttcggactcatccggagtcatggtatatggtagatatgaccaatttctgagagaagtgctgaaactgcctactgctgtttttgaaggcccatcctttgggtatactgaacagagcgcgagaagctgcttctcgcaacagaaaaaagtgactctaaacggcttcctcgataccctgatgtcagatccacccccacagtgtctggtctggcttccacttctccatagactggcgaatgtggagaacgtctttcatccggttgaatgttcatattgtcactcggagagcatgatggggttccggtatcggtgccagcagtgtcacaactatcagctgtgtcaagattgcttttggagggggcatgctgggggaagccacagtaaccagcatcagatgaaagagtacacaagctggaagagtccggctaagaagctgaccaatgcactgtccaaaagcctttcgtgtgcttcaagtcgggagccactgcaccctatgttccctgaccagccggagaagccactgaacctggctcacatcgttgatacatggccaccgagacctgtgacctctatgaatgacacactgttctctcactccgtaccatcttctgggtccccatttataaccaggtcatctccaccaaaagattccgaggtggagcagaacaagctgctggcacgcgctgcccctgcctttttgaagggtaaagggatccagtattcacttaacgtcgcagaccgcctggccgacgagcatgtgcttattggattatacgtcaacatgttgcggaataacccttcctgcatgttggagagttctaaccgcctcgatgaagaacatcgactcatcgcccgttatgcagctaggctggctgccgagtcgagtagctcgcagccgccacaacagcgctcagcccctgacatctccttcacaatcgacgctaacaaacagcaacgacaactgattgccgaattggaaaataaaaatcgcgagatccttcaggagatccaaaggttgaggctggaacacgagcaagccagccagcctactcccgaaaaagcgcagcaaaaccccacgctcctggctgagctaaggctcctgcgacagagaaaggacgagctcgagcagcgcatgtctgctttacaggagtcgaggagggagctgatggtgcagttggagggcctaatgaagctcctcaaaactcagggagccggatctccacgctcctcaccttctcacactatctcgagacctatccctatgcctatcagatctgcttcagcttgctcaacacccacacatactccccaggacagtctgacaggggtaggtggggatgttcaggaagcattcgcccagagttctaggaggaatctccgcaatgatttactggtcgctgcggactcaatcaccaacacgatgagtagcctggttaaggagttgaacagtgaggttggatccgagactgagtcaaacgtggattccgaattcgcaagaactcagtttgaagacctggtgcccagtcccacttctgaaaaggcatttctcgcgcagattcatgcaagaaagccagggtacattcactcaggcgcaaccacctcaacaatgcgaggcgacatggttacggaagacgctgacccttatgttcaacccgaagatgagaattacgagaacgattctgtcagacagctagaaaatgagctgcagatggaggaatatctcaagcagaagctgcaggatgaggcctaccaggtcagtttacagggatag

SEQ ID NO: 117486 - DNA, 2232 bp, Artificial Sequence
  derived and/or modified sequence
atgattgaggactctggtaagcggggaaataccatggcagagcgcaggcaactgttcgctgagatgagggcacaagatctcgatcggatacggttgtctacataccgcactgcatgcaaactgcggttcgtgcagaagaagtgcaacttacatctcgttgatatatggaacgtgatcgaggcgctaagggagaatgctcttaataacctcgaccctaatacagagctgaacgtgagtcgtctggaagctgttctgtcgaccatattttatcagctcaacaaacggatgcccactactcaccagatccatgtagagcagtcgatttctcttctgttaaattttttgttagctgcttttgaccctgaaggtcacggaaaaatcagtgtcttcgctgtaaagatggcattggctactctatgcggcggaaagatcatggataagcttaggtatatcttttcgatgataagtgatagttctggggtgatggtctacggacggtatgaccagttcctccgggaagtgttgaaactgcccacagctgtattcgaagggccaagttttggctacaccgagcagagcgcaagatcgtgcttctctcagcagaaaaaggtcaccctcaacggttttctggacaccttgatgtccgatcctcctccccaatgccttgtttggctgcccttgttgcaccgcctggctaacgtggagaatgtatttcatccggtggagtgctcatattgccactcagagtccatgatgggattccgttaccgatgccaacaatgccacaattaccagctgtgccaggattgtttttggagaggacatgcgggaggatcgcactcgaaccaacaccagatgaaggagtatacatcctggaaaagccctgcaaaaaagcttaccaacgcactcagtaagagtctctcctgcgctagcagccgggaacccttgcaccctatgttccctgaccagcccgagaaacccttgaacctcgcccacatcgtttgctttagacctccccgacccgtaacctcaatgaacgacaccctcttttcacattctgtaccctcttccgggagtccatttattaccagaagtagtcccccaaaagattccgaagtcgagcaaaataagcttttagccagggcagcaccagccttcctcaagggcaagggcattcagtattcccttaatgtggcagataggctagccgacgagcacgtgctgatcggcttgtatgtgaacatgctcagaaacaacccctcatgtatgctagagagctcaaaccgcctggacgaggaacaccgcctgattgcacgatatgccgctcgactcgccgctgaaagctcatctagccagcccccacagcagagatcagccccagacattagctttacaatcgacgctaataaacagcaacgccaactgatcgccgagctcgaaaacaaaaaccgagagatcctgcaggaaatccagaggctccgcctggaacatgagcaggcatctcagcccactccagaaaaagcgcagcagaaccccacccttcttgccgagctgcgcctgttgagacagcgtaaggacgagctcgagcaacggatgagcgcactgcaagaatctcgccgtgaactgatggtccagctggaagggctgatgaagctgctcaagacgcagggcgctggctcacctcgatcttcaccatcacatactatcagcaggccaattccaatgcctattcgcagtgcttccgcttgctccacaccaacacatactccccaggattctctaaccggggtgggaggtgacgtccaggaggccttcgcccagagctccagaagaaacctaagaaacgacctgctagtcgccgcagattctataacaaatactatgtcgagcctagtgaaggaactgaattcggaggtgggctccgaaaccgagagtaacgtcgattccgaatttgcccgaacacagttcgaggatctcgtgccatcgccaactagcgaaaaagcttttctggctcaaatccatgccagaaagcccggatacatccacagtggtgccaccacctctactatgcggggagacatggttaccgaggacgctgatccttatgtgcaaccagaagatgagaattacgaaaatgattccgtcaggcagctcgaaaatgaactccagatggaagaatacttgaagcaaaagctgcaggacgaggcgtatcaggtgagtctccagggctag

SEQ ID NO: 117487 - DNA, 2232 bp, Artificial Sequence
  derived and/or modified sequence
atgatcgaagattctggtaagagggggaatactatggctgaaaggagacagttgtttgccgagatgagggcccaagatctggaccgcatcagacttagcacgtatagaactgcatgcaaactgcggttcgtgcagaagaagtgcaatttgcacctagtcgatatttggaacgtgatcgaagctttgagagagaatgcacttaataacctggatcccaacacagagttaaacgtgagcagattggaagctgtgctgtcgaccattttctaccagctgaacaagcgcatgccgaccacacaccagattcatgttgagcagtcgattagcttactgctaaactttcttctcgccgcttttgaccccgaaggacacgggaaaatcagcgtcttcgctgtgaagatggctctggccacactgtgtggcggaaaaattatggataagctgcgatacattttctctatgatctccgacagcagtggcgttatggtatatggtcgatatgaccagtttctgcgggaagtccttaagttgcccacagccgtctttgagggtccaagcttcggatacaccgaacaaagtgccaggtcttgcttctcgcaacagaagaaggtgaccctgaacggattccttgacacactcatgtctgaccccccaccacagtgtctcgtgtggctcccactcttgcacagactggccaacgtggaaaacgttttccacccagtggagtgtagctattgccactctgagagtatgatgggatttagataccggtgtcagcagtgtcataattatcagttgtgtcaggattgtttctggcggggtcacgccggtgggagtcactccaaccagcatcagatgaaagagtacacttcttggaagagtcctgccaagaagctgacaaacgctctctctaagtccctatcttgcgcaagttccagagagcccttacatccaatgttccccgaccagcccgagaagcctctgaatttggcccatatcgtggatacttggcctcctagaccagtcacctcaatgaatgacaccttattctcccactccgtcccatctagcggttccccttttatcacacggagctcacccccaaaagactccgaggtggaacagaataagctcctcgcgagggctgcacctgccttcttaaaaggaaaagggatacagtattctctgaacgttgcagaccgcctggccgacgaacatgtgttgatcggcctgtacgtaaacatgctgagaaacaatccaagctgcatgctggaatcaagcaataggctggacgaagagcatcgattgatagcccgatacgcggctcggctcgctgctgagtcaagctcaagccagccacctcagcaacgctcagccccagatatcagcttcacaatcgacgcgaataagcagcagagacaactgatcgccgagctggaaaataaaaaccgcgagattttgcaggagatccagcgccttaggctggagcatgaacaagccagccagcctacccccgagaaagcacaacagaaccccacattactcgcagaattgcggctcctacggcagagaaaagatgagctcgaacagagaatgtctgcactgcaggaaagtagacgggagctgatggttcaacttgagggccttatgaagttactgaagacacaaggcgcagggtcccccagaagttcccccagtcataccatctcaagacccattcctatgcctattcgttccgcctctgcatgcagcacaccaacccataccccacaggactccctgaccggcgtgggaggcgatgtccaggaggcattcgcgcagtcttctcgcaggaacctgcggaacgacttactggtggcagctgactctataaccaatacgatgtcctctctggtcaaggagcttaactctgaggtaggctcagagacagaatccaatgtggattctgagtttgctagaactcagtttgaagatctcgtaccatcaccaacaagcgagaaggcgttcctggcccagatccatgcacggaagcccggatacattcactccggcgcaaccacatcgaccatgcgcggtgacatggtgaccgaagacgccgatccctacgttcaaccagaggacgagaattacgagaatgacagcgttcgacaactggagaatgagctccagatggaggagtacctgaagcagaaactgcaggacgaagcttaccaggttagccttcagggatag

SEQ ID NO: 117488 - DNA, 2235 bp, Artificial Sequence
  derived and/or modified sequence
atgatcgaggacagcggcaagagaggcaacaccatggccgagagaagacagctgttcgccgagatgagagcccaggacctggacagaatcagactgagcacctacagaaccgcctgcaagctgagattcgtgcagaagaagtgcaacctgcacctggtggacatctggaacgtgatcgaggccctgagagagaacgccctgaacaacctggaccccaacaccgagctgaacgtgagcagactggaggccgtgctgagcaccatcttctaccagctgaacaagagaatgcccaccacccaccagatccacgtggagcagagcatcagcctgctgctgaacttcctgctggccgccttcgaccccgagggccacggcaagatcagcgtgttcgccgtgaagatggccctggccaccctgtgcggcggcaagatcatggacaagctgagatacatcttcagcatgatcagcgacagcagcggcgtgatggtgtacggcagatacgaccagttcctgagagaggtgctgaagctgcccaccgccgtgttcgagggccccagcttcggctacaccgagcagagcgccagaagctgcttcagccagcagaagaaggtgaccctgaacggcttcctggacaccctgatgagcgacccccccccccagtgcctggtgtggctgcccctgctgcacagactggccaacgtggagaacgtgttccaccccgtggagtgcagctactgccacagcgagagcatgatgggcttcagatacagatgccagcagtgccacaactaccagctgtgccaggactgcttctggagaggccacgccggcggcagccacagcaaccagcaccagatgaaggagtacaccagctggaagagccccgccaagaagctgaccaacgccctgagcaagagcctgagctgcgccagcagcagagagcccctgcaccccatgttccccgaccagcccgagaagcccctgaacctggcccacatcgtgctggacaacatgccccccagacccgtgaccagcatgaacgacaccctgttcagccacagcgtgcccagcagcggcagccccttcatcaccagaagcagcccccccaaggacagcgaggtggagcagaacaagctgctggccagagccgcccccgccttcctgaagggcaagggcatccagtacagcctgaacgtggccgacagactggccgacgagcacgtgctgatcggcctgtacgtgaacatgctgagaaacaaccccagctgcatgctggagagcagcaacagactggacgaggagcacagactgatcgccagatacgccgccagactggccgccgagagcagcagcagccagcccccccagcagagaagcgcccccgacatcagcttcaccatcgacgccaacaagcagcagagacagctgatcgccgagctggagaacaagaacagagagatcctgcaggagatccagagactgagactggagcacgagcaggccagccagcccacccccgagaaggcccagcagaaccccaccctgctggccgagctgagactgctgagacagagaaaggacgagctggagcagagaatgagcgccctgcaggagagcagaagagagctgatggtgcagctggagggcctgatgaagctgctgaagacccagggcgccggcagccccagaagcagccccagccacaccatcagcagacccatccccatgcccatcagaagcgccagcgcctgcagcacccccacccacaccccccaggacagcctgaccggcgtgggcggcgacgtgcaggaggccttcgcccagagcagcagaagaaacctgagaaacgacctgctggtggccgccgacagcatcaccaacaccatgagcagcctggtgaaggagctgaacagcgaggtgggcagcgagaccgagagcaacgtggacagcgagttcgccagaacccagttcgaggacctggtgcccagccccaccagcgagaaggccttcctggcccagatccacgccagaaagcccggctacatccacagcggcgccaccaccagcaccatgagaggcgacatggtgaccgaggacgccgacccctacgtgcagcccgaggacgagaactacgagaacgacagcgtgagacagctggagaacgagctgcagatggaggagtacctgaagcagaagctgcaggacgaggcctaccaggtgagcctgcagggctag

SEQ ID NO: 117489 - DNA, 2232 bp, Artificial Sequence
  derived and/or modified sequence
atgatcgaggacagcggcaagagaggcaacaccatggccgagagaagacagctgttcgccgagatgagagcccaggacctggacagaatcagactgagcacctacagaaccgcctgcaagctgagattcgtgcagaagaagtgcaacctgcacctggtggacatctggaacgtgatcgaggccctgagagagaacgccctgaacaacctggaccccaacaccgagctgaacgtgagcagactggaggccgtgctgagcaccatcttctaccagctgaacaagagaatgcccaccacccaccagatccacgtggagcagagcatcagcctgctgctgaacttcctgctggccgccttcgaccccgagggccacggcaagatcagcgtgttcgccgtgaagatggccctggccaccctgtgcggcggcaagatcatggacaagctgagatacatcttcagcatgatcagcgacagcagcggcgtgatggtgtacggcagatacgaccagttcctgagagaggtgctgaagctgcccaccgccgtgttcgagggccccagcttcggctacaccgagcagagcgccagaagctgcttcagccagcagaagaaggtgaccctgaacggcttcctggacaccctgatgagcgacccccccccccagtgcctggtgtggctgcccctgctgcacagactggccaacgtggagaacgtgttccaccccgtggagtgcagctactgccacagcgagagcatgatgggcttcagatacagatgccagcagtgccacaactaccagctgtgccaggactgcttctggagaggccacgccggcggcagccacagcaaccagcaccagatgaaggagtacaccagctggaagagccccgccaagaagctgaccaacgccctgagcaagagcctgagctgcgccagcagcagagagcccctgcaccccatgttccccgaccagcccgagaagcccctgaacctggcccacatcgtggacacctggccccccagacccgtgaccagcatgaacgacaccctgttcagccacagcgtgcccagcagcggcagccccttcatcaccagaagcagcccccccaaggacagcgaggtggagcagaacaagctgctggccagagccgcccccgccttcctgaagggcaagggcatccagtacagcctgaacgtggccgacagactggccgacgagcacgtgctgatcggcctgtacgtgaacatgctgagaaacaaccccagctgcatgctggagagcagcaacagactggacgaggagcacagactgatcgccagatacgccgccagactggccgccgagagcagcagcagccagcccccccagcagagaagcgcccccgacatcagcttcaccatcgacgccaacaagcagcagagacagctgatcgccgagctggagaacaagaacagagagatcctgcaggagatccagagactgagactggagcacgagcaggccagccagcccacccccgagaaggcccagcagaaccccaccctgctggccgagctgagactgctgagacagagaaaggacgagctggagcagagaatgagcgccctgcaggagagcagaagagagctgatggtgcagctggagggcctgatgaagctgctgaagacccagggcgccggcagccccagaagcagccccagccacaccatcagcagacccatccccatgcccatcagaagcgccagcgcctgcagcacccccacccacaccccccaggacagcctgaccggcgtgggcggcgacgtgcaggaggccttcgcccagagcagcagaagaaacctgagaaacgacctgctggtggccgccgacagcatcaccaacaccatgagcagcctggtgaaggagctgaacagcgaggtgggcagcgagaccgagagcaacgtggacagcgagttcgccagaacccagttcgaggacctggtgcccagccccaccagcgagaaggccttcctggcccagatccacgccagaaagcccggctacatccacagcggcgccaccaccagcaccatgagaggcgacatggtgaccgaggacgccgacccctacgtgcagcccgaggacgagaactacgagaacgacagcgtgagacagctggagaacgagctgcagatggaggagtacctgaagcagaagctgcaggacgaggcctaccaggtgagcctgcagggctag

SEQ ID NO: 117490 - DNA, 2232 bp, Artificial Sequence
  derived and/or modified sequence
atgatcgaggacagcggcaagagaggcaacaccatggccgagagaagacagctgttcgccgagatgagagcccaggacctggacagaatcagactgagcacctacagaaccgcctgcaagctgagattcgtgcagaagaagtgcaacctgcacctggtggacatctggaacgtgatcgaggccctgagagagaacgccctgaacaacctggaccccaacaccgagctgaacgtgagcagactggaggccgtgctgagcaccatcttctaccagctgaacaagagaatgcccaccacccaccagatccacgtggagcagagcatcagcctgctgctgaacttcctgctggccgccttcgaccccgagggccacggcaagatcagcgtgttcgccgtgaagatggccctggccaccctgtgcggcggcaagatcatggacaagctgagatacatcttcagcatgatcagcgacagcagcggcgtgatggtgtacggcagatacgaccagttcctgagagaggtgctgaagctgcccaccgccgtgttcgagggccccagcttcggctacaccgagcagagcgccagaagctgcttcagccagcagaagaaggtgaccctgaacggcttcctggacaccctgatgagcgacccccccccccagtgcctggtgtggctgcccctgctgcacagactggccaacgtggagaacgtgttccaccccgtggagtgcagctactgccacagcgagagcatgatgggcttcagatacagatgccagcagtgccacaactaccagctgtgccaggactgcttctggagaggccacgccggcggcagccacagcaaccagcaccagatgaaggagtacaccagctggaagagccccgccaagaagctgaccaacgccctgagcaagagcctgagctgcgccagcagcagagagcccctgcaccccatgttccccgaccagcccgagaagcccctgaacctggcccacatcgtgtgcttcagaccccccagacccgtgaccagcatgaacgacaccctgttcagccacagcgtgcccagcagcggcagccccttcatcaccagaagcagcccccccaaggacagcgaggtggagcagaacaagctgctggccagagccgcccccgccttcctgaagggcaagggcatccagtacagcctgaacgtggccgacagactggccgacgagcacgtgctgatcggcctgtacgtgaacatgctgagaaacaaccccagctgcatgctggagagcagcaacagactggacgaggagcacagactgatcgccagatacgccgccagactggccgccgagagcagcagcagccagcccccccagcagagaagcgcccccgacatcagcttcaccatcgacgccaacaagcagcagagacagctgatcgccgagctggagaacaagaacagagagatcctgcaggagatccagagactgagactggagcacgagcaggccagccagcccacccccgagaaggcccagcagaaccccaccctgctggccgagctgagactgctgagacagagaaaggacgagctggagcagagaatgagcgccctgcaggagagcagaagagagctgatggtgcagctggagggcctgatgaagctgctgaagacccagggcgccggcagccccagaagcagccccagccacaccatcagcagacccatccccatgcccatcagaagcgccagcgcctgcagcacccccacccacaccccccaggacagcctgaccggcgtgggcggcgacgtgcaggaggccttcgcccagagcagcagaagaaacctgagaaacgacctgctggtggccgccgacagcatcaccaacaccatgagcagcctggtgaaggagctgaacagcgaggtgggcagcgagaccgagagcaacgtggacagcgagttcgccagaacccagttcgaggacctggtgcccagccccaccagcgagaaggccttcctggcccagatccacgccagaaagcccggctacatccacagcggcgccaccaccagcaccatgagaggcgacatggtgaccgaggacgccgacccctacgtgcagcccgaggacgagaactacgagaacgacagcgtgagacagctggagaacgagctgcagatggaggagtacctgaagcagaagctgcaggacgaggcctaccaggtgagcctgcagggctag

SEQ ID NO: 117491 - DNA, 6199 bp, Artificial Sequence
  derived and/or modified sequence
ggatttcatactcatagctctccctagaatttcagagagttctgttatgatctctgttgtaattaccaatttggttcaagtttgttctttaaatgaatatgcttagaattcacatatgttctggatgtactggaattaaaaggatttaagagatcatggtgtgcatgttctaggataaataggatttaccaatccttggatgaagtgcttgggaagtctttaagtgccataatcaactgccatttcaaagaatatagatggttttgaaaagttcatgctgtcccttcattgaattttagaatgattgaagatagtgggaaaagaggaaataccatggcagaaagaagacagctgtttgcagagatgagggctcaagatctggatcgcatccgactctccacctacagaacagcatgcaagcttaggtttgttcagaagaaatgcaatttgcacctggtggacatatggaatgtcatagaagcattgcgggaaaatgctctgaacaacctggacccaaacactgaactcaacgtgtcccgcttagaggctgtgctctccactattttttaccagctcaacaaacggatgccaaccactcaccaaatccatgtggagcagtccatcagcctcctccttaacttcctgcttgcagcgtttgatccggaaggccatggtaaaatttcagtatttgctgtcaaaatggctttagccacattgtgtggagggaagatcatggacaaattaagatatattttctcaatgatttctgactccagtggggtgatggtttatggacgatatgaccaattccttcgggaagttctcaaactacccacggcagtttttgaaggtccttcatttggttacacagaacagtcagccagatcctgtttctcccaacagaaaaaagtcacgttaaatggtttcttggacacgcttatgtcagatcctcccccgcagtgtctggtctggttgcctcttctgcatcgactagcaaatgtggaaaatgtcttccatccggttgagtgttcctactgccacagtgagagtatgatgggatttcgctaccgatgccaacagtgtcacaattaccagctctgtcaggactgcttctggaggggacatgccggtggttctcatagcaaccagcaccaaatgaaagagtacacgtcatggaaatcacctgctaagaagctgactaatgcattaagcaagtccctgagctgtgcttccagccgtgaacctttgcaccccatgttcccagatcagcctgagaagccactcaacttggctcacatcgtgctggacaatatgcctcccagacctgtaaccagcatgaacgacaccctgttctcccactctgttccctcctcaggaagtccttttattaccaggagctctcctcccaaggacagtgaagtagagcagaacaaactgctggctagggctgctccagcttttctgaagggcaaagggatacagtacagcctgaatgtggcagacaggctagctgatgaacatgttctcatcgggttgtatgtcaacatgctccggaacaacccctcatgcatgcttgagagttcaaaccggcttgatgaagaacacaggctaattgccaggtatgcggcaaggctggcagcagagtcctcttcgtctcagccacctcagcagagaagtgctcctgacatctctttcaccatcgatgcgaataagcagcaaaggcagctgattgctgagctagaaaacaagaacagagaaatcttacaggagatccagagacttcggctagagcatgaacaagcttctcagcccacgccagagaaggcacagcaaaaccccaccctgctggcagaactccggctcctcagacagcgcaaagatgagctggaacagagaatgtctgctctccaggagagccggagagagctaatggtccagttggagggtctcatgaagctactaaagactcagggggcaggctctccccgctcctcccccagccacaccatcagcaggccaattcccatgcccatccggtcagcgtcagcctgctccaccccgacgcacacgccgcaggactccctcacaggagtagggggagatgtacaagaggcatttgcacaaagttcaagaagaaacttaaggaatgacttgctagtggctgcagattccatcactaacactatgtcctctcttgtgaaagagctgaattctgaggttgggagtgaaacagagagtaatgtggattctgaatttgcacggactcagtttgaggatcttgttccctcaccaacctctgaaaaggcttttctagcgcaaatccatgcccgaaaacctgggtacattcacagtggagctaccacaagtaccatgcgtggcgacatggttacggaggatgcagatccctatgtgcagcctgaagatgaaaactatgaaaatgactctgtccggcagctggagaatgagctccagatggaggaatacctgaaacagaagctgcaagatgaagcttatcaggtcagcttgcaaggttgaatgcaatatccttttatcacactcctctcaagcaagctatagtcagacagatgatgaaagtaacatgaaaactggtgatgatggagagccctgtggccacacagaggaggaagacagcagcctggcagcagcctcaccgaagagaggaaccaccacacccagcagctcctgacagacccccacccctaaagatgtgtcctgatgactatagtgcagctaactttttgttctcagatttgtagtgcataggtgtgtgtttcaagaaggaaaaaaaaagacttctgttcaaagttaacttatcagctacatcctctgtaacgtggttcatccctggttaaaaagcaaacaaacacaggctgaaaacccatgctgctgttatacacaatggcagtattaacaagcattttaaacctttgcacatgatattgaacctgttcagtttacaatgacaatattaatactgtttatagctagaagtttgatttctgaattctttgagattttagcaaaacagtttattatacactgtacatttttttcacagcaattggaaaaaaacaaccacttgcaatcattcaataaccctgaagaatttggttcctgagtgtacaaactcagagcccggaagccaagaagggtccttggcctgcacggtctgtagttgactccaagtctctgtgagcagtgacttgaaccaaacacaccaggaataatccattctttggggcctctttccaactcgaggttgttttctttcaagatactctaatcagccatagaatttagtgtaaatatttttttttccaaatagatatcatattcaaaaaaggcagcattcaaattatatagaatctagtttttaaaatcagcacagatcttcttaaaaactgtgaactatgttttgaaatactcgttactaaagctgtttataaaccacaggtgccataagatccccaaacggactaaagttatctctgctcttccatggtcttgttcctctcgttttggctttaggaagcatgtctttaacagcaccgctcgttcacaagttcccccatcaagttgtttggaggccttcagctttaaatgtacaggcttaaagtgcgcttgcaaacgtttgctctcctttttttctgaatgttgattgccttagctggccacctggtgttctgcatgtagccttctgtggtcatgtgaaaggagacaggctcttctaagttgagttgggatttttgcactcagtgaaaagctgaagtgcaaaagagctatcaaagacaagaggataaaagactgggatagtcttttccaaggaccctctttagagggccctaaagacctcctttgggaattctggggaaaaagaaaaagtaatcttctacttgcttcaagatttgatttttttaaaaaagcctgcgacctattcaatacattatgcttaaattagcagtttctctggaattcctgtctctcctttaaaagaaaggagagaacattttagaacaatagttctcaaagtgtgttccccggacaagcagcatctgcaacacttaggaaggtcttcgaaatactaatttgtaagccccacctcaggcctactgaatcagaagctctgggggttgggtccagaagtctgttttagtcaaccctctaggtgattctgatgctcgctaaaggttgagaactactgctttagaatgaagtcgtataataaagtctctgaaaaggccttattcagaataagcaagaaaggttctgtgattcacttttgcttctggggctggcaaaaaccttctctgaacccacacaccaagttcgtagttggtaggtgcccagccaagtcctgacatcttcatgccccctctgcagagggcggctgtacgatgttcacatgtctgcgtttggtcagacatcatctccttggctgccctttgaaaccaaatcacttgccttggggataaagtgctcaattggcattagtgagaagcccatcctatcccttgacatacttaatcatatatctctccagagaactcacctgacaaatgtctctgagcacaggctgacaccaaagtggcacaactgcacagttctcagatttctttgcacagattgatttttattgcgggttttgttggggtgtcttaatgttcatctcttttccactgcccatcctctgtgaacccatacctctctagatggagcaggtggccactggtgcctcatactcagtattgaaaaccactacatcccagctacctataatgctgtcagctcaaaatcatagccaggtagttcttgaactcagaacttaaatcctgcacgtggcactccaccactgactggaccgagctggcatatgttgtttctttgtgtttctacatcaaaatgttcgtctaagatttgaactgttctgctgataaccttccccgttgtcatagctatttcattgccaaccaactccatcacatggttgttgatatcgtcatataaagccattgcaaggactctggaaactgccgccaatgaccaatttctgactaaccagccaccttttctctctcttagctccacgtcagcactgagaccagactcgagcacccctgtcctgtaagcgagacaaaatggcgtgtgttattttggggttttgtgttttttggtgggtttctttccttggctctccagatttacttttggggcctgttctaagtgcaaacccagcaagtttcacttgtcctgtccattagatacaactacatcttgcgggggttgtttctttcttgttccacaatgaattgcacatccatctccatcagagctgatagcctgttaataagcactggtctaacacagccaaccctcctccacagcgccatattaatggaggaggggaggaaggtgaaatctactgcatgggattcaggaaacagttgtggttggtcaggacggaagttggggtaagtttggttggtcagagggagttgtgctggagattgtgaaaaatgggttcttgaatgatctactataaggcagggaaggttcatttgtaagtagtaatgtgaactgaattgcattaagagtgtgtggcctttgttgtgatatactatgtattttcttatatgcatgagccaaactgttgcatcataatttagcactgatgtctgcttttattttgatcatctttgtccacccttattagttcttggctgttaaccgtagatagatcttgtaaatccagcaacctttggttgctgcattccccttggttcgattccacgcaaggagccacaagtgagaactccactgtccttagaagaaagggcatttttacttttgaaccaaaaagagaaaaaaaaatcagaagtgttgcatcttgaggcgaattaactgtaagacatttttaattatgactactgcaatttgacaccatttgaaataatcaattcagagacactaaagatttcacaatattcattggtattgtaaaaaaaaaatactattgtatggatttttgtattgctgttaagtattgttttgtgtgtgtgtgtgtgtgtgtgtgttggaacctcctggggacatgttatattttgaagtgattaaactatttaattgtgtgtctatattttggagtggaataatttcttcattaaaaaatgtttttaaaaac

SEQ ID NO: 117492 - DNA, 2232 bp, Artificial Sequence
  derived and/or modified sequence
atgattgaagatagtgggaaaagaggaaataccatggcagaaagaagacagctgtttgcagagatgagggctcaagatctggatcgcatccgactctccacctacagaacagcatgcaagcttaggtttgttcagaagaaatgcaatttgcacctggtggacatatggaatgtcatagaagcattgcgggaaaatgctctgaacaacctggacccaaacactgaactcaacgtgtcccgcttagaggctgtgctctccactattttttaccagctcaacaaacggatgccaaccactcaccaaatccatgtggagcagtccatcagcctcctccttaacttcctgcttgcagcgtttgatccggaaggccatggtaaaatttcagtatttgctgtcaaaatggctttagccacattgtgtggagggaagatcatggacaaattaagatatattttctcaatgatttctgactccagtggggtgatggtttatggacgatatgaccaattccttcgggaagttctcaaactacccacggcagtttttgaaggtccttcatttggttacacagaacagtcagccagatcctgtttctcccaacagaaaaaagtcacgttaaatggtttcttggacacgcttatgtcagatcctcccccgcagtgtctggtctggttgcctcttctgcatcgactagcaaatgtggaaaatgtcttccatccggttgagtgttcctactgccacagtgagagtatgatgggatttcgctaccgatgccaacagtgtcacaattaccagctctgtcaggactgcttctggaggggacatgccggtggttctcatagcaaccagcaccaaatgaaagagtacacgtcatggaaatcacctgctaagaagctgactaatgcattaagcaagtccctgagctgtgcttccagccgtgaacctttgcaccccatgttcccagatcagcctgagaagccactcaacttggctcacatcgttgatacttggcctcccagacctgtaaccagcatgaacgacaccctgttctcccactctgttccctcctcaggaagtccttttattaccaggagctctcctcccaaggacagtgaagtagagcagaacaaactgctggctagggctgctccagcttttctgaagggcaaagggatacagtacagcctgaatgtggcagacaggctagctgatgaacatgttctcatcgggttgtatgtcaacatgctccggaacaacccctcatgcatgcttgagagttcaaaccggcttgatgaagaacacaggctaattgccaggtatgcggcaaggctggcagcagagtcctcttcgtctcagccacctcagcagagaagtgctcctgacatctctttcaccatcgatgcgaataagcagcaaaggcagctgattgctgagctagaaaacaagaacagagaaatcttacaggagatccagagacttcggctagagcatgaacaagcttctcagcccacgccagagaaggcacagcaaaaccccaccctgctggcagaactccggctcctcagacagcgcaaagatgagctggaacagagaatgtctgctctccaggagagccggagagagctaatggtccagttggagggtctcatgaagctactaaagactcagggggcaggctctccccgctcctcccccagccacaccatcagcaggccaattcccatgcccatccggtcagcgtcagcctgctccaccccgacgcacacgccgcaggactccctcacaggagtagggggagatgtacaagaggcatttgcacaaagttcaagaagaaacttaaggaatgacttgctagtggctgcagattccatcactaacactatgtcctctcttgtgaaagagctgaattctgaggttgggagtgaaacagagagtaatgtggattctgaatttgcacggactcagtttgaggatcttgttccctcaccaacctctgaaaaggcttttctagcgcaaatccatgcccgaaaacctgggtacattcacagtggagctaccacaagtaccatgcgtggcgacatggttacggaggatgcagatccctatgtgcagcctgaagatgaaaactatgaaaatgactctgtccggcagctggagaatgagctccagatggaggaatacctgaaacagaagctgcaagatgaagcttatcaggtcagcttgcaaggttga

SEQ ID NO: 117493 - DNA, 6343 bp, Artificial Sequence
  derived and/or modified sequence
aatgattgaagatagtgggaaaagaggaaataccatggcagaaagaagacagctgtttgcagagatgagggctcaagatctggatcgcatccgactctccacctacagaacagcatgcaagcttaggtttgttcagaagaaatgcaatttgcacctggtggacatatggaatgtcatagaagcattgcgggaaaatgctctgaacaacctggacccaaacactgaactcaacgtgtcccgcttagaggctgtgctctccactattttttaccagctcaacaaacggatgccaaccactcaccaaatccatgtggagcagtccatcagcctcctccttaacttcctgcttgcagcgtttgatccggaaggccatggtaaaatttcagtatttgctgtcaaaatggctttagccacattgtgtggagggaagatcatggacaaattaagatatattttctcaatgatttctgactccagtggggtgatggtttatggacgatatgaccaattccttcgggaagttctcaaactacccacggcagtttttgaaggtccttcatttggttacacagaacagtcagccagatcctgtttctcccaacagaaaaaagtcacgttaaatggtttcttggacacgcttatgtcagatcctcccccgcagtgtctggtctggttgcctcttctgcatcgactagcaaatgtggaaaatgtcttccatccggttgagtgttcctactgccacagtgagagtatgatgggatttcgctaccgatgccaacagtgtcacaattaccagctctgtcaggactgcttctggaggggacatgccggtggttctcatagcaaccagcaccaaatgaaagagtacacgtcatggaaatcacctgctaagaagctgactaatgcattaagcaagtccctgagctgtgcttccagccgtgaacctttgcaccccatgttcccagatcagcctgagaagccactcaacttggctcacatcgtttgttttaggcctcccagacctgtaaccagcatgaacgacaccctgttctcccactctgttccctcctcaggaagtccttttattaccaggagctctcctcccaaggacagtgaagtagagcagaacaaactgctggctagggctgctccagcttttctgaagggcaaagggatacagtacagcctgaatgtggcagacaggctagctgatgaacatgttctcatcgggttgtatgtcaacatgctccggaacaacccctcatgcatgcttgagagttcaaaccggcttgatgaagaacacaggctaattgccaggtatgcggcaaggctggcagcagagtcctcttcgtctcagccacctcagcagagaagtgctcctgacatctctttcaccatcgatgcgaataagcagcaaaggcagctgattgctgagctagaaaacaagaacagagaaatcttacaggagatccagagacttcggctagagcatgaacaagcttctcagcccacgccagagaaggcacagcaaaaccccaccctgctggcagaactccggctcctcagacagcgcaaagatgagctggaacagagaatgtctgctctccaggagagccggagagagctaatggtccagttggagggtctcatgaagctactaaagactcagggggcaggctctccccgctcctcccccagccacaccatcagcaggccaattcccatgcccatccggtcagcgtcagcctgctccaccccgacgcacacgccgcaggactccctcacaggagtagggggagatgtacaagaggcatttgcacaaagttcaagaagaaacttaaggaatgacttgctagtggctgcagattccatcactaacactatgtcctctcttgtgaaagagctgaattctgaggttgggagtgaaacagagagtaatgtggattctgaatttgcacggactcagtttgaggatcttgttccctcaccaacctctgaaaaggcttttctagcgcaaatccatgcccgaaaacctgggtacattcacagtggagctaccacaagtaccatgcgtggcgacatggttacggaggatgcagatccctatgtgcagcctgaagatgaaaactatgaaaatgactctgtccggcagctggagaatgagctccagatggaggaatacctgaaacagaagctgcaagatgaagcttatcaggtcagcttgcaaggttgaatgcaatatccttttatcacactcctctcaagcaagctatagtcagacagatgatgaaagtaacatgaaaactggtgatgatggagagccctgtggccacacagaggaggaagacagcagcctggcagcagcctcaccgaagagaggaaccaccacacccagcagctcctgacagacccccacccctaaagatgtgtcctgatgactatagtgcagctaactttttgttctcagatttgtagtgcataggtgtgtgtttcaagaaggaaaaaaaaagacttctgttcaaagttaacttatcagctacatcctctgtaacgtggttcatccctggttaaaaagcaaacaaacacaggctgaaaacccatgctgctgttatacacaatggcagtattaacaagcattttaaacctttgcacatgatattgaacctgttcagtttacaatgacaatattaatactgtttatagctagaagtttgatttctgaattctttgagattttagcaaaacagtttattatacactgtacatttttttcacagcaattggaaaaaaacaaccacttgcaatcattcaataaccctgaagaatttggttcctgagtgtacaaactcagagcccggaagccaagaagggtccttggcctgcacggtctgtagttgactccaagtctctgtgagcagtgacttgaaccaaacacaccaggaataatccattctttggggcctctttccaactcgaggttgttttctttcaagatactctaatcagccatagaatttagtgtaaatatttttttttccaaatagatatcatattcaaaaaaggcagcattcaaattatatagaatctagtttttaaaatcagcacagatcttcttaaaaactgtgaactatgttttgaaatactcgttactaaagctgtttataaaccacaggtgccataagatccccaaacggactaaagttatctctgctcttccatggtcttgttcctctcgttttggctttaggaagcatgtctttaacagcaccgctcgttcacaagttcccccatcaagttgtttggaggccttcagctttaaatgtacaggcttaaagtgcgcttgcaaacgtttgctctcctttttttctgaatgttgattgccttagctggccacctggtgttctgcatgtagccttctgtggtcatgtgaaaggagacaggctcttctaagttgagttgggatttttgcactcagtgaaaagctgaagtgcaaaagagctatcaaagacaagaggataaaagactgggatagtcttttccaaggaccctctttagagggccctaaagacctcctttgggaattctggggaaaaagaaaaagtaatcttctacttgcttcaagatttgatttttttaaaaaagcctgcgacctattcaatacattatgcttaaattagcagtttctctggaattcctgtctctcctttaaaagaaaggagagaacattttagaacaatagttctcaaagtgtgttccccggacaagcagcatctgcaacacttaggaaggtcttcgaaatactaatttgtaagccccacctcaggcctactgaatcagaagctctgggggttgggtccagaagtctgttttagtcaaccctctaggtgattctgatgctcgctaaaggttgagaactactgctttagaatgaagtcgtataataaagtctctgaaaaggccttattcagaataagcaagaaaggttctgtgattcacttttgcttctggggctggcaaaaaccttctctgaacccacacaccaagttcgtagttggtaggtgcccagccaagtcctgacatcttcatgccccctctgcagagggcggctgtacgatgttcacatgtctgcgtttggtcagacatcatctccttggctgccctttgaaaccaaatcacttgccttggggataaagtgctcaattggcattagtgagaagcccatcctatcccttgacatacttaatcatatatctctccagagaactcacctgacaaatgtctctgagcacaggctgacaccaaagtggcacaactgcacagttctcagatttctttgcacagattgatttttattgcgggttttgttggggtgtcttaatgttcatctcttttccactgcccatcctctgtgaacccatacctctctagatggagcaggtggccactggtgcctcatactcagtattgaaaaccactacatcccagctacctataatgctgtcagctcaaaatcatagccaggtagttcttgaactcagaacttaaatcctgcacgtggcactccaccactgactggaccgagctggcatatgttgtttctttgtgtttctacatcaaaatgttcgtctaagatttgaactgttctgctgataaccttccccgttgtcatagctatttcattgccaaccaactccatcacatggttgttgatatcgtcatataaagccattgcaaggactctggaaactgccgccaatgaccaatttctgactaaccagccaccttttctctctcttagctccacgtcagcactgagaccagactcgagcacccctgtcctgtaagcgagacaaaatggcgtgtgttattttggggttttgtgttttttggtgggtttctttccttggctctccagatttacttttggggcctgttctaagtgcaaacccagcaagtttcacttgtcctgtccattagatacaactacatcttgcgggggttgtttctttcttgttccacaatgaattgcacatccatctccatcagagctgatagcctgttaataagcactggtctaacacagccaaccctcctccacagcgccatattaatggaggaggggaggaaggtgaaatctactgcatgggattcaggaaacagttgtggttggtcaggacggaagttggggtaagtttggttggtcagagggagttgtgctggagattgtgaaaaatgggttcttgaatgatctactataaggcagggaaggttcatttgtaagtagtaatgtgaactgaattgcattaagagtgtgtggcctttgttgtgatatactatgtattttcttatatgcatgagccaaactgttgcatcataatttagcactgatgtctgcttttattttgatcatctttgtccacccttattagttcttggctgttaaccgtagatagatcttgtaaatccagcaacctttggttgctgcattccccttggttcgattccacgcaaggagccacaagtgagaactccactgtccttagaagaaagggcatttttacttttgaaccaaaaagagaaaaaaaaatcagaagtgttgcatcttgaggcgaattaactgtaagacatttttaattatgactactgcaatttgacaccatttgaaataatcaattcagagacactaaagatttcacaatattcattggtattgtaaaaaaaaaatactattgtatggatttttgtattgctgttaagtattgttttgtgtgtgtgtgtgtgtgtgtgtgttggaacctcctggggacatgttatattttgaagtgattaaactatttaattgtgtgtctatattttggagtggaataatttcttcattaaaaaatgtttttaaaaacactatatcttgggtggtttattcctttgtttcagtgaatctttcctaaagcaacgtggagtcagtctgttgaaagaaggaaggcaggtacttgcagtttaaagcaggacccattgatggaatattgagccaccgaggcaaaatagctcaccttctcttgccttgggggatgcatggtttttaccattctactgttttattagcatctgtgagcatctaatagaaatactattctgctatttatggaaatccttattataattgatatggaagtgagtttgaaattctaacagctaacatatttcatgtttgtatcacacactgttcttaacactttatgtgacttcactcaattctttgaatcctctgcatctagccatgtattctgcaaatattaagtgctcaatggtttttttgttgaattactgaataaatgaattagtggtg

SEQ ID NO: 117494 - DNA, 6343 bp, Artificial Sequence
  derived and/or modified sequence
aatgattgaagatagtgggaaaagaggaaataccatggcagaaagaagacagctgtttgcagagatgagggctcaagatctggatcgcatccgactctccacctacagaacagcatgcaagcttaggtttgttcagaagaaatgcaatttgcacctggtggacatatggaatgtcatagaagcattgcgggaaaatgctctgaacaacctggacccaaacactgaactcaacgtgtcccgcttagaggctgtgctctccactattttttaccagctcaacaaacggatgccaaccactcaccaaatccatgtggagcagtccatcagcctcctccttaacttcctgcttgcagcgtttgatccggaaggccatggtaaaatttcagtatttgctgtcaaaatggctttagccacattgtgtggagggaagatcatggacaaattaagatatattttctcaatgatttctgactccagtggggtgatggtttatggacgatatgaccaattccttcgggaagttctcaaactacccacggcagtttttgaaggtccttcatttggttacacagaacagtcagccagatcctgtttctcccaacagaaaaaagtcacgttaaatggtttcttggacacgcttatgtcagatcctcccccgcagtgtctggtctggttgcctcttctgcatcgactagcaaatgtggaaaatgtcttccatccggttgagtgttcctactgccacagtgagagtatgatgggatttcgctaccgatgccaacagtgtcacaattaccagctctgtcaggactgcttctggaggggacatgccggtggttctcatagcaaccagcaccaaatgaaagagtacacgtcatggaaatcacctgctaagaagctgactaatgcattaagcaagtccctgagctgtgcttccagccgtgaacctttgcaccccatgttcccagatcagcctgagaagccactcaacttggctcacatcgttgatacttggcctcccagacctgtaaccagcatgaacgacaccctgttctcccactctgttccctcctcaggaagtccttttattaccaggagctctcctcccaaggacagtgaagtagagcagaacaaactgctggctagggctgctccagcttttctgaagggcaaagggatacagtacagcctgaatgtggcagacaggctagctgatgaacatgttctcatcgggttgtatgtcaacatgctccggaacaacccctcatgcatgcttgagagttcaaaccggcttgatgaagaacacaggctaattgccaggtatgcggcaaggctggcagcagagtcctcttcgtctcagccacctcagcagagaagtgctcctgacatctctttcaccatcgatgcgaataagcagcaaaggcagctgattgctgagctagaaaacaagaacagagaaatcttacaggagatccagagacttcggctagagcatgaacaagcttctcagcccacgccagagaaggcacagcaaaaccccaccctgctggcagaactccggctcctcagacagcgcaaagatgagctggaacagagaatgtctgctctccaggagagccggagagagctaatggtccagttggagggtctcatgaagctactaaagactcagggggcaggctctccccgctcctcccccagccacaccatcagcaggccaattcccatgcccatccggtcagcgtcagcctgctccaccccgacgcacacgccgcaggactccctcacaggagtagggggagatgtacaagaggcatttgcacaaagttcaagaagaaacttaaggaatgacttgctagtggctgcagattccatcactaacactatgtcctctcttgtgaaagagctgaattctgaggttgggagtgaaacagagagtaatgtggattctgaatttgcacggactcagtttgaggatcttgttccctcaccaacctctgaaaaggcttttctagcgcaaatccatgcccgaaaacctgggtacattcacagtggagctaccacaagtaccatgcgtggcgacatggttacggaggatgcagatccctatgtgcagcctgaagatgaaaactatgaaaatgactctgtccggcagctggagaatgagctccagatggaggaatacctgaaacagaagctgcaagatgaagcttatcaggtcagcttgcaaggttgaatgcaatatccttttatcacactcctctcaagcaagctatagtcagacagatgatgaaagtaacatgaaaactggtgatgatggagagccctgtggccacacagaggaggaagacagcagcctggcagcagcctcaccgaagagaggaaccaccacacccagcagctcctgacagacccccacccctaaagatgtgtcctgatgactatagtgcagctaactttttgttctcagatttgtagtgcataggtgtgtgtttcaagaaggaaaaaaaaagacttctgttcaaagttaacttatcagctacatcctctgtaacgtggttcatccctggttaaaaagcaaacaaacacaggctgaaaacccatgctgctgttatacacaatggcagtattaacaagcattttaaacctttgcacatgatattgaacctgttcagtttacaatgacaatattaatactgtttatagctagaagtttgatttctgaattctttgagattttagcaaaacagtttattatacactgtacatttttttcacagcaattggaaaaaaacaaccacttgcaatcattcaataaccctgaagaatttggttcctgagtgtacaaactcagagcccggaagccaagaagggtccttggcctgcacggtctgtagttgactccaagtctctgtgagcagtgacttgaaccaaacacaccaggaataatccattctttggggcctctttccaactcgaggttgttttctttcaagatactctaatcagccatagaatttagtgtaaatatttttttttccaaatagatatcatattcaaaaaaggcagcattcaaattatatagaatctagtttttaaaatcagcacagatcttcttaaaaactgtgaactatgttttgaaatactcgttactaaagctgtttataaaccacaggtgccataagatccccaaacggactaaagttatctctgctcttccatggtcttgttcctctcgttttggctttaggaagcatgtctttaacagcaccgctcgttcacaagttcccccatcaagttgtttggaggccttcagctttaaatgtacaggcttaaagtgcgcttgcaaacgtttgctctcctttttttctgaatgttgattgccttagctggccacctggtgttctgcatgtagccttctgtggtcatgtgaaaggagacaggctcttctaagttgagttgggatttttgcactcagtgaaaagctgaagtgcaaaagagctatcaaagacaagaggataaaagactgggatagtcttttccaaggaccctctttagagggccctaaagacctcctttgggaattctggggaaaaagaaaaagtaatcttctacttgcttcaagatttgatttttttaaaaaagcctgcgacctattcaatacattatgcttaaattagcagtttctctggaattcctgtctctcctttaaaagaaaggagagaacattttagaacaatagttctcaaagtgtgttccccggacaagcagcatctgcaacacttaggaaggtcttcgaaatactaatttgtaagccccacctcaggcctactgaatcagaagctctgggggttgggtccagaagtctgttttagtcaaccctctaggtgattctgatgctcgctaaaggttgagaactactgctttagaatgaagtcgtataataaagtctctgaaaaggccttattcagaataagcaagaaaggttctgtgattcacttttgcttctggggctggcaaaaaccttctctgaacccacacaccaagttcgtagttggtaggtgcccagccaagtcctgacatcttcatgccccctctgcagagggcggctgtacgatgttcacatgtctgcgtttggtcagacatcatctccttggctgccctttgaaaccaaatcacttgccttggggataaagtgctcaattggcattagtgagaagcccatcctatcccttgacatacttaatcatatatctctccagagaactcacctgacaaatgtctctgagcacaggctgacaccaaagtggcacaactgcacagttctcagatttctttgcacagattgatttttattgcgggttttgttggggtgtcttaatgttcatctcttttccactgcccatcctctgtgaacccatacctctctagatggagcaggtggccactggtgcctcatactcagtattgaaaaccactacatcccagctacctataatgctgtcagctcaaaatcatagccaggtagttcttgaactcagaacttaaatcctgcacgtggcactccaccactgactggaccgagctggcatatgttgtttctttgtgtttctacatcaaaatgttcgtctaagatttgaactgttctgctgataaccttccccgttgtcatagctatttcattgccaaccaactccatcacatggttgttgatatcgtcatataaagccattgcaaggactctggaaactgccgccaatgaccaatttctgactaaccagccaccttttctctctcttagctccacgtcagcactgagaccagactcgagcacccctgtcctgtaagcgagacaaaatggcgtgtgttattttggggttttgtgttttttggtgggtttctttccttggctctccagatttacttttggggcctgttctaagtgcaaacccagcaagtttcacttgtcctgtccattagatacaactacatcttgcgggggttgtttctttcttgttccacaatgaattgcacatccatctccatcagagctgatagcctgttaataagcactggtctaacacagccaaccctcctccacagcgccatattaatggaggaggggaggaaggtgaaatctactgcatgggattcaggaaacagttgtggttggtcaggacggaagttggggtaagtttggttggtcagagggagttgtgctggagattgtgaaaaatgggttcttgaatgatctactataaggcagggaaggttcatttgtaagtagtaatgtgaactgaattgcattaagagtgtgtggcctttgttgtgatatactatgtattttcttatatgcatgagccaaactgttgcatcataatttagcactgatgtctgcttttattttgatcatctttgtccacccttattagttcttggctgttaaccgtagatagatcttgtaaatccagcaacctttggttgctgcattccccttggttcgattccacgcaaggagccacaagtgagaactccactgtccttagaagaaagggcatttttacttttgaaccaaaaagagaaaaaaaaatcagaagtgttgcatcttgaggcgaattaactgtaagacatttttaattatgactactgcaatttgacaccatttgaaataatcaattcagagacactaaagatttcacaatattcattggtattgtaaaaaaaaaatactattgtatggatttttgtattgctgttaagtattgttttgtgtgtgtgtgtgtgtgtgtgtgttggaacctcctggggacatgttatattttgaagtgattaaactatttaattgtgtgtctatattttggagtggaataatttcttcattaaaaaatgtttttaaaaacactatatcttgggtggtttattcctttgtttcagtgaatctttcctaaagcaacgtggagtcagtctgttgaaagaaggaaggcaggtacttgcagtttaaagcaggacccattgatggaatattgagccaccgaggcaaaatagctcaccttctcttgccttgggggatgcatggtttttaccattctactgttttattagcatctgtgagcatctaatagaaatactattctgctatttatggaaatccttattataattgatatggaagtgagtttgaaattctaacagctaacatatttcatgtttgtatcacacactgttcttaacactttatgtgacttcactcaattctttgaatcctctgcatctagccatgtattctgcaaatattaagtgctcaatggtttttttgttgaattactgaataaatgaattagtggtg

SEQ ID NO: 117495 - protein, 570 aa, Artificial Sequence
  derived and/or modified sequence
MIEDSGKRGNTMAERRQLFAEMRAQDLDRIRLSTYRTACKLRFVQKKCNLHLVDIWNVIEALRENALNNLDPNTELNVSRLEAVLSTIFYQLNKRMPTTHQIHVEQSISLLLNFLLAAFDPEGHGKISVFAVKMALATLCGGKIMDKLRYIFSMISDSSGVMVYGRYDQFLREVLKLPTAVFEGPSFGYTEQSARSCFSQQKKVTLNGFLDTLMSDPPPQCLVWLPLLHRLANVENVFHPVECSYCHSESMMGFRYRCQQCHNYQLCQDCFWRGHAGGSHSNQHQMKEYTSWKSPAKKLTNALSKSLSCASSREPLHPMFPDQPEKPLNLAHIVDTWPPRPVTSMNDTLFSHSVPSSGSPFITRSSPPKDSEVEQNKLLARAAPAFLKGKGIQYSLNVADRLADEHVLIGLYVNMLRNNPSCMLESSNRLDEEHRLIARYAARLAAESSSSQPPQQRSAPDISFTIDANKQQRQLIAELENKNREILQEIQRLRLEHEQASQPTPEKAQQNPTLLAELRLLRQRKDELEQRMSALQESRRELMVQLEGLMKLLKEEELKQGVSYVPYCRS

SEQ ID NO: 117496 - DNA, 1713 bp, Artificial Sequence
  derived and/or modified sequence
atgatagaagactctggaaagcgaggcaataccatggctgaacggcgccagctgttcgctgagatgcgcgcccaggatttggaccggattcggctgtctacttaccggactgcctgcaagctgagattcgtgcagaaaaagtgcaatttgcatctggtcgacatctggaatgtaattgaggcactacgcgagaacgctctcaacaatctggatcctaatacagaactcaacgtgtctagactcgaagcagtgctttcaacaatcttttaccagttgaacaagaggatgcctacaacgcaccaaatccacgtggaacagagcataagcctcctactaaacttccttctggcagcgtttgacccagaaggacacggaaagatctcagtgttcgctgtgaagatggccttggcgactctgtgcggcggtaaaatcatggataaattaagatacattttctctatgataagtgactctagtggtgtaatggtctacggacgttacgaccaattcctcagggaagtgctgaagctgcctaccgccgttttcgaagggccttcattcggatatactgaacaaagcgccagatcatgcttttcacaacagaagaaggttaccctgaatggtttcctcgacactctgatgtccgatcctcctccacaatgcctggtgtggctcccactgctacataggctggcaaatgtcgaaaacgtctttcaccccgtggagtgcagctattgccactcagagtcaatgatggggttcagataccggtgccaacaatgtcataactaccagctttgtcaggactgtttctggcgcgggcacgctgggggatcccattccaatcagcaccagatgaaagagtacacaagctggaaatctccagcaaaaaagcttaccaatgccctgagcaagtctttgtcttgtgctagtagtagggagcctctgcaccccatgttccccgaccaacccgaaaagcctctgaacctcgcccacattgtcgacacatggccaccacgcccggtgacaagcatgaacgacactctattttcgcattctgtgccgtcatccggtagtccattcatcacacgatccagccctccaaaggatagtgaggtcgagcagaataagctccttgcccgagcggctcctgcctttttgaagggcaagggtattcagtactcactcaacgtcgctgacaggcttgccgatgagcatgtactaattggtttgtatgtgaatatgctgaggaataacccctcctgcatgctggaatcttcaaatagactcgatgaggagcacaggctgatagctcgctacgcagcccgcctcgccgcggagagcagtagcagccagccaccccagcagagaagcgctcctgatatctccttcaccattgacgcaaacaagcagcagcggcaactgatagctgaactggaaaataagaatcgagagatccttcaggaaattcagcgactccggctggagcacgagcaggcatcccaacctacccccgagaaagcacaacagaatcctactttgttggctgagctcaggttgttgcgccagagaaaagacgagctggagcaaaggatgagtgcgctgcaggaatcgcgcagagaactgatggtgcaactggaggggcttatgaagctgctgaaggaggaagaactaaaacaaggcgtgtcttacgtgccgtattgtcgaagttag

SEQ ID NO: 117497 - DNA, 1713 bp, Artificial Sequence
  derived and/or modified sequence
atgattgaagattctgggaagaggggcaacaccatggccgagcggcggcagctgtttgctgagatgagggcccaggacctggaccgcatccggctgagcacctacagaacagcctgcaagctgcgctttgtgcagaagaagtgcaacctgcacctggtggacatctggaatgtgattgaggccctgcgggagaatgccctgaacaacctggaccccaacacagagctgaatgtgtcccggctggaggccgtgctgagcaccatcttctaccagctgaacaagaggatgcccaccacccaccagatccacgtggagcagagcatcagcctgctgctgaacttcctgctggccgcctttgatcctgagggccacggcaagatctctgtgtttgctgtgaagatggccctggccaccctgtgtggcggcaagatcatggacaagctgcgctacatcttctccatgatcagtgacagcagtggagtgatggtgtatggccgctatgaccagttcctgcgggaggtgctgaagctgcccacagctgtgtttgagggccccagctttggctacacagagcagagcgcccggagctgcttcagccagcagaagaaggtgaccctgaatggcttcctggacaccctgatgtctgaccccccaccccagtgcctggtgtggctgcccctgctgcaccggctggccaacgtggagaatgtgttccaccctgtggagtgcagctactgccacagcgagagcatgatgggcttccgctaccgctgccagcagtgccacaactaccagctgtgccaggactgcttctggaggggccacgccggcggcagccacagcaaccagcaccagatgaaggagtacacctcctggaagagccctgccaagaagctgaccaatgccctgagcaagagcctgagctgtgccagcagccgggagcccctgcaccccatgtttcctgaccagcctgagaagcccctgaacctggcccacatcgtggacacctggccacccaggcctgtgacctccatgaatgacaccctcttcagccacagcgtgcccagcagcggcagccccttcatcaccaggagcagcccccccaaggacagcgaggtggagcagaacaagctgctggcccgggccgccccagccttcctgaagggcaagggcatccagtacagcctgaatgtggccgaccggctggctgatgagcacgtgctgattggcctgtatgtgaacatgctgaggaacaaccccagctgcatgctggagagcagcaaccggctggatgaggagcaccggctgattgcccgctatgctgcccggctggccgctgagagcagcagcagccagcccccccagcagaggtctgccccagacatctccttcaccattgatgccaacaagcagcagaggcagctgattgctgagctggagaacaagaaccgggagatcctgcaggagatccagaggctgcggctggagcacgagcaggccagccagcccaccccagagaaggcccagcagaaccccaccctgctggccgagctgcggctgctgcggcagaggaaggatgagctggagcagaggatgtctgccctgcaggagagcagaagagagctgatggtgcagctggagggcctgatgaagctgctgaaggaggaggagctgaagcagggcgtgtcctatgtgccctactgccgctcctag

SEQ ID NO: 117498 - DNA, 1713 bp, Artificial Sequence
  derived and/or modified sequence
atgatcgaggacagcggcaagcggggcaacaccatggccgagcggcgtcagctttttgccgaaatgagagctcaggatctggatcggattcgcctgtcaacttatagaactgcatgtaagctgcggtttgtccagaaaaagtgtaatttgcatttagtcgatatttggaatgtcattgaggccctccgggaaaacgcgcttaataacctggatcctaacaccgaacttaacgtgagccgcctggaggccgtattgagcacgatattttaccagctgaataagcgcatgcccacaactcaccaaatccacgtagagcagtcaattagccttctgctaaatttcttgctggcagcgtttgatccagaaggccacgggaaaatttcagtgtttgctgttaagatggcgttggctactttgtgcggaggcaagatcatggataagctgcgttacatttttagcatgatctccgatagctccggtgtgatggtttacgggagatatgatcagtttcttagggaagtactgaagcttcctactgcagtgttcgaaggtccttctttcgggtacacagagcagtcggctcgttcatgcttctctcagcagaaaaaagtcaccctcaacggctttttagatacactgatgtcagatccccccccacaatgcctggtgtggcttcctcttttgcacaggctggccaacgtggaaaatgtattccacccagtcgagtgtagttactgtcactcagagagtatgatgggttttcggtacaggtgccagcagtgccacaattaccagctttgccaggactgtttttggcgtgggcacgctggaggcagccacagcaatcagcaccagatgaaagagtatacctcatggaagtcccctgcaaaaaaattgacgaacgctctgagcaagtccctgagctgtgccagcagtcgcgaaccacttcatccaatgttccccgatcagcccgagaagcctctgaatctggcccacatcgtcgatacttggccgcccagaccagtaacctcaatgaatgacaccctgttctcgcactcagtccctagtagcggatccccctttatcacccggtcaagccctcctaaagacagcgaggtcgagcaaaacaaactgctcgctcgggctgcacccgcctttctgaagggtaaggggatccagtattctctgaacgtcgccgataggttagcagatgagcatgtcctgatcggactgtacgtgaacatgctgcggaacaaccctagctgcatgctcgaaagcagtaatcgcctggacgaggaacaccgcctcatcgcacgctacgctgctaggctcgcagcagagagtagctcctcgcagccgccccaacagcgcagcgccccggacattagcttcacaatagacgcaaataaacagcagagacagctcatagccgagctcgagaataaaaaccgcgaaatcctccaggaaatacagaggctgcgattggaacacgaacaggcttcacagccaaccccagagaaagcacaacagaaccctacattgttagcagaactgagattacttcgccaaaggaaggatgagctggagcagcgaatgagcgccctgcaggagagccggcgggagctcatggtccagcttgagggtcttatgaagctattaaaagaggaagagctcaaacaaggcgtgagctatgtaccatactgtagatcttag

SEQ ID NO: 117499 - DNA, 1713 bp, Artificial Sequence
  derived and/or modified sequence
atgatagaggactctggtaagagaggcaacacaatggctgagcggaggcagctttttgcggagatgagagcgcaggacctcgatcggatccggttgagcacttacaggacggcctgtaagttgagattcgtccagaaaaagtgtaaccttcatctggtcgatatttggaacgttattgaggcgctgcgcgaaaatgctcttaataatttagatcccaacactgagctgaacgtgtcaaggctggaggctgtcctttcaactatcttctatcaacttaataagcgcatgcccactacacaccagattcatgtggagcagtctattagcctactcctcaacttcttgctggccgcttttgatccagagggacacggcaagattagtgtgttcgccgtgaagatggccttagcaactttatgcgggggtaagatcatggacaagttgcgatatatcttcagcatgatcagtgactcttccggcgtgatggtgtacgggcgatacgatcagttcctcagggaagttcttaagctgccaaccgccgtttttgagggaccaagttttgggtacaccgagcagtcggcccgttcctgcttctcccagcagaagaaagtgactctgaacggatttcttgacacccttatgtccgacccgccaccacagtgtctcgtctggctgcccctgcttcaccggttggcaaacgtagagaatgttttccaccccgttgagtgttcctactgtcatagtgagtctatgatgggattcagatacaggtgtcagcagtgtcacaactatcagctgtgccaggactgtttttggcgcggtcacgccggtgggagccactccaatcagcaccagatgaaagaatacacctcctggaagagtccagcaaagaaactgaccaatgctctgagcaaatccttgagctgtgcttcatcccgggagcccctgcatccgatgttccctgatcagcctgagaaacctttaaatctggcccacatcgtggacacatggccacctagacccgtcactagcatgaacgacacattgttctcgcacagcgttccctcctctggaagtccctttatcacccggtcatctccaccaaaggactctgaggtggaacagaataaactgcttgcgcgagctgcccctgcattcctgaaagggaaaggcatacaatatagcctgaacgttgccgatcggttggctgacgagcacgtattaatagggctctacgttaacatgctccgaaacaatccttcctgtatgcttgaaagtagcaatcggctagacgaggagcatagactgatcgcgagatacgccgcacggcttgccgcagaatcgagctctagccagcccccacaacagaggtctgctccagacatctctttcaccatagatgctaataagcaacaaagacagctcatcgctgagcttgaaaacaagaaccgcgagatattgcaagagattcagcgcctcaggttagaacacgagcaggcttcccaaccgacacccgagaaagcccagcagaaccccactctattggccgagttgcgtttgctccggcagcgtaaggacgagctggaacagcggatgtcagcactccaggaaagcaggcgggaactcatggtacagctggaaggcctcatgaagctcctgaaagaagaagagctgaaacagggggtctcctatgtcccctattgtcgctcttag

SEQ ID NO: 117500 - DNA, 1713 bp, Artificial Sequence
  derived and/or modified sequence
atgatcgaggacagcggcaagagaggcaacaccatggccgagagaagacagctgttcgccgagatgagagcccaggacctggacagaatcagactgagcacctacagaaccgcctgcaagctgagattcgtgcagaagaagtgcaacctgcacctggtggacatctggaacgtgatcgaggccctgagagagaacgccctgaacaacctggaccccaacaccgagctgaacgtgagcagactggaggccgtgctgagcaccatcttctaccagctgaacaagagaatgcccaccacccaccagatccacgtggagcagagcatcagcctgctgctgaacttcctgctggccgccttcgaccccgagggccacggcaagatcagcgtgttcgccgtgaagatggccctggccaccctgtgcggcggcaagatcatggacaagctgagatacatcttcagcatgatcagcgacagcagcggcgtgatggtgtacggcagatacgaccagttcctgagagaggtgctgaagctgcccaccgccgtgttcgagggccccagcttcggctacaccgagcagagcgccagaagctgcttcagccagcagaagaaggtgaccctgaacggcttcctggacaccctgatgagcgacccccccccccagtgcctggtgtggctgcccctgctgcacagactggccaacgtggagaacgtgttccaccccgtggagtgcagctactgccacagcgagagcatgatgggcttcagatacagatgccagcagtgccacaactaccagctgtgccaggactgcttctggagaggccacgccggcggcagccacagcaaccagcaccagatgaaggagtacaccagctggaagagccccgccaagaagctgaccaacgccctgagcaagagcctgagctgcgccagcagcagagagcccctgcaccccatgttccccgaccagcccgagaagcccctgaacctggcccacatcgtggacacctggccccccagacccgtgaccagcatgaacgacaccctgttcagccacagcgtgcccagcagcggcagccccttcatcaccagaagcagcccccccaaggacagcgaggtggagcagaacaagctgctggccagagccgcccccgccttcctgaagggcaagggcatccagtacagcctgaacgtggccgacagactggccgacgagcacgtgctgatcggcctgtacgtgaacatgctgagaaacaaccccagctgcatgctggagagcagcaacagactggacgaggagcacagactgatcgccagatacgccgccagactggccgccgagagcagcagcagccagcccccccagcagagaagcgcccccgacatcagcttcaccatcgacgccaacaagcagcagagacagctgatcgccgagctggagaacaagaacagagagatcctgcaggagatccagagactgagactggagcacgagcaggccagccagcccacccccgagaaggcccagcagaaccccaccctgctggccgagctgagactgctgagacagagaaaggacgagctggagcagagaatgagcgccctgcaggagagcagaagagagctgatggtgcagctggagggcctgatgaagctgctgaaggaggaggagctgaagcagggcgtgagctacgtgccctactgcagaagctag

SEQ ID NO: 117501 - DNA, 4363 bp, Artificial Sequence
  derived and/or modified sequence
aatgattgaagatagtgggaaaagaggaaataccatggcagaaagaagacagctgtttgcagagatgagggctcaagatctggatcgcatccgactctccacctacagaacagcatgcaagcttaggtttgttcagaagaaatgcaatttgcacctggtggacatatggaatgtcatagaagcattgcgggaaaatgctctgaacaacctggacccaaacactgaactcaacgtgtcccgcttagaggctgtgctctccactattttttaccagctcaacaaacggatgccaaccactcaccaaatccatgtggagcagtccatcagcctcctccttaacttcctgcttgcagcgtttgatccggaaggccatggtaaaatttcagtatttgctgtcaaaatggctttagccacattgtgtggagggaagatcatggacaaattaagatatattttctcaatgatttctgactccagtggggtgatggtttatggacgatatgaccaattccttcgggaagttctcaaactacccacggcagtttttgaaggtccttcatttggttacacagaacagtcagccagatcctgtttctcccaacagaaaaaagtcacgttaaatggtttcttggacacgcttatgtcagatcctcccccgcagtgtctggtctggttgcctcttctgcatcgactagcaaatgtggaaaatgtcttccatccggttgagtgttcctactgccacagtgagagtatgatgggatttcgctaccgatgccaacagtgtcacaattaccagctctgtcaggactgcttctggaggggacatgccggtggttctcatagcaaccagcaccaaatgaaagagtacacgtcatggaaatcacctgctaagaagctgactaatgcattaagcaagtccctgagctgtgcttccagccgtgaacctttgcaccccatgttcccagatcagcctgagaagccactcaacttggctcacatcgttgatacttggcctcccagacctgtaaccagcatgaacgacaccctgttctcccactctgttccctcctcaggaagtccttttattaccaggagctctcctcccaaggacagtgaagtagagcagaacaaactgctggctagggctgctccagcttttctgaagggcaaagggatacagtacagcctgaatgtggcagacaggctagctgatgaacatgttctcatcgggttgtatgtcaacatgctccggaacaacccctcatgcatgcttgagagttcaaaccggcttgatgaagaacacaggctaattgccaggtatgcggcaaggctggcagcagagtcctcttcgtctcagccacctcagcagagaagtgctcctgacatctctttcaccatcgatgcgaataagcagcaaaggcagctgattgctgagctagaaaacaagaacagagaaatcttacaggagatccagagacttcggctagagcatgaacaagcttctcagcccacgccagagaaggcacagcaaaaccccaccctgctggcagaactccggctcctcagacagcgcaaagatgagctggaacagagaatgtctgctctccaggagagccggagagagctaatggtccagttggagggtctcatgaagctactaaaggaagaagaactgaagcagggagtaagttatgtcccctactgcaggtcttaactaacagtggaggggcctgccgacctgcggttttctcattgcttttgctctaatgtatgttcatgcttcagtttggaaagagaaaaaagtcatactaatttgcttctttttcaatgtagtgcttgaattgagatatataaatttagcattttttataactatcactactatccacatcaaaagaagaactatgacatcttttagaaaagggaacgaattgtcatttattggaaacattttagatccccagaggtataagtttcaaaccagtcttagcttttcaagttgttgatcagacccttctcttaacagagagataccacagtcactagagataccctgaggttcatgtcatcccaaaacccacagcactcagaagctaacctctacacccactcacactgtgagtattcagttcggtttcattttactgaaaacctgtgaaacctctttttataaaaatcaggcaattaaatcccttttcatcacacaattattgagccttgttccccatggctcaccaaaatgtgctcaattttgtgagagaaagactgtactccataactgactattcacgtcccatctttttggctcttccccaaagcagaatccttactgttggttgacagtaatctctttttaaaaagtaactctcagctttttccttagcaccagagcctttcggctccgggagacgagagggtcattacatacttttttttttttctggaaataggggcattgtgactttatagcctaaactggagctgtctgaacctgtggtcaggctcaagagccagcagggggagcagcaaactcaaaaaaaaaaacaaattaaattaaattaaattaaattaaatagaagcaaaataaaagcagctttaatttcaagtgcatgtaccacgctatgtatgacaatatatcccactcactagcattatttaaaagtttcacattatttccatggatcaattagaaccacaacctgtccaatttcaacgtatctttcatttcttctgtatgctcttttctattattcattatgtgtgtttgtgtgtaacaaagaatgtttggaaaatgctggacacatttttacccttcattcccatggtctgtaaaaaaggaaagtgtaaaatcaatctgtaatgtcagacaataaagataatgtattacattattttgtattttgtgaaaaaaattactttactaaattaaagtcaaattttaacagaagacagtccccctgggtgaaggacacataacacatacagcctgtataattgcccatgaatgcatacatggggtattgctattgtatttccaatacacttagatcatggtaaagaaaaatgccttcttcatgatacttctctgcaaatggcttctttcctctcctgtctcttatttagcatgtgcatagaaaaaggaaataaggttcaattataacctccctcctcctagcagagagagagggcaatcatcctgtcgtcatcagccttgctttagccatttcccttggggatactttccaggccatttcccaggcagcaggatcttgaaaggctcctatggaccaggaagttcgtaaacagatggatgcacagagccaaactgtggcagtgcccccaaggtggcgccactgccccctcaccttccagctcctctccaccaagcccctcagcagcttctgcatctcagggggccaacagcgggtactgcggtgtcggtacccaaggaccagggcccacgtcacccagatgtcagcaatacatcgtctgggtagtggcagagtttgcctatttcacttatttatcttttttgcttttatacacaagcctcttttcaaaaaggacctgaggcagcttacaacaaaagatataaacagtgacttcataaaattgaaatagaaaaatcaaaaactaaagaaaataaaatgtgaatatgctaatcttaagggacaaggatgttactctgcatgttctggcaatgaagcaaaaaaaaaaaaaaaaggaaaattatcggtggttttatcagtacagaaataccacttctcaggggaacaaaatttctgttggcataaaatatgaaagaaagtcttcactgggagctttataggagtactggacgatagaaaaggaaaaaaagcagtcatagatttcatgtggctgtttcttatactgacctcagtcaaaattaaaagcagaaccttatcaatcccagccctatagaggcggttctgcaaggaaataaacaaatgctgtccaaatatagacttctcatggtaaaacatgatctaaggagagaatttagaggttttagactggcatctgcttctaaattctgtttttatttatgagtgtttctcccctttggggacattgtctttgtaaaaccaaacttagaacacccccacacaacaaattgtgctggatttaataacctctacttgctttatcataagtctgtgtggttcaatgtagtgttttattatactggcatatataatttctacttacattgtttcttgttagaggtaatgcatgaatttatccctctcgaggagagaacatgaattaaaaaaaatagtgcctgtaatataatgtgatgattatgatatcacaagcaataaatttttttttacaaaacttg

SEQ ID NO: 117502 - protein, 374 aa, Artificial Sequence
  derived and/or modified sequence
MIEDSGKRGNTMAERRQLFAEMRAQDLDRIRLSTYRTACKLRFVQKKCNLHLVDIWNVIEALRENALNNLDPNTELNVSRLEAVLSTIFYQLNKRMPTTHQIHVEQSISLLLNFLLAAFDPEGHGKISVFAVKMALATLCGGKIMDKLRYIFSMISDSSGVMVYGRYDQFLREVLKLPTAVFEGPSFGYTEQSARSCFSQQKKVTLNGFLDTLMSDPPPQCLVWLPLLHRLANVENVFHPVECSYCHSESMMGFRYRCQQCHNYQLCQDCFWRGHAGGSHSNQHQMKEYTSWKSPAKKLTNALSKSLSCASSREPLHPMFPDQPEKPLNLAHIVDTWPPRPVTSMNDTLFSHSVPSSGSPFITRSSDGAFGGCV

SEQ ID NO: 117503 - DNA, 1125 bp, Artificial Sequence
  derived and/or modified sequence
atgattgaggattctggtaagcggggtaatacaatggcagaacgaagacagttgtttgcagaaatgcgtgctcaagatcttgacaggattcggctgagtacctataggactgcgtgtaaattgcgatttgtgcagaaaaaatgcaacctgcacctggtggacatttggaacgtgatcgaagcccttcgggaaaatgctcttaataacctggacccaaatactgagctcaatgtgagcagactggaggccgtgcttagcacgatattttaccagcttaataaacgcatgccaactacacatcagatccatgtcgaacagtctatatcactcctcctcaactttctgttagctgcattcgaccccgaaggccacggcaagatatcagtgttcgccgttaaaatggctctagcgaccctatgcggggggaaaataatggataagcttaggtatatattctcaatgatcagcgattcttcaggggtgatggtgtacgggcgctacgaccagtttctcagagaagtccttaagcttcccacagccgtatttgaagggcccagcttcggctatactgagcagagcgcacggagctgtttctcacagcaaaagaaggtgactctgaatggcttcctcgataccctgatgtcggatccccctccccagtgcctcgtatggctgccactgcttcacagacttgccaatgtggagaacgtgtttcacccggtcgaatgctcatactgtcacagcgagtccatgatgggattccgatatcgctgccagcagtgccacaactaccagctttgccaggactgcttctggcgcggacacgcgggggggagtcatagcaaccagcaccagatgaaagaatatacttcatggaagtcacctgctaagaagctcaccaacgcgctctccaaatctcttagttgcgccagtagccgggaacctctgcaccccatgttccccgaccagcctgaaaagccacttaatctcgcgcatatcgtagatacctggcccccgcggcctgtgacatctatgaatgacaccttattttctcatagtgtccccagcagcgggtccccctttatcacccgctcgtccgatggcgctttcggcgggtgtgtgtag

SEQ ID NO: 117504 - DNA, 1125 bp, Artificial Sequence
  derived and/or modified sequence
atgattgaagattctgggaagaggggcaacaccatggccgagcggcggcagctgtttgctgagatgagggcccaggacctggaccgcatccggctgagcacctacagaacagcctgcaagctgcgctttgtgcagaagaagtgcaacctgcacctggtggacatctggaatgtgattgaggccctgcgggagaatgccctgaacaacctggaccccaacacagagctgaatgtgtcccggctggaggccgtgctgagcaccatcttctaccagctgaacaagaggatgcccaccacccaccagatccacgtggagcagagcatcagcctgctgctgaacttcctgctggccgcctttgatcctgagggccacggcaagatctctgtgtttgctgtgaagatggccctggccaccctgtgtggcggcaagatcatggacaagctgcgctacatcttctccatgatcagtgacagcagtggagtgatggtgtatggccgctatgaccagttcctgcgggaggtgctgaagctgcccacagctgtgtttgagggccccagctttggctacacagagcagagcgcccggagctgcttcagccagcagaagaaggtgaccctgaatggcttcctggacaccctgatgtctgaccccccaccccagtgcctggtgtggctgcccctgctgcaccggctggccaacgtggagaatgtgttccaccctgtggagtgcagctactgccacagcgagagcatgatgggcttccgctaccgctgccagcagtgccacaactaccagctgtgccaggactgcttctggaggggccacgccggcggcagccacagcaaccagcaccagatgaaggagtacacctcctggaagagccctgccaagaagctgaccaatgccctgagcaagagcctgagctgtgccagcagccgggagcccctgcaccccatgtttcctgaccagcctgagaagcccctgaacctggcccacatcgtggacacctggccacccaggcctgtgacctccatgaatgacaccctcttcagccacagcgtgcccagcagcggcagccccttcatcaccaggagcagtgatggagccttcggcggctgtgtgtag

SEQ ID NO: 117505 - DNA, 1125 bp, Artificial Sequence
  derived and/or modified sequence
atgatcgaggacagcggcaagcggggcaacaccatggccgagcggaggcagctgttcgcagaaatgagggctcaagacctggatagaatacgcttgtcaacctatcggaccgcctgcaagctgagatttgttcagaagaagtgcaatctgcacctcgttgatatatggaacgtgattgaggcactgcgggaaaatgcgctcaacaacctcgatcccaacaccgagttgaacgtgtccagactggaggccgttctatcaacaattttctaccaactgaataagagaatgcctacaacacaccagatacacgtagaacaatcaatctcgcttctgctcaattttctgctggccgcgtttgacccagaagggcatggtaagatcagtgttttcgctgttaaaatggccctcgccacattatgtggcgggaagattatggataaactgaggtacatttttagcatgataagtgatagctccggagtgatggtctacggccgctatgaccagttcctgcgcgaggttctgaagctccctactgctgtctttgagggtccaagcttcggatatactgagcagtcagctcgctcatgtttcagccagcagaagaaagttactctgaacggatttctcgataccctcatgtcagatccgccccctcaatgcctggtgtggctgcccctgctccacagactagcgaatgtcgagaatgtcttccatcctgtcgagtgcagctactgtcacagcgaatcaatgatggggttccgctaccggtgccagcagtgccataattaccagctttgccaagactgcttctggcggggccacgccggcggtagtcactcaaaccagcatcaaatgaaagaatacaccagctggaagtcgcccgccaaaaagctgacaaacgctctgtctaagagccttagctgtgcctcctcccgggagccactacaccccatgttccctgaccaaccagagaaaccgttgaacctggcccacatcgttgacacatggccgcctcgacccgtgacctccatgaatgatactcttttctcccactccgtgcccagttccggaagccctttcatcaccaggtcatcagacggtgcgttcggcggatgcgtttag

SEQ ID NO: 117506 - DNA, 1125 bp, Artificial Sequence
  derived and/or modified sequence
atgatcgaggatagtggcaaacgtggaaacactatggctgagcgtagacagttatttgcagagatgcgggcacaagatctggaccgcatcaggctatccacatacaggacagcgtgtaaactgcggtttgtccagaaaaagtgtaacctgcacttagttgatatctggaacgtgattgaggctcttagggaaaatgcactgaacaacttagatccaaatactgagctgaacgtgtcccgcctcgaggcagttctgagtacgatcttttaccaactcaacaaaaggatgcccaccacccatcagatccacgtggagcagtccatttccttgctactaaatttcctcctggctgcgttcgaccctgaaggacacgggaagatctctgtgttcgccgtgaagatggctcttgctacgctgtgtgggggtaagatcatggataaactgagatacattttttccatgattagtgattcctctggggtcatggtgtacggacgctacgaccagtttctgcgtgaggtcctgaaactcccaactgccgttttcgaggggccaagtttcgggtacactgaacagagcgccagatcatgcttttcacagcagaagaaagtcacgcttaatggcttcctcgacaccctgatgtctgatccaccacctcagtgccttgtgtggctgcctctgctgcatcgacttgcaaatgtggagaacgtgttccatcctgtggagtgtagctactgtcacagcgagagcatgatgggattccggtaccgctgtcagcaatgccacaactaccaattatgtcaggactgcttttggaggggtcacgcgggtggctcccactctaatcagcatcagatgaaggagtacacctcgtggaagagccctgccaagaaactgacgaacgcactgtccaagtctttgtcctgcgcctcctctagagaacctctgcatccaatgtttccagaccagcccgagaagccactcaatctagctcacatagtggacacctggccaccccgacccgtgacttcaatgaatgatacactcttttctcattcagtccctagcagcgggtctccttttatcacccgcagcagtgatggtgcctttggcggttgtgtgtag

SEQ ID NO: 117507 - DNA, 1125 bp, Artificial Sequence
  derived and/or modified sequence
atgatcgaggacagcggcaagagaggcaacaccatggccgagagaagacagctgttcgccgagatgagagcccaggacctggacagaatcagactgagcacctacagaaccgcctgcaagctgagattcgtgcagaagaagtgcaacctgcacctggtggacatctggaacgtgatcgaggccctgagagagaacgccctgaacaacctggaccccaacaccgagctgaacgtgagcagactggaggccgtgctgagcaccatcttctaccagctgaacaagagaatgcccaccacccaccagatccacgtggagcagagcatcagcctgctgctgaacttcctgctggccgccttcgaccccgagggccacggcaagatcagcgtgttcgccgtgaagatggccctggccaccctgtgcggcggcaagatcatggacaagctgagatacatcttcagcatgatcagcgacagcagcggcgtgatggtgtacggcagatacgaccagttcctgagagaggtgctgaagctgcccaccgccgtgttcgagggccccagcttcggctacaccgagcagagcgccagaagctgcttcagccagcagaagaaggtgaccctgaacggcttcctggacaccctgatgagcgacccccccccccagtgcctggtgtggctgcccctgctgcacagactggccaacgtggagaacgtgttccaccccgtggagtgcagctactgccacagcgagagcatgatgggcttcagatacagatgccagcagtgccacaactaccagctgtgccaggactgcttctggagaggccacgccggcggcagccacagcaaccagcaccagatgaaggagtacaccagctggaagagccccgccaagaagctgaccaacgccctgagcaagagcctgagctgcgccagcagcagagagcccctgcaccccatgttccccgaccagcccgagaagcccctgaacctggcccacatcgtggacacctggccccccagacccgtgaccagcatgaacgacaccctgttcagccacagcgtgcccagcagcggcagccccttcatcaccagaagcagcgacggcgccttcggcggctgcgtgtag

SEQ ID NO: 117508 - DNA, 1706 bp, Artificial Sequence
  derived and/or modified sequence
caggaaaccctggtactggcagcagccagcctctgctgtgcccacatgacccacaactctggcagcggacccggcacttccaacattattaaataataagaaagcggctcctactccaggctcaaacctccctgcagaccaatggacaccttctaagagtttggcgagtcagtgactgaagcgcccgtccattccaagataaataggatttaccaatccttggatgaagtgcttgggaagtctttaagtgccataatcaactgccatttcaaagaatatagatggttttgaaaagttcatgctgtcccttcattgaattttagaatgattgaagatagtgggaaaagaggaaataccatggcagaaagaagacagctgtttgcagagatgagggctcaagatctggatcgcatccgactctccacctacagaacagcatgcaagcttaggtttgttcagaagaaatgcaatttgcacctggtggacatatggaatgtcatagaagcattgcgggaaaatgctctgaacaacctggacccaaacactgaactcaacgtgtcccgcttagaggctgtgctctccactattttttaccagctcaacaaacggatgccaaccactcaccaaatccatgtggagcagtccatcagcctcctccttaacttcctgcttgcagcgtttgatccggaaggccatggtaaaatttcagtatttgctgtcaaaatggctttagccacattgtgtggagggaagatcatggacaaattaagatatattttctcaatgatttctgactccagtggggtgatggtttatggacgatatgaccaattccttcgggaagttctcaaactacccacggcagtttttgaaggtccttcatttggttacacagaacagtcagccagatcctgtttctcccaacagaaaaaagtcacgttaaatggtttcttggacacgcttatgtcagatcctcccccgcagtgtctggtctggttgcctcttctgcatcgactagcaaatgtggaaaatgtcttccatccggttgagtgttcctactgccacagtgagagtatgatgggatttcgctaccgatgccaacagtgtcacaattaccagctctgtcaggactgcttctggaggggacatgccggtggttctcatagcaaccagcaccaaatgaaagagtacacgtcatggaaatcacctgctaagaagctgactaatgcattaagcaagtccctgagctgtgcttccagccgtgaacctttgcaccccatgttcccagatcagcctgagaagccactcaacttggctcacatcgttgatacttggcctcccagacctgtaaccagcatgaacgacaccctgttctcccactctgttccctcctcaggaagtccttttattaccaggagctcggacggtgcttttggtggatgcgtctagatggataacatgacttcttctaccctaaaatattcctataatactttgagctgttctggttcctccagggtgcatggtacccattaacccaaaatatgattatttcccttttttcccattttcagtcattttggaatgttctctgtgaaccacagttgtgttgtttaaagctcacatttctttctgtcaccacagagattggcctacggtttctgttttgagggtgctgttcaataaagctgtgtacactaaatgtc

SEQ ID NO: 117509 - protein, 394 aa, Artificial Sequence
  derived and/or modified sequence
MVTMEELREMDCSVLKRLMNRDENGGGAGGSGSHGTLGLPSGGKCLLLDCRPFLAHSAGYILGSVNVRCNTIVRRRAKGSVSLEQILPAEEEVRARLRSGLYSAVIVYDERSPRAESLREDSTVSLVVQALRRNAERTDICLLKGGYERFSSEYPEFCSKTKALAAIPPPVPPSATEPLDLGCSSCGTPLHDQGGPVEILPFLYLGSAYHAARRDMLDALGITALLNVSSDCPNHFEGHYQYKCIPVEDNHKADISSWFMEAIEYIDAVKDCRGRVLVHCQAGISRSATICLAYLMMKKRVRLEEAFEFVKQRRSIISPNFSFMGQLLQFESQVLATSCAAEAASPSGPLRERGKTPATPTSQFVFSFPVSVGVHSAPSSLPYLHSPITTSPSC

SEQ ID NO: 117510 - DNA, 1185 bp, Artificial Sequence
  derived and/or modified sequence
atggtgacgatggaggaactacgggagatggattgtagcgtactcaagcgcctgatgaatcgggatgagaacggcggcggcgccggcggatccggctcccacggtacgctcgggcttccctcgggcggcaagtgtttactcctggactgccgacccttcttagcccattcagccggctatatcctcggatccgtgaatgtacgctgcaacacaatcgtgaggcgacgggccaagggctccgtttcactggagcagattctgcctgccgaagaggaggttagagcacggctacgatccggcctgtattcagccgtgatcgtgtacgatgaacggtcccctcgcgcagagagcctgagggaagattcgacagttagtctggtcgtccaagccctgcggcgcaatgcagaacgcaccgacatctgtttgttgaaagggggatatgagaggttttcaagtgagtatccagaattctgcagtaagactaaagctttggccgccatccctcccccggtccctccctctgccacagaaccacttgacttgggatgtagttcatgtggaacacccctgcacgaccaaggggggcccgttgaaattctaccattcctttacctgggctcagcataccacgccgctagacgggatatgcttgacgccctgggtatcaccgcacttctgaacgttagctcagactgtcccaaccatttcgagggacattatcagtataaatgtatcccagttgaggacaaccataaggctgacatttcctcctggttcatggaagcaatcgagtatatcgatgcggtgaaagactgcagaggtagagtcttggtgcattgtcaggccggtattagcaggagtgcaacgatttgtctagcctaccttatgatgaagaagcgtgtgcgtctggaagaggcatttgaattcgttaagcagcgtaggtctatcattagtcctaacttttcattcatgggccagctgctgcagtttgagagtcaggtgctcgccacctcatgcgctgcggaagctgccagcccatccggaccgctaagagagagaggcaaaacccccgccacacctactagccagttcgtcttctccttcccggtgagcgtgggcgtgcacagtgccccaagtagcctcccttacctgcacagcccaattactacttcaccaagctgttag

SEQ ID NO: 117511 - DNA, 1185 bp, Artificial Sequence
  derived and/or modified sequence
atggtgaccatggaggagctgcgggagatggactgcagcgtgctgaagaggctgatgaacagagatgaaaatggaggaggagctgggggcagcggcagccacggcaccctgggcctgcccagcggcggcaagtgcctgctgctggactgccggcccttcctggcccacagcgctggctacatcctgggctctgtgaatgtgcgctgcaacaccatcgtgagaagaagagccaagggctctgtgtccctggagcagatcctgcctgctgaggaggaggtgcgggcccggctgcggagcggcctgtacagcgctgtgattgtgtatgatgagaggagccccagggctgagagcctgcgggaggacagcacagtgtccctggtggtgcaggccctgcggagaaatgctgagaggacagacatctgcctgctgaagggcggctatgagcgcttcagcagcgagtacccagagttctgcagcaagaccaaggccctggccgccatccccccacctgtgccccccagcgccacagagcccctggacctgggctgcagcagctgtggcacccccctgcatgaccagggcggccctgtggagatcctgcccttcctgtacctgggcagcgcctaccacgccgcccggcgggacatgctggatgccctgggcatcacagccctgctgaatgtgtccagtgactgccccaaccactttgagggccactaccagtacaagtgcatccctgtggaggacaaccacaaggctgacatcagctcctggttcatggaggccatcgagtacattgatgctgtgaaggactgccggggccgggtgctggtgcactgccaggccggcatcagccgcagcgccaccatctgcctggcctacctgatgatgaagaagagggtgcggctggaggaggcctttgaatttgtgaagcagaggaggagcatcatcagccccaacttctccttcatgggccagctgctgcagtttgagagccaggtgctggccaccagctgtgccgctgaggccgccagccccagcggccccctgcgggagcggggcaagaccccagccacccccaccagccagtttgtgttctccttccctgtgtctgtgggcgtgcacagcgcccccagcagcctgccctacctgcacagccccatcaccaccagccccagctgctag

SEQ ID NO: 117512 - DNA, 1185 bp, Artificial Sequence
  derived and/or modified sequence
atggtgaccatggaggagctgcgggagatggactgcagcgtgctgaaacggcttatgaatagagacgaaaacggagggggcgccggcggttccgggtcacacggtacgctgggccttccatccggtgggaagtgtcttctccttgactgccgacccttcctggcccatagcgccggctatattctggggtcagtgaatgttcgttgcaacaccatcgtgagacgccgggctaaaggaagcgtgagcttggaacaaatccttcctgccgaagaggaagtaagggctagactcaggtcagggctgtattcagcagttatagtatacgatgaaagaagcccaagagccgaatcactaagagaggactctacagtttcattagtagtccaggccctgcgccggaacgctgagagaactgatatttgcttactcaagggagggtatgagcgcttctcaagcgaatatcccgagttttgttccaaaaccaaagcacttgctgcgattcctccgcctgttcctcctagcgccaccgaacctctggatcttgggtgctcttcgtgtgggacccctctacacgaccagggaggacctgtggagatattgccttttctctacctgggcagcgcgtaccacgctgctcgcagggacatgctggatgccctgggcattaccgctctcttaaatgtcagttccgactgccctaatcatttcgaggggcattatcagtataagtgcattccagtggaggacaatcacaaagctgacatctcctcctggtttatggaagccattgagtatatcgacgcagtgaaggactgtcggggcagagttctcgtccactgccaagccgggatctcacgatccgccacaatctgtctggcatacttaatgatgaaaaagagagtccggctcgaggaggctttcgaatttgtaaagcagcggcggagtatcataagccccaacttcagctttatgggccaactcttacagtttgaatcgcaggtcttggcaactagctgtgccgcagaggctgctagccctagtggaccacttcgggaacggggaaagacaccggccacacccacaagccagttcgtatttagctttcctgtctctgtgggggtacatagtgctccatcctcacttccctacttgcacagcccgatcaccaccagcccaagttgttag

SEQ ID NO: 117513 - DNA, 1185 bp, Artificial Sequence
  derived and/or modified sequence
atggttaccatggaagagcttcgggagatggattgttctgtattgaaacgcctgatgaatcgggatgaaaacggagggggtgccggaggctcagggagtcacgggacgctgggcctcccctcgggcggtaagtgtttgctgctggactgtcggcctttcctcgcacattccgcaggctatatccttggctcagtcaacgttagatgtaacacgatcgtccggagaagagcaaaagggtccgtgtctttggaacagatcttgcccgctgaagaagaagtgagggccagactgaggagcggtctgtattcagctgtcatcgtttacgatgaacggtcacctagagcagagtcactgcgagaagacagcaccgtgtccctagttgtccaagcccttcggcgtaacgcagaacgcacagacatctgcttgctgaaggggggttacgaacgattcagcagtgagtaccccgagttctgttctaagacgaaggctctggctgccattccaccacccgtgcccccttccgctacagaaccattagatctgggttgctctagctgcgggacacctctgcatgatcaggggggaccagtggagattctgccattcctgtaccttggttccgcttaccatgctgcaagaagggatatgctggacgcacttggtattaccgcgcttctgaacgtgtctagcgattgtcccaatcacttcgaggggcattaccagtacaagtgcatacctgttgaggataatcataaggccgacatcagttcctggttcatggaggctatcgagtatatcgatgccgttaaggattgtcggggtagggtgctggtgcattgccaagctggcatctctcgcagcgcaaccatttgtctagcttatctaatgatgaaaaagagggttaggctggaggaggcttttgagtttgtgaagcagcgcaggtctatcatcagccctaatttctcttttatgggacagctccttcagtttgaaagccaggtgctcgccacgtcatgcgccgcagaggctgccagcccctctgggccacttagagagaggggcaagaccccagccaccccaacgtctcagtttgtgttttcgttcccagtctcagtgggggttcactcagcgcctagctccctaccgtaccttcattctcctattacaacaagtccaagctgttag

SEQ ID NO: 117514 - DNA, 1185 bp, Artificial Sequence
  derived and/or modified sequence
atggtgaccatggaggagctgagagagatggactgcagcgtgctgaagagactgatgaacagagacgagaacggcggcggcgccggcggcagcggcagccacggcaccctgggcctgcccagcggcggcaagtgcctgctgctggactgcagacccttcctggcccacagcgccggctacatcctgggcagcgtgaacgtgagatgcaacaccatcgtgagaagaagagccaagggcagcgtgagcctggagcagatcctgcccgccgaggaggaggtgagagccagactgagaagcggcctgtacagcgccgtgatcgtgtacgacgagagaagccccagagccgagagcctgagagaggacagcaccgtgagcctggtggtgcaggccctgagaagaaacgccgagagaaccgacatctgcctgctgaagggcggctacgagagattcagcagcgagtaccccgagttctgcagcaagaccaaggccctggccgccatccccccccccgtgccccccagcgccaccgagcccctggacctgggctgcagcagctgcggcacccccctgcacgaccagggcggccccgtggagatcctgcccttcctgtacctgggcagcgcctaccacgccgccagaagagacatgctggacgccctgggcatcaccgccctgctgaacgtgagcagcgactgccccaaccacttcgagggccactaccagtacaagtgcatccccgtggaggacaaccacaaggccgacatcagcagctggttcatggaggccatcgagtacatcgacgccgtgaaggactgcagaggcagagtgctggtgcactgccaggccggcatcagcagaagcgccaccatctgcctggcctacctgatgatgaagaagagagtgagactggaggaggccttcgagttcgtgaagcagagaagaagcatcatcagccccaacttcagcttcatgggccagctgctgcagttcgagagccaggtgctggccaccagctgcgccgccgaggccgccagccccagcggccccctgagagagagaggcaagacccccgccacccccaccagccagttcgtgttcagcttccccgtgagcgtgggcgtgcacagcgcccccagcagcctgccctacctgcacagccccatcaccaccagccccagctgctag

SEQ ID NO: 117515 - DNA, 5537 bp, Artificial Sequence
  derived and/or modified sequence
gctgagcgccggaggagcgtaggcagggcagcgctggcgccagtggcgacaggagccgcgcgaccggcaaaaatacacgggaggccgtcgccgaaaagagtccgcggtcctctctcgtaaacacactctcctccaccggcgcctccccctccgctctgcgcgccgcccggctgggcgcccgaggccgctccgactgctatgtgaccgcgaggctgcgggaggaaggggacagggaagaagaggctctcccgcgggagcccttgaggaccaagtttgcggccacttctgcaggcgtcccttcttagctctcgcccgcccctttctgcagcctaggcggcccgggttctcttctcttcctcgcgcgcccagccgcctcggttcccggcgaccatggtgacgatggaggagctgcgggagatggactgcagtgtgctcaaaaggctgatgaaccgggacgagaatggcggcggcgcgggcggcagcggcagccacggcaccctggggctgccgagcggcggcaagtgcctgctgctggactgcagaccgttcctggcgcacagcgcgggctacatcctaggttcggtcaacgtgcgctgtaacaccatcgtgcggcggcgggctaagggctccgtgagcctggagcagatcctgcccgccgaggaggaggtacgcgcccgcttgcgctccggcctctactcggcggtcatcgtctacgacgagcgcagcccgcgcgccgagagcctccgcgaggacagcaccgtgtcgctggtggtgcaggcgctgcgccgcaacgccgagcgcaccgacatctgcctgctcaaaggcggctatgagaggttttcctccgagtacccagaattctgttctaaaaccaaggccctggcagccatcccacccccggttccccccagtgccacagagcccttggacctgggctgcagctcctgtgggaccccactacacgaccaggggggtcctgtggagatccttcccttcctctacctcggcagtgcctaccatgctgcccggagagacatgctggacgccctgggcatcacggctctgttgaatgtctcctcggactgcccaaaccactttgaaggacactatcagtacaagtgcatcccagtggaagataaccacaaggccgacatcagctcctggttcatggaagccatagagtacatcgatgccgtgaaggactgccgtgggcgcgtgctggtgcactgccaggcgggcatctcgcggtcggccaccatctgcctggcctacctgatgatgaagaaacgggtgaggctggaggaggccttcgagttcgttaagcagcgccgcagcatcatctcgcccaacttcagcttcatggggcagctgctgcagttcgagtcccaggtgctggccacgtcctgtgctgcggaggctgctagcccctcgggacccctgcgggagcggggcaagacccccgccacccccacctcgcagttcgtcttcagctttccggtctccgtgggcgtgcactcggcccccagcagcctgccctacctgcacagccccatcaccacctctcccagctgttagagccgccctgggggccccagaaccagagctggctcccagcaagggtaggacgggccgcatgcgggcagaaagttgggactgagcagctgggagcaggcgaccgagctccttccccatcatttctccttggccaacgacgaggccagccagaatggcaataaggactccgaatacataataaaagcaaacagaacactccaacttagagcaataacggctgccgcagcagccagggaagaccttggtttggtttatgtgtcagtttcacttttccgatagaaatttcttacctcatttttttaagcagtaaggcttgaagtgatgaaacccacagatcctagcaaatgtgcccaaccagctttactaaagggggaggaagggagggcaaagggatgagaagacaagtttcccagaagtgcctggttctgtgtacttgtccctttgttgtcgttgttgtagttaaaggaatttcattttttaaaagaaatcttcgaaggtgtggttttcatttctcagtcaccaacagatgaataattatgcttaataataaagtatttattaagactttcttcagagtatgaaagtacaaaaagtctagttacagtggatttagaatatatttatgttgatgtcaaacagctgagcaccgtagcatgcagatgtcaaggcagttaggaagtaaatggtgtcttgtagatatgtgcaaggtagcatgatgagcaacttgagtttgttgccactgagaagcaggcgggttgggtgggaggaggaagaaagggaagaattaggtttgaattgctttttaaaaaaaaaagaaaagaaaaagacagcatctcactatgttgccaaggctcatcttgagaagcaggcgggttgggtgggaggaggaagaaagggaagaattaggtttgaattgcttttttaaaaaaaaagaaaagaaaaaaaaagacagcatctcactatgttgccaaggctcatctcaagctcttgggctcaagagatcctcccacctcggcctcctgagtagctgggactgcaggtgtgtgtcatcatgaccaatgtgaattgcttttgaagctggttcatgggcatgtaggccaccgaagcaattttagaccacagtaagtcaagcttttttccctccgatgatcactgggtggttgcagcattttttgcataaacctgcctaagacttgtctatcgtctgtgatcaatatgccatattacactaaggtgctcctggaaaattgggtgcagttcaaattttcctacagcaaatcatttggcaaggccagccattggggaaaccagacaactagagataaccctgaaatgaatccttttgtaaattgaagcaccatcttttctttttttgcataaattggaggttttaattttagggcagttacctgaagtgaaatataccaacaatttcttgtgttctttaaattcctagttaggtgaatatttttgaaggtcctcttttgaataaagaggggaatggacaccacatttcaggtcttctcgaagtgtggaagggcaagagagcatcagtgagctgatggtggattgcttacatcggattccattggtatgaatttcccaaactggaaatcaaagcgccagggtggggttggggctgactgctggtgagggggctggccgctggctcccgtgacgtgcgtcatgggcacgcaggcgccattttgaatctatcgtcggcacgtgggtgccattttgaatccttagttgggcctttctaaatggagaatggctttggagggagacacgttttctgtggggagggtttgggggggagggaggagggaacaagctacatgctattttgtttgtagtattgtggaacagtcttgttatggagtgccagcttagaggttgttgcaaacttgtctagaagtgagagcatggttttttttagccctttgagagtctacatctaatgaacattcttgctcacccataaataacgtcaagcctcaatgtcaccgtcacgttgggatactctttctcatctggcatcctagacaggacaaggttggttacctttccttccatgaaccatgaacctgtgacggcatcattcatcctgacttcaccaagctccgcctgtgggtgaggccagagctcccactggcaatttttagaagagccagaggctccctgcttcctctagaaataacagttcagggtgaagcatggagggtttcagttcccagacaatggaaccatttagagacaacacagttggacatttccactttttccttgattcctggaagtccagtgggttctgcagctgaaaaagccctgggtcccagcagcagagagacaggacagaggggatgcttgggcggggagggacggtaacctgcagaacagattccatttttatagaacgagtacacgtttgctaaaacagtcctgctttcccagactggattcccaccacagggacagtcggaactcaggactagctccagcgacatctttcctccgaattcaagccttctatcacaatgtcaaaacagctatttataaagccattttcattgtacttgataacagcacgagtcccaaaacttttagaaataaaataggacattggcttgattgaaaagagggactttttaaaaattgttctttcgtcagaagccttttggatgacttacaatagctctgatgaagataccaccccagcgtcagtccaataggtcagtgagtttcaacaggcatccatccctcccatgaagggattctggtgatgggaagtttctgtaatgacaggaaagcattgaccctcattgattgtcaactttggtattagccatgaaagacaggatgctcattgggtgttctgtagagtgaggaatgctgcctattccctcccagaacgtctgacccaggggtgtgtgttgaggagccctgggggaaatggaccaagttttcccacagagcagtattaggctgaagagcaggtgactggtaggccccagctcccatcattccctcccaaagccattttgttcagttgctcatccacgctggattccagagagttttccaatttgggaagccatgagaaaggtttttaaatcttgggaagatggagagagggacataggatagttgactccaacatgacaggaagaggctggagattgggaattggccatcaaccaagcctgtagtagtaaagccatggtcccgcattggaattacttggggaacttatacagttctgatacccaggctctcctagaccagttcaaccaattctaggtgggggactcaggcatcagtgtgtttcgtagctccccgggtgttttccctgtgcagccgagcttgggaaactgccatgctttttggatgtcaaggcgctgttggaggctgggtgtgacagcacagagccaggttgtcttgtggaaaccacagccacgggtttgccactggctcagcatggcctcactgccagtcccagcctggctgagggacaagatggtttctcttgggagttcctgagtggagcacccttccaggctttttgaaagccagctgatctgtggagccttgttaagggactcaatacggtgtttggatattgatgtttttccttgagactgtcttgtccatcaataaagatggaggatgtctcctctttgaaccccgcttccccaccagtactctctctcccttagagtttatgagttattcaaggaggagacttcttaaagacagcaacgcaattcttgtaacttgtgtaaatagccccatctttcagagtgataccatttctacatttgataatgcctgtattcctgtaggatgtatatagtttaggggattttttttttgtttggttttgttttttagaagtcaatatgtctggttttatttattgcttgaaaaagatcatttgaaaaaaataaatacattttcaacca

SEQ ID NO: 117516 - protein, 541 aa, Artificial Sequence
  derived and/or modified sequence
MHTGGETSACKPSSVRLAPSFSFHAAGLQMAGQMPHSHQYSDRRQPNISDQQVSALSYSDQIQQPLTNQVMPDIVMLQRRMPQTFRDPATAPLRKLSVDLIKTYKHINEVYYAKKKRRHQQGQGDDSSHKKERKVYNDGYDDDNYDYIVKNGEKWMDRYEIDSLIGKGSFGQVVKAYDRVEQEWVAIKIIKNKKAFLNQAQIEVRLLELMNKHDTEMKYYIVHLKRHFMFRNHLCLVFEMLSYNLYDLLRNTNFRGVSLNLTRKFAQQMCTALLFLATPELSIIHCDLKPENILLCNPKRSAIKIVDFGSSCQLGQRIYQYIQSRFYRSPEVLLGMPYDLAIDMWSLGCILVEMHTGEPLFSGANEVDQMNKIVEVLGIPPAHILDQAPKARKFFEKLPDGTWNLKKTKDGKREYKPPGTRKLHNILGVETGGPGGRRAGESGHTVADYLKFKDLILRMLDYDPKTRIQPYYALQHSFFKKTADEGTNTSNSVSTSPAMEQSQSSGTTSSTSSSSVVEQHWMPGAFRMTVSFTLEVHDVPV

SEQ ID NO: 117517 - protein, 763 aa, Artificial Sequence
  derived and/or modified sequence
MHTGGETSACKPSSVRLAPSFSFHAAGLQMAGQMPHSHQYSDRRQPNISDQQVSALSYSDQIQQPLTNQVMPDIVMLQRRMPQTFRDPATAPLRKLSVDLIKTYKHINEVYYAKKKRRHQQGQGDDSSHKKERKVYNDGYDDDNYDYIVKNGEKWMDRYEIDSLIGKGSFGQVVKAYDRVEQEWVAIKIIKNKKAFLNQAQIEVRLLELMNKHDTEMKYYIVHLKRHFMFRNHLCLVFEMLSYNLYDLLRNTNFRGVSLNLTRKFAQQMCTALLFLATPELSIIHCDLKPENILLCNPKRSAIKIVDFGSSCQLGQRIYQYIQSRFYRSPEVLLGMPYDLAIDMWSLGCILVEMHTGEPLFSGANEVDQMNKIVEVLGIPPAHILDQAPKARKFFEKLPDGTWNLKKTKDGKREYKPPGTRKLHNILGVETGGPGGRRAGESGHTVADYLKFKDLILRMLDYDPKTRIQPYYALQHSFFKKTADEGTNTSNSVSTSPAMEQSQSSGTTSSTSSSSGGSSGTSNSGRARSDPTHQHRHSGGHFTAAVQAMDCETHSPQVRQQFPAPLGWSGTEAPTQVTVETHPVQETTFHVAPQQNALHHHHGNSSHHHHHHHHHHHHHGQQALGNRTRPRVYNSPTNSSSTQDSMEVGHSHHSMTSLSSSTTSSSTSSSSTGNQGNQAYQNRPVAANTLDFGQNGAMDVNLTVYSNPRQETGIAGHPTYQFSANTGPAHYMTEGHLTMRQGADREESPMTGVCVQQSPVASS

SEQ ID NO: 117518 - DNA, 2292 bp, Artificial Sequence
  derived and/or modified sequence
atgcacacgggtggagaaacatctgcttgtaaaccctctagcgtgagactcgcccccagctttagctttcacgccgcagggctccagatggctgggcagatgccccattcccaccagtactctgacaggcgacagcccaacattagtgaccagcaggtgtctgccctgagttactccgatcagattcagcagcctctgaccaaccaggtgatgcctgacattgtgatgcttcagcggaggatgccccagaccttcagagatccagccacagcgcctctcaggaagctatccgtcgatctgattaaaacatataaacacattaacgaggtatactacgctaagaaaaagcggaggcaccagcaggggcagggcgacgactcaagtcataagaaggagcgcaaggtctacaatgacggatatgacgacgacaattacgactacattgtcaaaaacggagagaaatggatggatcgatatgagatcgattcgctcattggcaaagggtctttcggccaggtggttaaagcatatgatagggtagagcaggaatgggtggccatcaaaatcatcaagaacaagaaggcttttttaaaccaggcacagattgaggtgcgtctgttagagcttatgaacaagcacgacacagagatgaagtactacattgtccatctcaagcggcactttatgttccgcaaccatctctgcctcgtgttcgaaatgctgtcttacaatctatatgatcttttgcgcaatacgaactttagaggcgtgtcactcaatttaacccggaagttcgcacagcaaatgtgcactgcgctgctttttttagcaacacccgagctgagtatcattcattgtgaccttaagcccgaaaatatcttactatgcaaccccaaaagaagcgcgatcaaaattgtagacttcggatcatcatgtcaattgggacagagaatctaccaatacatccagtccaggttctaccggtctcctgaagtgcttttagggatgccatacgatctggccatcgatatgtggagcctgggctgtatactggtggaaatgcatactggcgagccactgttcagtggagccaatgaggttgaccagatgaacaaaattgtggaagttttagggattccacctgcccacatcctcgaccaggctcctaaggctcgcaagttctttgagaaactcccagacggtacttggaacttgaaaaagaccaaggacggaaaacgagaatataaaccccccgggaccaggaaactgcacaacattctgggagtcgaaactgggggacccggcggccggagagctggggagagcgggcacaccgtggcagattatctaaagttcaaggatttgatcctgaggatgcttgactatgatcctaaaacacgaattcagccatattacgctcttcagcacagtttctttaagaaaacagccgatgaggggaccaacacgtccaattcagtgagcacaagcccagctatggaacagagtcagtcctctgggacaacatcgtccacttcatcatctagcggaggatcctccggaaccagcaattctggccgtgctcggagcgacccaactcaccagcataggcattcagggggtcatttcacggctgcagtacaggcaatggactgcgagactcattcaccccaggtgcgtcaacagttccctgccccactaggttggtctggaaccgaggcccctacacaggttactgtagagacacaccccgtacaggagaccaccttccacgtcgcaccccagcagaatgctctgcaccaccaccatggcaactcctcacatcaccaccaccaccatcatcaccaccaccaccaccatggccagcaggccctgggtaatcgcacacggcctagagtttacaacagccctacaaattcctcatctacccaggattccatggaagtcggtcacagccaccatagtatgacgtcattgtccagtagcactacttcctccagcacaagttcctccagtaccgggaatcagggaaaccaagcctatcaaaacaggccagtagctgcaaacacactcgacttcggtcaaaatggagctatggacgtaaacctgaccgtttattcgaaccctagacaggagactggcattgccggccaccccacttaccaatttagtgccaataccggccccgcccactatatgaccgagggccatcttaccatgcgccagggtgcagatcgtgaagagagcccaatgaccggcgtgtgcgtgcagcaatcaccagtagccagtagctag

SEQ ID NO: 117519 - DNA, 2292 bp, Artificial Sequence
  derived and/or modified sequence
atgcacactggaggagagaccagcgcctgcaagcccagctctgtgcggctggcccccagcttctccttccacgccgccggcctgcagatggccggccagatgccccacagccaccagtacagcgaccggcggcagcccaacatcagtgaccagcaggtgtctgccctgagctacagcgaccagatccagcagcccctgaccaaccaggtgatgccagacatcgtgatgctgcagaggaggatgccccagaccttccgggaccctgccacagcccccctgaggaagctgtctgtggacctgatcaagacctacaagcacatcaatgaggtgtactatgccaagaagaagagaagacaccagcagggccagggagatgacagcagccacaagaaggagaggaaggtgtacaatgatggctatgatgatgacaactatgactacatcgtgaagaatggagagaagtggatggacagatatgaaattgacagcctgattggcaagggcagctttggccaggtggtgaaggcctatgacagagtggagcaggagtgggtggccatcaagatcatcaagaacaagaaggccttcctgaaccaggcccagatcgaggtgcggctgctggagctgatgaacaagcatgacacagagatgaagtactacatcgtgcacctgaagaggcacttcatgttcaggaaccacctgtgcctggtgtttgagatgctgagctacaacctgtatgacctgctgaggaacaccaacttccggggcgtgtccctgaacctgaccaggaagtttgcccagcagatgtgcacagccctgctcttcctggccaccccagagctgagcatcatccactgtgacctgaagccagagaacatcctgctgtgcaaccccaagaggtctgccatcaagatcgtggactttggcagcagctgccagctgggccagaggatctaccagtacatccagagccgcttctaccgcagccctgaggtgctgctgggcatgccctatgacctggccatcgacatgtggagcctgggctgcatcctggtggagatgcacactggagagcccctcttcagcggggccaatgaggtggaccagatgaacaagatcgtggaggtgctgggcatccccccagcccacatcctggaccaggcccccaaggccaggaagttctttgagaagctgcctgatggcacctggaacctgaagaagaccaaggatggcaagcgggagtacaagcccccaggcaccaggaagctgcacaacatcctgggcgtggagactggaggccctgggggcagaagagctggggagagcggccacacagtggccgactacctgaagttcaaggacctgatcctgaggatgctggactatgaccccaagacccgcatccagccctactatgccctgcagcacagcttcttcaagaagacagcagatgagggcaccaacaccagcaacagcgtgtccaccagccctgccatggagcagagccagagcagcggcaccaccagcagcaccagcagcagcagcggcggcagcagcggcaccagcaacagcggccgggcccggagtgaccccacccaccagcaccgccacagcggcggccacttcaccgctgctgtgcaggccatggactgtgagacccacagcccccaggtgcggcagcagtttcctgcccccctgggctggagcggcacagaggcccccacccaggtgacagtggagacccaccctgtgcaggagaccaccttccacgtggccccccagcagaatgccctgcaccaccaccacggcaacagcagccaccaccaccaccaccaccaccaccaccaccaccaccacggccagcaggccctgggcaacagaacccggccccgggtgtacaacagccccaccaacagcagcagcacccaggacagcatggaggtgggccacagccaccacagcatgaccagcctgagcagcagcaccaccagcagcagcaccagcagcagcagcacaggcaaccagggcaaccaggcctaccagaacagacctgtggccgccaacaccctggactttggccagaatggagccatggatgtgaacctgactgtgtacagcaacccccggcaggagaccggcattgctggccaccccacctaccagttcagcgccaacacaggccctgcccactacatgacagagggccacctgaccatgaggcagggcgctgaccgggaggagagccccatgactggagtgtgtgtgcagcagagccctgtggccagcagctag

SEQ ID NO: 117520 - DNA, 2292 bp, Artificial Sequence
  derived and/or modified sequence
atgcacaccggcggcgagaccagcgcctgcaagcccagcagcgtgagactggcaccttcgttcagctttcacgctgccggccttcagatggcaggccagatgccccactcgcatcagtactctgacaggaggcagccaaatattagcgatcagcaggtgtctgcgttgtcttactccgatcagattcagcagcctctgaccaaccaggtgatgcctgacatcgtgatgctgcagaggcggatgccccagactttcagagatcctgccacagctcctctacgcaagctgagtgtggatctgatcaaaacctataagcatattaatgaggtctattatgccaagaaaaagcgtaggcatcaacagggccagggcgatgactccagtcataagaaggagcgcaaggtgtataacgacggctacgatgacgacaactacgattatatcgtcaagaatggggagaagtggatggaccgctacgagatcgattctttgattgggaaaggctcattcggacaggtcgtgaaagcttacgacagagtggagcaagagtgggtggcgatcaagattatcaaaaataaaaaggccttcctgaatcaggcacagattgaggtccgccttctcgaactaatgaacaaacatgacaccgaaatgaagtactacatcgttcacctcaagcgtcattttatgttcagaaaccacctctgtctcgtctttgaaatgctgagttataatctgtacgatctgctgagaaacacaaatttcaggggcgtgagtctaaacctgaccaggaaattcgcgcagcagatgtgtaccgccctcctgtttttggctacgccagagctgtctattattcactgtgacctcaagcccgagaatatcttgctctgcaacccaaagagatcagccataaaaatcgtagacttcggctcctcttgccagctgggacagcgaatctatcagtacatccagagcaggttttatagatcacccgaggtacttctcggcatgccttacgatctagctatcgacatgtggtctctgggttgcatattagtggaaatgcacacaggtgaacctctgtttagtggagcaaacgaagtggaccagatgaacaagattgtcgaggtactaggaatcccacccgcacacattctggaccaggcaccgaaggcgcgaaaattctttgagaagctacccgacggcacttggaacctcaagaagactaaggatggcaagcgggaatataaaccaccaggaacaagaaagcttcacaatatcctcggagtggaaactggcggtccaggcgggaggcgggccggcgaaagcggccataccgtcgctgactacttaaaattcaaagatctcattcttaggatgttggattacgaccccaagactagaatccaaccttactacgcattacagcactcatttttcaaaaagacagccgatgagggcacaaacaccagcaactccgtctcaacctcaccagcaatggaacagtctcagagctcagggactaccagctccacttcgagctctagcggcggatcgagtggcacttccaattccgggcgagccagatctgaccctacacatcagcatcggcactcaggagggcatttcaccgccgcagtccaggccatggattgtgaaacccatagtccccaagtccgccagcagtttcctgcccccttggggtggtctgggactgaggcgccaactcaggtcacagtagagacccaccctgtccaggaaaccacattccatgttgctcctcagcagaatgccttacaccaccaccacgggaactcgagccaccatcatcaccatcatcaccatcaccaccatcaccacggccagcaggcacttggcaacagaacaaggcctcgtgtgtacaatagcccaacgaattcttcttcaactcaggactcaatggaagtaggtcactcccatcactctatgaccagtctgtcatcaagtactacttcctcaagcacgtccagcagttcaacaggaaaccagggaaaccaggcctatcagaatcggcctgtggccgccaataccctagatttcggacagaacggcgcaatggacgtgaacttgacggtatattccaatccgcgtcaggaaaccggtattgcagggcaccccacctaccaattttcggccaacacaggccctgcacactatatgactgagggacaccttaccatgagacagggcgccgatcgggaggagtcccccatgaccggcgtctgtgtgcagcagtctcctgtcgcttcctcctag

SEQ ID NO: 117521 - DNA, 2292 bp, Artificial Sequence
  derived and/or modified sequence
atgcataccggtggtgaaacaagcgcttgtaaaccaagctccgtgaggcttgctccttcctttagcttccacgccgctggcctgcagatggctggacaaatgccgcacagtcatcagtactctgacaggcgccaaccaaatatctccgaccaacaggtcagtgcactctcctattccgaccagattcagcagcccctgacgaatcaggtaatgcccgacatcgttatgttacaaagacgaatgccacagaccttccgggatcctgccaccgcccctttacggaagttgtccgtggatctgataaagacgtacaaacatattaacgaagtctactacgcgaagaaaaaaaggagacaccagcaaggacagggggacgacagttcacacaaaaaggagcgaaaggtgtataatgacgggtatgacgacgacaactacgactatatcgtcaaaaatggagagaaatggatggaccgatacgagatcgattcgcttataggaaagggctcctttggccaggtggtcaaggcgtatgaccgggtggaacaggagtgggttgcaataaaaatcattaagaacaaaaaagcgttcctaaatcaggcacagattgaagttagattgttggaactgatgaacaaacatgatactgaaatgaagtattacattgttcaccttaaacgccatttcatgtttcgtaaccatctttgccttgtcttcgagatgctatcgtacaacttgtacgacctgctccggaacacaaactttcggggtgtttcccttaacctgactagaaagttcgcccaacagatgtgtacagcactgctcttcctggccactcccgaactgagtataatccactgcgacctgaaacctgaaaacatcttactgtgcaaccctaagcgctcagccatcaaaatagtggacttcggcagcagttgccagctaggccaaagaatttaccagtatattcagtcccggttctacagaagtcctgaggtgctgcttgggatgccctatgatctagcaatcgatatgtggtctctgggatgtattctggtagagatgcacactggcgagccactgttctctggggcaaatgaggtcgatcagatgaataagatagtcgaggtgctgggaatcccacccgctcacatcttggatcaggccccaaaagctcggaagttttttgagaagctacccgatggaacatggaacctcaaaaaaaccaaagacggcaaacgcgagtataagccacccggtacgcgcaagctgcacaacatcttgggcgtggagactggcggtccagggggacgtcgagcaggggagtctggacacacagtggcagactacctaaaatttaaagacttgattctgagaatgttggactacgaccctaagacaaggattcaaccttactacgccctgcaacattcatttttcaaaaagactgctgatgaggggaccaatacatctaactccgtgtcaacaagccctgcaatggaacagtctcagtcatccggaacaaccagctctacctcttcttcatccggaggtagcagcggcacaagtaattccggcagggcgaggagcgaccccactcaccaacatcgccactctggcggtcattttaccgctgcagttcaggccatggattgcgagactcactcaccacaggtccgccagcagttccccgctcctctgggatggtccgggaccgaggcccctacgcaggttactgttgaaacccaccctgtacaagaaactactttccacgtggcaccccagcagaatgcgcttcaccaccatcacgggaactcttcccaccatcaccatcaccatcaccatcaccatcaccatcacggccagcaagcattagggaatcgaactaggcccagagtttacaactccccaaccaacagttcgtcgacgcaggattccatggaagtcggacattcacatcacagcatgaccagtctatcctcaagcaccaccagttcatcaacaagctcatctagcacaggcaaccagggaaatcaggcttaccagaaccggcctgttgccgctaacactttggactttggccagaacggcgctatggatgtgaatctcacagtgtactctaatcctaggcaggaaacggggattgccggacaccctacgtatcaattcagcgcgaacacaggacctgcacactacatgacagaaggacaccttaccatgcgccagggggctgaccgggaagaaagccctatgacaggagtctgcgtccaacagagccctgtcgcctcatcctag

SEQ ID NO: 117522 - DNA, 2292 bp, Artificial Sequence
  derived and/or modified sequence
atgcacaccggcggcgagaccagcgcctgcaagcccagcagcgtgagactggcccccagcttcagcttccacgccgccggcctgcagatggccggccagatgccccacagccaccagtacagcgacagaagacagcccaacatcagcgaccagcaggtgagcgccctgagctacagcgaccagatccagcagcccctgaccaaccaggtgatgcccgacatcgtgatgctgcagagaagaatgccccagaccttcagagaccccgccaccgcccccctgagaaagctgagcgtggacctgatcaagacctacaagcacatcaacgaggtgtactacgccaagaagaagagaagacaccagcagggccagggcgacgacagcagccacaagaaggagagaaaggtgtacaacgacggctacgacgacgacaactacgactacatcgtgaagaacggcgagaagtggatggacagatacgagatcgacagcctgatcggcaagggcagcttcggccaggtggtgaaggcctacgacagagtggagcaggagtgggtggccatcaagatcatcaagaacaagaaggccttcctgaaccaggcccagatcgaggtgagactgctggagctgatgaacaagcacgacaccgagatgaagtactacatcgtgcacctgaagagacacttcatgttcagaaaccacctgtgcctggtgttcgagatgctgagctacaacctgtacgacctgctgagaaacaccaacttcagaggcgtgagcctgaacctgaccagaaagttcgcccagcagatgtgcaccgccctgctgttcctggccacccccgagctgagcatcatccactgcgacctgaagcccgagaacatcctgctgtgcaaccccaagagaagcgccatcaagatcgtggacttcggcagcagctgccagctgggccagagaatctaccagtacatccagagcagattctacagaagccccgaggtgctgctgggcatgccctacgacctggccatcgacatgtggagcctgggctgcatcctggtggagatgcacaccggcgagcccctgttcagcggcgccaacgaggtggaccagatgaacaagatcgtggaggtgctgggcatcccccccgcccacatcctggaccaggcccccaaggccagaaagttcttcgagaagctgcccgacggcacctggaacctgaagaagaccaaggacggcaagagagagtacaagccccccggcaccagaaagctgcacaacatcctgggcgtggagaccggcggccccggcggcagaagagccggcgagagcggccacaccgtggccgactacctgaagttcaaggacctgatcctgagaatgctggactacgaccccaagaccagaatccagccctactacgccctgcagcacagcttcttcaagaagaccgccgacgagggcaccaacaccagcaacagcgtgagcaccagccccgccatggagcagagccagagcagcggcaccaccagcagcaccagcagcagcagcggcggcagcagcggcaccagcaacagcggcagagccagaagcgaccccacccaccagcacagacacagcggcggccacttcaccgccgccgtgcaggccatggactgcgagacccacagcccccaggtgagacagcagttccccgcccccctgggctggagcggcaccgaggcccccacccaggtgaccgtggagacccaccccgtgcaggagaccaccttccacgtggccccccagcagaacgccctgcaccaccaccacggcaacagcagccaccaccaccaccaccaccaccaccaccaccaccaccacggccagcaggccctgggcaacagaaccagacccagagtgtacaacagccccaccaacagcagcagcacccaggacagcatggaggtgggccacagccaccacagcatgaccagcctgagcagcagcaccaccagcagcagcaccagcagcagcagcaccggcaaccagggcaaccaggcctaccagaacagacccgtggccgccaacaccctggacttcggccagaacggcgccatggacgtgaacctgaccgtgtacagcaaccccagacaggagaccggcatcgccggccaccccacctaccagttcagcgccaacaccggccccgcccactacatgaccgagggccacctgaccatgagacagggcgccgacagagaggagagccccatgaccggcgtgtgcgtgcagcagagccccgtggccagcagctag

SEQ ID NO: 117523 - DNA, 2422 bp, Artificial Sequence
  derived and/or modified sequence
gttatagttttgccgctggactcttccctcccttcccccaccccatcaggatgatatgagacttgaaagaagacgatgcatacaggaggagagacttcagcatgcaaaccttcatctgttcggcttgcaccgtcattttcattccatgctgctggccttcagatggctggacagatgccccattcacatcagtacagtgaccgtcgccagccaaacataagtgaccaacaggtttctgccttatcatattctgaccagattcagcaacctctaactaaccaggtgatgcctgatattgtcatgttacagaggcggatgccccaaaccttccgtgacccagcaactgctcccctgagaaaactttctgttgacttgatcaaaacatacaagcatattaatgaggtttactatgcaaaaaagaagcgaagacaccaacagggccagggagacgattctagtcataagaaggaacggaaggtttacaatgatggttatgatgatgataactatgattatattgtaaaaaacggagaaaagtggatggatcgttacgaaattgactccttgataggcaaaggttcctttggacaggttgtaaaggcatatgatcgtgtggagcaagaatgggttgccattaaaataataaagaacaagaaggcttttctgaatcaagcacagatagaagtgcgacttcttgagctcatgaacaaacatgacactgaaatgaaatactacatagtgcatttgaaacgccactttatgtttcgaaaccatctctgtttagtttttgaaatgctgtcctacaacctctatgacttgctgagaaacaccaatttccgaggggtctctttgaacctaacacgaaagtttgcgcaacagatgtgcactgcactgcttttccttgcgactccagaacttagtatcattcactgtgatctaaaacctgaaaatatccttctttgtaaccccaaacgcagtgcaatcaagatagttgactttggcagttcttgtcagttggggcagaggatataccagtatattcagagtcgcttttatcggtctccagaggtgctactgggaatgccttatgaccttgccattgatatgtggtccctcgggtgtattttggttgaaatgcacactggagaacctctgttcagtggtgccaatgaggtagatcagatgaataaaatagtggaagttctgggtattccacctgctcatattcttgaccaagcaccaaaagcaagaaagttctttgagaagttgccagatggcacttggaacttaaagaagaccaaagatggaaaacgggagtacaaaccaccaggaacccgtaaacttcataacattcttggagtggaaacaggaggacctggtgggcgacgtgctggggagtcaggtcatacggtcgctgactacttgaagttcaaagacctcattttaaggatgcttgattatgaccccaaaactcgaattcaaccttattatgctctgcagcacagtttcttcaagaaaacagctgatgaaggtacaaatacaagtaatagtgtatctacaagccccgccatggagcagtctcagtcttcgggcaccacctccagtacatcgtcaagctcaggtggctcatcggggacaagcaacagtgggagagcccggtcggatccgacgcaccagcatcggcacagtggtgggcacttcacagctgccgtgcaggccatggactgcgagacacacagtccccaggtgcgtcagcaatttcctgctcctcttggttggtcaggcactgaagctcctacacaggtcactgttgaaactcatcctgttcaagaaacaacctttcatgtagcccctcaacagaatgcattgcatcatcaccatggtaacagttcccatcaccatcaccaccaccaccaccatcaccaccaccatggacaacaagccttgggtaaccggaccaggccaagggtctacaattctccaacgaatagctcctctacccaagattctatggaggttggccacagtcaccactccatgacatccctgtcttcctcaacgacttcttcctcgacatcttcctcctctactggtaaccaaggcaatcaggcctaccagaatcgcccagtggctgctaataccttggactttggacagaatggagctatggacgttaatttgaccgtctactccaatccccgccaagagactggcatagctggacatccaacataccaattttctgctaatacaggtcctgcacattacatgactgaaggacatctgacaatgaggcaaggggctgatagagaagagtcccccatgacaggagtttgtgtgcaacagagtcctgtagctagctcgtgactacattgaaacttgagtttgtttcttgtgtgtttttatagaagtggtgtttttt

SEQ ID NO: 117524 - protein, 391 aa, Artificial Sequence
  derived and/or modified sequence
MGYPEVERRELLPAAAPRERGSQGCGCGGAPARAGEGNSCLLFLGFFGLSLALHLLTLCCYLELRSELRRERGAESRLGGSGTPGTSGTLSSLGGLDPDSPITSHLGQPSPKQQPLEPGEAALHSDSQDGHQMALLNFFFPDEKPYSEEESRRVRRNKRSKSNEGADGPVKNKKKGKKAGPPGPNGPPGPPGPPGPQGPPGIPGIPGIPGTTVMGPPGPPGPPGPQGPPGLQGPSGAADKAGTRENQPAVVHLQGQGSAIQVKNDLSGGVLNDWSRITMNPKVFKLHPRSGELEVLVDGTYFIYSQVEVYYINFTDFASYEVVVDEKPFLQCTRSIETGKTNYNTCYTAGVCLLKARQKIAVKMVHADISINMSKHTTFFGAIRLGEAPAS

SEQ ID NO: 117525 - DNA, 1176 bp, Artificial Sequence
  derived and/or modified sequence
atgggctaccccgaggtggagagaagagagctgctgcccgccgccgcccccagagagagaggcagccagggctgcggctgcggcggcgcccccgccagagccggcgagggcaacagctgcctgctgttcctgggcttcttcggcctgagcctggccctgcacctgctgaccctgtgctgctacctggagctgagaagcgagctgagaagagagagaggcgccgagagcagactgggcggcagcggcacccccggcaccagcggcaccctgagcagcctgggcggcctggaccccgacagccccatcaccagccacctgggccagcccagccccaagcagcagcccctggagcccggcgaggccgccctgcacagcgacagccaggacggccaccagatggccctgctgaacttcttcttccccgacgagaagccctacagcgaggaggagagcagaagagtgagaagaaacaagagaagcaagagcaacgagggcgccgacggccccgtgaagaacaagaagaagggcaagaaggccggcccccccggccccaacggcccccccggcccccccggcccccccggcccccagggcccccccggcatccccggcatccccggcatccccggcaccaccgtgatgggcccccccggcccccccggcccccccggcccccagggcccccccggcctgcagggccccagcggcgccgccgacaaggccggcaccagagagaaccagcccgccgtggtgcacctgcagggccagggcagcgccatccaggtgaagaacgacctgagcggcggcgtgctgaacgactggagcagaatcaccatgaaccccaaggtgttcaagctgcaccccagaagcggcgagctggaggtgctggtggacggcacctacttcatctacagccaggtggaggtgtactacatcaacttcaccgacttcgccagctacgaggtggtggtggacgagaagcccttcctgcagtgcaccagaagcatcgagaccggcaagaccaactacaacacctgctacaccgccggcgtgtgcctgctgaaggccagacagaagatcgccgtgaagatggtgcacgccgacatcagcatcaacatgagcaagcacaccaccttcttcggcgccatcagactgggcgaggcccccgccagctag

SEQ ID NO: 117526 - DNA, 1176 bp, Artificial Sequence
  derived and/or modified sequence
atggggtatccggaggtcgagcggagggagcttctccctgctgctgcgcccagagagaggggatctcagggctgcggatgtggcggggcccctgcaagggccggcgagggaaactcatgcctattgtttctggggttctttggtctgtccctggctctgcacctgttgactttatgctgctatcttgaactgagatcagaacttaggagggagcggggggccgaatcacgtctgggaggctcaggcactcccggaacttctgggacactgtctagccttggcggcctcgacccggacagcccaattacatcccatttgggccaaccatctccgaaacaacagcctctcgagccaggtgaggccgccctacatagtgactcacaggatgggcaccaaatggcactactcaattttttttttcctgacgaaaaaccatactcggaggaagaaagtagaagggtaagacgtaacaagaggtcaaaatctaatgaaggcgccgatgggccggtgaaaaataagaagaagggaaagaaagccgggccccctggcccaaatggtccccctggtccacccggacctcccggcccccagggtcctcccgggattcctggcatccctggaataccgggaacaaccgtgatggggcccccgggaccccctggacctccagggccccagggaccccccggactccagggtccctcaggggcggcagacaaggccggtaccagggagaatcaaccagccgtcgtgcacttacaggggcaggggagcgctatacaggttaagaacgacctgagcgggggggtcctgaacgactggtcaagaatcactatgaacccaaaggtattcaaactccacccccgatccggagaattggaagtgctcgttgacggcacctacttcatatacagccaggtcgaggtgtattacataaatttcaccgattttgcgtcctatgaagtcgtagtggatgagaagccttttctccagtgtaccaggtcaattgagaccggtaagaccaactacaacacctgctatacggcaggtgtgtgtctgctgaaagcaaggcagaaaatcgccgtaaagatggttcacgcggatattagcatcaatatgagcaaacatacaacatttttcggggctatcaggctgggggaagcacccgcttcttag

SEQ ID NO: 117527 - DNA, 1176 bp, Artificial Sequence
  derived and/or modified sequence
atgggctacccagaggtggagcggcgggagctgctgcctgctgctgccccccgggagcggggcagccagggctgcggctgcggcggggccccagcccgggccggggagggcaacagctgcctgctcttcctgggcttcttcggcctgagcctggccctgcacctgctgaccctgtgctgctacctggagctgcggtctgagctgcggcgggagagaggagctgagagccggctgggcggcagcggcaccccaggcaccagcggcaccctgagcagcctgggcggcctggaccctgacagccccatcaccagccacctgggccagcccagccccaagcagcagcccctggagcccggggaggccgccctgcacagcgacagccaggacggccaccagatggccctgctgaacttcttcttcccagatgagaagccctacagcgaggaggagagccggcgggtgagaagaaacaagaggagcaagagcaatgaaggagcagatggccctgtgaagaacaagaagaagggcaagaaggccggccccccaggccccaatggacctcctggccccccaggccccccaggcccccagggccccccaggcatccctggcatccctggcatccctggcaccaccgtgatgggccccccaggccccccaggccccccaggcccccagggccccccaggcctgcagggccccagcggggctgctgacaaggccggcacccgggagaaccagcctgctgtggtgcacctgcagggccagggcagcgccatccaggtgaagaatgacctgtctggaggagtgctgaatgactggagccgcatcaccatgaaccccaaggtgttcaagctgcaccccaggtctggagagctggaggtgctggtggatggcacctacttcatctacagccaggtggaggtgtactacatcaacttcacagactttgccagctatgaggtggtggtggatgagaagcccttcctgcagtgcaccaggagcattgagaccgggaagaccaactacaacacctgctacacagctggggtgtgcctgctgaaggcccggcagaagattgctgtgaagatggtgcatgctgacatcagcatcaacatgagcaagcacaccaccttcttcggggccatccggctgggggaggccccagccagctag

SEQ ID NO: 117528 - DNA, 5278 bp, Artificial Sequence
  derived and/or modified sequence
attccctcggcgggccgagcctcccctctctcccgcccctcctcctccctttcccacccctcggagtagagctgcacatgcggctgctccctgctccgtcccgcccagccactgtcgcgcaggaacgggtccctgcagcccccagccgatggcaggacagtagccgcctgtcagaggtcgtgaacggctgaggcagacgcagcggctcccgggcctcaagagagtgggtgtctccggaggccatgggctacccggaggtggagcgcagggaactcctgcctgcagcagcgccgcgggagcgagggagccagggctgcgggtgtggcggggcccctgcccgggcgggcgaagggaacagctgcctgctcttcctgggtttctttggcctctcgctggccctccacctgctgacgttgtgctgctacctagagttgcgctcggagttgcggcgggaacgtggagccgagtcccgccttggcggctcgggcacccctggcacctctggcaccctaagcagcctcggtggcctcgaccctgacagccccatcaccagtcaccttgggcagccgtcacctaagcagcagccattggaaccgggagaagccgcactccactctgactcccaggacgggcaccagatggccctattgaatttcttcttccctgatgaaaagccatactctgaagaagaaagtaggcgtgttcgccgcaataaaagaagcaaaagcaatgaaggagcagatggcccagttaaaaacaagaaaaagggaaagaaagcaggacctcctggacccaatggccctccaggacccccaggacctccaggaccccagggacccccaggaattccagggattcctggaattccaggaacaactgttatgggaccacctggtcctccaggtcctcctggtcctcaaggaccccctggcctccagggaccttctggtgctgctgataaagctggaactcgagaaaaccagccagctgtggtgcatctacagggccaagggtcagcaattcaagtcaagaatgatctttcaggtggagtgctcaatgactggtctcgcatcactatgaaccccaaggtgtttaagctacatccccgcagcggggagctggaggtactggtggacggcacctacttcatctatagtcaggtagaagtatactacatcaacttcactgactttgccagctatgaggtggtggtggatgagaagcccttcctgcagtgcacacgcagcatcgagacgggcaagaccaactacaacacttgctataccgcaggcgtctgcctcctcaaggcccggcagaagatcgccgtcaagatggtgcacgctgacatctccatcaacatgagcaagcacaccacgttctttggggccatcaggctgggtgaagcccctgcatcctagattccccccattttgcctctgtccgtgccccttccctgggtttgggagccaggactcccagaacctctaagtgctgctgtggagtgaggtgtattggtgttgcagccgcagagaaatgccccagtgttatttattccccagtgactccagggtgacaaggcctgcttgactttccagaatgaccttgagttaacaggacagttgatggagccccagggtttacatgaagcagaaccttctttggttccatgttgactgacttatggcatgactcttcaaccccgaggtccctgttgtcagatctattgtttgttgcactaaaatgaggatccagggcagcaggccagagaaagcaaaggtgcactccagactctgggggtggacatctgaccccaagggggctgctgctcctctcttgggtagggtagtggctggggtggagtgggaagggagcattgcagcctaagaagaaggccagagagggaaaaggcaggtgcttttggcagagaccataagagaaacctgccaaggagcatccttggcagtgggaatgttctttctgctctatactgtggcctgcaggagggttggagtgctcttcccactccagctgacagccacaccgtggcagcttgctgggctttgggaagtttgctgtgctttggaacaatcacagggaatggccacaaacctgcccgcctaagaccctgaatccgtacttgggtcacatgactctcattttatttacagctgtgctccacactcagaaaattccctggggtcaccttctagttgcccccattcccagcctgactagaactcctgtcttctttctccatggagcctacctctgtctgagacaggtgcctaacctgggacctgtggtcatgtgagtctgggatattctttagcttacctgggcacaaacagaattttccatttattaagcagtacaaatgtttttcatccattcctaatcaaattctgtctggggacgaagggttggacgggatgacctccagaagtcccttcaatttctagtacctgtgactcttagccctcaccacagccttctaaattcccaaatcctagactgctcctgggcattagcaaggcagagcctttttacctggcctagaaagggcaaggggtgaggataggacagagggattttgttcaagtttgctgcaacccaagtggacgttaggccaggccttatctgaaaggccagcagctgatgctgtactaacccagtctttcttcactctggcttcaaaaagccacagcagagcattgtcaccgcaggtgctcatgctgctcccctaaagccaggctcaggagaagccagtgtctaggcactgagcagggatctgccccctagttcaggtccaaattcaccttcccctaaaccccaagcttcccaacagatcatatggtaggaccctcgagagccttacttcaaagtgcctgggctcagcctggtttctgggtgctagatccagcccaaacctgggaaggccagccttgtacagtctgctcctcttgttcctgaaatgtgtttccttttcaggagatggggaataatttccttcaggcagctgaaattcaccaagaacagcgggtacttatttctcagctgtgccttccctttctaagcaaccacactgcttggcccttcaagggtcagggtgagacgtgatgggctaggcctccgttgtctggttgctaatgacagccttgcaacccaaggtgaggtgaactccaggcatgtgtctggccctaactcctataaagtgcctcggacagtccgcagttgtagcagaaaccaacaagaaccactccttcatgtttggaaaataatttctcttgtattatctcctttgaagaaggcaaggctgataatatgacaaacatcattgtttagatgaggctcagagaggtagcactctcagagtgttttgaccagtttaagccgcagacctggagcttcagccaggtctgactccaaagctgttccattacaccacagcattgtgtggaatttgaggtctagagagaaccaataaaagtggtaattgggaactgaaatccttgagagttccggggagaaacccagagatgcctgatttcattcctcgatggtaatacccgtcctctcggctgccaggggctctgtggcaaaaagagtcagacatttctttggaaaacagcgaacagccttagagctcttgtgttcagaagaatcttcctggcacaatgttggagcagcaggcctctgggacccacagaacttgtggcctttatgttctttcacccatcctaggaaccagccaaccatcatgtgtagagcccctactgtgggcaaagtcctcctttcattaccctacagacagcttacaggagccagcctgcttcccacaactactagtgtgactccttatctctttccaccataccttagagactttgatactaccagggtctctcagggatggagggaagacctgaaagagaggactggttctgaggccagaaaggtgtgaggagagaggaggaaaagtcttcctaattgtgcccctaaagagcatcctgataccattctattctccagacatggaggggatgataaaggaaataggatctccactggacccttgattcattctgaaccctccaaaggaactctagagggcgagggatgatgagggaagcaataggtagctggggagccctattgctgctaagtcattggcaaagtgacaaagcaatttactgatgagagaatgtggaaatagatgtgcagtttggaattatgttggtgtgaatttgccagaggaccaatgcttgcatggagaatgggacgaggacatttgtgggcaagcagatgacagaggtttgaaggagaatggcatggcaggagtctctgccagttacttgggcttcaacagccaagctggcacaaaagacagctggcggaggctgctcggctactggttacctggagaagtagtatttgcctatttcccccttcatccatcctgagccaaatttcttttgctgaacaggaaagagctaggaaccctggaggtaaacaaagactttgatccatgtatgagtgtatgtgtttatgtaacttcctgtggatgcaaatagattcagagaaatttagagctaaaaaggcccttagagggaatctagcccaacctacattccaccctgttacttatgtagaaactgaggcccagagagggaagatgacctgccccaagtggtgagcaagcaccaacctccagactcagcagagtgagggggtaaagcagttcctgtcccacatggccatcttctttcttccacccacaaactccaggctggaagtacttggcccccttcaggagcctggccaggcagggagagagtagctgcagccttcatcagaactcttcctcctcccaaggcattctcccagctctagcctctggactggaaagcacaagactggcccagtgccagcaagtccttaggctactgtaatgctgcctcaggacccatccctgcctggaggctcctctaggccctgtgagcacaaagaagaaagctgatttttgtcttttaatccatttcaggactctctccaggagggctcggggtgtgtcatttctatattcctccagctgggattggggggtgggctttgttgtgagaatggcctggagcaggcccaatgctgcttttgggggtcagcatccagtgtgagatactgtgtatataaactatatataatgtatataaactgggatgtaagtttgtgtaaattaatggtttattctttgcaaataaaacgctttccccgtctgttcttg

SEQ ID NO: 117529 - DNA, 1176 bp, Artificial Sequence
  derived and/or modified sequence
atgggctaccccgaggtggagcggcgggagctgctgcccgccgccgctccccgggagcgggggtcccagggctgcggctgtggcggggcacccgctagagctggtgaaggaaattcctgcttgctgttccttggattctttgggctatccctggcattgcaccttttgaccctatgctgttatcttgagctccgaagcgagttgcggagagaacgaggcgcagaaagcagactaggtggcagcggtacaccaggaacatcaggaaccctttcctccctcggaggtttggatcctgattcgccgatcacatcccacctggggcaaccttcacccaaacaacaaccgttagagcctggggaggcagctctgcactccgattcccaggacggccatcagatggcacttctgaactttttcttccccgacgaaaagccatacagcgaggaagagtcccggcgcgtgcgtcggaataagcgctctaagtccaacgagggagccgatggccccgtgaagaacaagaaaaaaggcaaaaaggcagggccgcccggccccaacggcccgcctgggccacctggtcccccagggccgcagggaccaccaggcattcccggcattcccggaattcccggaacgacagtcatgggcccacccggacccccagggccacccgggccccagggcccgccaggactccaggggcccagtggggcggcagataaagcgggcacgcgggaaaatcaacccgcagtggtccatctccaagggcaagggtcagcaatccaggtaaagaacgacctatcagggggggtcctgaatgattggtcaagaataacaatgaatccgaaggtgttcaagctgcatcctcgcagcggggaactggaagtgctcgtggacggcacttatttcatctattcccaggtggaagtatactacatcaattttactgacttcgcaagctatgaggtcgttgtcgacgagaaaccatttctccagtgtactagaagcatagagactgggaaaaccaattacaacacctgttatacagccggagtctgtctgctgaaggcacgacagaaaattgctgtcaagatggtgcacgctgatatcagtattaatatgagcaagcacaccacattcttcggagctatcaggctgggagaggcccccgccagctag

SEQ ID NO: 117530 - DNA, 1176 bp, Artificial Sequence
  derived and/or modified sequence
atggggtatccagaggtcgaaaggcgggagctgttacctgccgctgctcccagggagagaggttcccagggatgtgggtgcggcggagcaccagccagagccggtgagggcaactcgtgcttgcttttcctggggttcttcggattgtccctggccctgcatttactcaccctgtgctgctaccttgaactcagatcagagcttcgcagggagcggggagcagagtccagattgggcggttccggaaccccgggaactagcgggaccctcagctcattagggggacttgaccctgatagccccattacgtcccatttagggcagcccagtcctaagcagcagccgctagagcccggtgaagcagccctccacagcgactctcaggacggacaccagatggctttgttgaactttttcttcccggacgaaaaaccttattcggaggaggagtcgcgacgcgtgcgtcggaacaaacgcagtaagagcaacgagggagcagacgggccagtgaagaataagaaaaaaggcaagaaagctgggccacctggacccaacgggccacccggaccacccggacctccaggaccccaggggcctccaggcattcccggaattcccggaattccgggtaccaccgtaatggggccaccaggccctcccggaccccctgggccacagggccctccaggcctgcaggggccaagcggggctgccgacaaagctgggactcgggaaaatcaaccggcagtcgtgcacctgcagggacagggtagcgcaatccaagtcaagaacgacctttctgggggtgtgctcaatgactggagtcggattactatgaatcccaaagtattcaaactgcacccgaggtccggagaactggaagtactggtggatgggacttattttatctatagtcaggtggaagtttattacattaactttacagacttcgcgtcctatgaggtggtcgtcgacgagaagccctttctacagtgcactagatctattgagaccggcaagacaaactacaacacctgttacacagccggtgtgtgcctgctgaaagctcgacaaaagatcgccgtcaagatggtgcacgccgatataagtatcaacatgtctaagcacacaacctttttcggagccattagactcggcgaagcccctgcttcctag

SEQ ID NO: 117531 - DNA, 1176 bp, Artificial Sequence
  derived and/or modified sequence
atggggtatcccgaagtggaaagaagggaactgttgccagccgcggcaccaagagaacggggaagccaggggtgtggttgcggtggggcacctgccagagctggcgagggaaactcatgcttgctgtttctgggcttttttggtctgagccttgccttgcatcttctgacactttgttgctacctggagttaagatcagaacttcggagggaacgcggagctgaaagccgcctgggtggatccgggactcctgggactagcggtactctctcttcactcgggggactcgatcctgactctccaatcacgtcacacctgggccaaccaagtcccaagcagcagccactcgaacccggagaagccgccctgcattctgatagccaggatggccaccagatggccttactgaactttttttttcccgacgaaaagccctacagcgaagaggaatctagaagggttaggagaaataagcgaagcaaatccaacgagggtgctgatggccctgtgaagaataagaagaagggcaagaaggccggccctccaggcccgaacggaccccctggacctcctggaccccccggcccacaggggcccccgggcattcctggcatacctggtatccccgggacgacagtcatgggacccccagggcctcctgggccacccgggccacagggtcctcccggccttcaaggaccgtccggggccgctgataaggcaggcacgcgcgaaaaccagcctgctgtcgtacacttgcaagggcagggcagtgcgatccaggttaagaatgatctttcaggaggcgttttgaatgattggtctagaatcacaatgaatccaaaggtttttaagctacacccccggtcaggtgagctggaagtcctggtggacggaacgtattttatctattcacaggtagaagtgtattacattaatttcactgacttcgcaagttacgaggtcgtggttgatgagaaaccatttttacagtgcacacggagcattgagactggcaaaactaattacaacacgtgctatactgctggagtgtgtcttctgaaggcaaggcaaaaaatcgcagtaaaaatggtccatgccgatatctcaattaatatgtcaaagcatactaccttcttcggagctataaggctgggggaggcacccgctagttag

SEQ ID NO: 117532 - DNA, 1176 bp, Artificial Sequence
  derived and/or modified sequence
atgggctatccggaagtggagcgacgagaactgctgcctgccgccgctccgagagaaagagggtcccagggttgtggctgtgggggtgcacctgcccgtgcaggcgagggcaactcctgtctcttatttctgggcttttttggcctctctctggcattacacttattgacgctctgttgctacctggaactgaggagcgaacttagaagggaacgaggcgcagaaagcaggttaggcggatcagggacacccggaacttccggaactctgagctctctcggtggactcgaccctgacagtcccatcacttcacacctagggcagccatccccaaaacagcaaccactggagcctggagaggccgcgcttcattcggattcccaggatggacatcagatggcattgctgaactttttcttccccgatgagaaaccatactcagaggaggaatccagacgcgtgcgccgcaacaaacggtctaaaagcaacgaaggcgcggacggaccagtgaaaaataagaaaaaaggaaagaaagctggaccaccaggacccaacggaccccccggaccccccggtcctcccggcccccagggccctcccggcattcccggaattccaggaatccccggaacaactgtcatggggcctccggggccccccggccctcctggacctcaggggccacctggccttcaaggcccatccggtgccgccgacaaagccggaactagagagaatcaacctgctgtggtgcatttacaagggcagggatcagcgatacaagttaagaacgatcttagtggaggggttctgaatgactggtctcgaatcactatgaatccaaaggttttcaagttgcatccccgaagcggcgaattggaggtgttagtagatggtacatatttcatatattcacaggtcgaagtctattatattaatttcaccgactttgcaagctacgaagtcgtggttgacgaaaagccattcttgcaatgtactaggtctattgagacaggcaaaaccaattacaatacttgttataccgccggggtctgcctcctcaaagccaggcagaagatagctgtcaagatggtgcatgcagatatctctattaatatgtctaaacacacaaccttttttggggccatcagactgggagaagcacctgcctcatag

SEQ ID NO: 117533 - RNA, 1176 nt, Artificial Sequence
  derived and/or modified sequence
augggguaucccgaaguggaaagaagggaacuguugccagccgcggcaccaagagaacggggaagccaggggugugguugcgguggggcaccugccagagcuggcgagggaaacucaugcuugcuguuucugggcuuuuuuggucugagccuugccuugcaucuucugacacuuuguugcuaccuggaguuaagaucagaacuucggagggaacgcggagcugaaagccgccuggguggauccgggacuccugggacuagcgguacucucucuucacucgggggacucgauccugacucuccaaucacgucacaccugggccaaccaagucccaagcagcagccacucgaacccggagaagccgcccugcauucugauagccaggauggccaccagauggccuuacugaacuuuuuuuuucccgacgaaaagcccuacagcgaagaggaaucuagaaggguuaggagaaauaagcgaagcaaauccaacgagggugcugauggcccugugaagaauaagaagaagggcaagaaggccggcccuccaggcccgaacggacccccuggaccuccuggaccccccggcccacaggggcccccgggcauuccuggcauaccugguauccccgggacgacagucaugggacccccagggccuccugggccacccgggccacaggguccucccggccuucaaggaccguccggggccgcugauaaggcaggcacgcgcgaaaaccagccugcugucguacacuugcaagggcagggcagugcgauccagguuaagaaugaucuuucaggaggcguuuugaaugauuggucuagaaucacaaugaauccaaagguuuuuaagcuacacccccggucaggugagcuggaaguccugguggacggaacguauuuuaucuauucacagguagaaguguauuacauuaauuucacugacuucgcaaguuacgaggucgugguugaugagaaaccauuuuuacagugcacacggagcauugagacuggcaaaacuaauuacaacacgugcuauacugcuggagugugucuucugaaggcaaggcaaaaaaucgcaguaaaaaugguccaugccgauaucucaauuaauaugucaaagcauacuaccuucuucggagcuauaaggcugggggaggcacccgcuaguuag

SEQ ID NO: 117534 - RNA, 1176 nt, Artificial Sequence
  derived and/or modified sequence
augggcuauccggaaguggagcgacgagaacugcugccugccgccgcuccgagagaaagagggucccaggguuguggcugugggggugcaccugcccgugcaggcgagggcaacuccugucucuuauuucugggcuuuuuuggccucucucuggcauuacacuuauugacgcucuguugcuaccuggaacugaggagcgaacuuagaagggaacgaggcgcagaaagcagguuaggcggaucagggacacccggaacuuccggaacucugagcucucucgguggacucgacccugacagucccaucacuucacaccuagggcagccauccccaaaacagcaaccacuggagccuggagaggccgcgcuucauucggauucccaggauggacaucagauggcauugcugaacuuuuucuuccccgaugagaaaccauacucagaggaggaauccagacgcgugcgccgcaacaaacggucuaaaagcaacgaaggcgcggacggaccagugaaaaauaagaaaaaaggaaagaaagcuggaccaccaggacccaacggaccccccggaccccccgguccucccggcccccagggcccucccggcauucccggaauuccaggaauccccggaacaacugucauggggccuccggggccccccggcccuccuggaccucaggggccaccuggccuucaaggcccauccggugccgccgacaaagccggaacuagagagaaucaaccugcuguggugcauuuacaagggcagggaucagcgauacaaguuaagaacgaucuuaguggagggguucugaaugacuggucucgaaucacuaugaauccaaagguuuucaaguugcauccccgaagcggcgaauuggagguguuaguagaugguacauauuucauauauucacaggucgaagucuauuauauuaauuucaccgacuuugcaagcuacgaagucgugguugacgaaaagccauucuugcaauguacuaggucuauugagacaggcaaaaccaauuacaauacuuguuauaccgccggggucugccuccucaaagccaggcagaagauagcugucaagauggugcaugcagauaucucuauuaauaugucuaaacacacaaccuuuuuuggggccaucagacugggagaagcaccugccucauag

SEQ ID NO: 117535 - protein, 206 aa, Artificial Sequence
  derived and/or modified sequence
MHHNKQATENAKEEVRRILGLLDAYLKTRTFLVGERVTLAAEPKAKDPFAHLPKSTFVLDEFKRKYSNEDTLSVALPYFWEHFDKDGWSLWYSEYRFPEELTQTFMSCNLITGMFQRLDKLRKNAFASVILFGTNNSSSISGVWVFRGQELAFPLSPDWQVDYESYTWRKLDPGREETQTLVREYFSWEGAFQHVGKAFNHGKIFK

SEQ ID NO: 117536 - protein, 437 aa, Artificial Sequence
  derived and/or modified sequence
MAAGTLYTYPENWRAFKALIAAQYSGAQVRVLSAPPHFHFGQTNRTPEFLRKFPAGKVPAFEGDDGFCVFESNAIAYYVSNEELRGSTPEAAAQVVQWVSFADSDIVPPASTWVFPTLGIMHHNKQATENAKEEVRRILGLLDAYLKTRTFLVGERVTLADITVVCTLLWLYKQVLEPSFRQAFPNTNRWFLTCINQPQFRAVLGEVKLCEKMAQFDAKKFAETQPKKDTPRKEKGSREEKQKPQAERKEEKKAAAPAPEEEMDECEQALAAEPKAKDPFAHLPKSTFVLDEFKRKYSNEDTLSVALPYFWEHFDKDGWSLWYSEYRFPEELTQTFMSCNLITGMFQRLDKLRKNAFASVILFGTNNSSSISGVWVFRGQELAFPLSPDWQVDYESYTWRKLDPGSEETQTLVREYFSWEGAFQHVGKAFNQGKIFK

SEQ ID NO: 117537 - protein, 487 aa, Artificial Sequence
  derived and/or modified sequence
MAERWVAPAVLRRARFASTFFLSPQIYAHKDGDLRSAFFILSFKRGEFIPFLNWTLYTYPENWRAFKALIAAQYSGAQVRVLSAPPHFHFGQTNRTPEFLRKFPAGKVPAFEGDDGFCVFESNAIAYYVSNEELRGSTPEAAAQVVQWVSFADSDIVPPASTWVFPTLGIMHHNKQATENAKEEVRRILGLLDAYLKTRTFLVGERVTLADITVVCTLLWLYKQVLEPSFRQAFPNTNRWFLTCINQPQFRAVLGEVKLCEKMAQFDAKKFAETQPKKDTPRKEKGSREEKQKPQAERKEEKKAAAPAPEEEMDECEQALAAEPKAKDPFAHLPKSTFVLDEFKRKYSNEDTLSVALPYFWEHFDKDGWSLWYSEYRFPEELTQTFMSCNLITGMFQRLDKLRKNAFASVILFGTNNSSSISGVWVFRGQELAFPLSPDWQVDYESYTWRKLDPGSEETQTLVREYFSWEGAFQHVGKAFNQGKIFK

SEQ ID NO: 117538 - protein, 206 aa, Artificial Sequence
  derived and/or modified sequence
MHHNKQATENAKEEVRRILGLLDAYLKTRTFLVGERVTLAAEPKAKDPFAHLPKSTFVLDEFKRKYSNEDTLSVALPYFWEHFDKDGWSLWYSEYRFPEELTQTFMSCNLITGMFQRLDKLRKNAFASVILFGTNNSSSISGVWVFRGQELAFPLSPDWQVDYESYTWRKLDPGSEETQTLVREYFSWEGAFQHVGKAFNQGKIFK

SEQ ID NO: 117539 - DNA, 621 bp, Artificial Sequence
  derived and/or modified sequence
atgcaccacaacaagcaggccaccgagaacgccaaggaggaggtgagaagaatcctgggcctgctggacgcctacctgaagaccagaaccttcctggtgggcgagagagtgaccctggccgccgagcccaaggccaaggaccccttcgcccacctgcccaagagcaccttcgtgctggacgagttcaagagaaagtacagcaacgaggacaccctgagcgtggccctgccctacttctgggagcacttcgacaaggacggctggagcctgtggtacagcgagtacagattccccgaggagctgacccagaccttcatgagctgcaacctgatcaccggcatgttccagagactggacaagctgagaaagaacgccttcgccagcgtgatcctgttcggcaccaacaacagcagcagcatcagcggcgtgtgggtgttcagaggccaggagctggccttccccctgagccccgactggcaggtggactacgagagctacacctggagaaagctggaccccggcagagaggagacccagaccctggtgagagagtacttcagctgggagggcgccttccagcacgtgggcaaggccttcaaccacggcaagatcttcaagtag

SEQ ID NO: 117540 - DNA, 621 bp, Artificial Sequence
  derived and/or modified sequence
atgcaccacaataagcaggctacggaaaacgccaaagaggaggtaaggaggatccttggactccttgacgcctatctgaagacaaggacctttctcgttggtgagcgggtaactctggcagccgaacccaaggctaaagatccctttgcccacttgcccaagtccacttttgtgcttgatgagttcaaaaggaaatactccaatgaagacaccttgagcgtcgcacttccttacttttgggagcatttcgataaagacggctggagtctctggtacagcgaatataggttcccggaagagctgacccagacgttcatgtcttgcaatcttataaccggtatgttccagagacttgacaagttgaggaagaatgcgtttgcatctgtgatactgttcgggacaaataattcgtcttccattagcggcgtgtgggtgtttcgtgggcaggagctggcatttcccctttcacctgattggcaggtagactatgaatcctatacctggcggaagctcgacccgggacgcgaagagacccagacccttgtgcgggaatatttttcttgggagggtgcttttcaacacgtgggcaaggccttcaatcatggcaaaatcttcaagtag

SEQ ID NO: 117541 - DNA, 621 bp, Artificial Sequence
  derived and/or modified sequence
atgcaccacaacaagcaggccacagaaaatgccaaggaggaggtgcggcgcatcctgggcctgctggatgcctacctgaagaccaggaccttcctggtgggggagcgggtgaccctggccgctgagcccaaggccaaggacccctttgcccacctgcccaagagcacctttgtgctggatgagttcaagaggaagtacagcaatgaagacaccctgtctgtggccctgccctacttctgggagcactttgacaaggatggctggagcctgtggtacagcgagtaccgcttccctgaggagctgacccagaccttcatgagctgcaacctgatcaccggcatgttccagaggctggacaagctgaggaagaatgcctttgccagcgtcatcctgtttggcaccaacaacagcagcagcatctctggagtgtgggtgttccggggccaggagctggccttccccctgagcccagactggcaggtggactatgagagctacacctggaggaagctggaccccggccgggaggagacccagaccctggtgcgggagtacttctcctgggagggcgccttccagcacgtgggcaaggccttcaaccacggcaagatcttcaagtag

SEQ ID NO: 117542 - DNA, 621 bp, Artificial Sequence
  derived and/or modified sequence
atgcaccacaacaagcaggccaccgagaacgccaaggaggaggtgaggaggatactcggcctcctcgacgcgtacctcaaaacaagaactttcttggtgggtgaaagggtgacattagccgccgaacctaaagccaaagacccatttgcccacttgccgaagtccacattcgtcttggacgaatttaaaagaaaatattcaaatgaggacactttatccgtggcactgccatacttttgggaacactttgacaaagatggatggagcttatggtactccgagtacagattcccagaagaactgacccagacgttcatgtcttgtaacttgattactggcatgtttcagaggcttgacaagctgcgtaaaaacgccttcgcctcagtgattcttttcggaaccaacaattccagcagcatcagtggagtatgggtgttcaggggacaggagctagcttttccactgagcccggactggcaggtagactatgagagttacacgtggcgtaagctggatcccggcagggaggaaacacagactctggtaagagagtacttttcatgggagggcgcattccagcatgtcggcaaagcctttaatcatggcaagatatttaagtag

SEQ ID NO: 117543 - DNA, 621 bp, Artificial Sequence
  derived and/or modified sequence
atgcatcataacaagcaggctactgaaaacgcaaaggaggaagtcagaaggatcctgggcctgctggacgcatacctcaaaactcgcacatttttggtcggcgaacgagtcaccctcgcggcagagcctaaagctaaggacccatttgcacaccttcctaaaagcacttttgtcctcgatgaattcaagcggaagtattctaatgaagataccctgtctgtcgcgttgccctacttctgggagcatttcgacaaggatggctggtccctgtggtatagcgagtacaggtttccagaggagctaactcagacattcatgagttgtaacttaatcacaggcatgttccaaaggctggacaagctgcgcaaaaacgcttttgcctcggtaattctgtttggtactaacaacagtagttctatcagtggggtctgggtattccgtggccaggagctggctttccctctgtctcctgactggcaggttgattacgagtcctatacgtggcggaagctggacccgggtagagaggagacccagactttagttcgcgaatatttctcctgggaaggtgccttccagcatgtgggtaaagcttttaaccacggcaaaatcttcaagtag

SEQ ID NO: 117544 - DNA, 1008 bp, Artificial Sequence
  derived and/or modified sequence
ctttctttgcggaatcaccatggcggctgggaccctgtacacgtatcctgaaaactggagggccttcaaggctctcatcgctgctcagtacagcggggctcagatccgcgtgctctccgcaccaccccacttccattttggccaaaccaaccgcacctctgaatttcttcgccattgcctactatgtgagcaatgaggagctgcggggaagtactccagaggcagcagcccaggtggtgcagtgggtgagctttgctgattccgatatagtgcccccagccagtacctgggtgttccccaccttgggcatcatgcaccacaacaaacaggccactgagaatgcaaaggaggaagtgaggcgaattctggggctgctggatgcttacttgaagacgaggacttttctggtgggcgaacgagtgacattggctgctgagcccaaggccaaggaccccttcgctcacctgcccaagagtacctttgtgttggatgaatttaagcgcaagtactccaatgaggacacactctctgtggcactgccatatttctgggagcactttgataaggacggctggtccctgtggtactcagagtatcgcttccctgaagaactcactcagaccttcatgagctgcaatctcatcactggaatgttccagcgactggacaagctgaggaagaatgccttcgccagtgtcatcctttttggaaccaacaatagcagctccatttctggagtctgggtcttccgaggccaggagcttgcctttccgctgagtccagattggcaggtggactacgagtcatacacatggcggaaactggatcctggcagagaggagacccagacgctggttcgagagtacttttcctgggagggggccttccagcatgtgggcaaagccttcaatcacggcaagatcttcaagtgaacatctcttgccatcacctagctgcctgcacctgcccttcagggagatgggggtcattaaaggaaactgaacattg

SEQ ID NO: 117545 - DNA, 1631 bp, Artificial Sequence
  derived and/or modified sequence
accagcttctccttcctacagttcgcacagctcgaggggagtgcgggggcagcaccgcgcgtggcacctggcacccgcgcagagttcctgaatggcagagcggtgggtggctccagcagtactgagaagagccaggtttgcctccacattcttcctgtcgcctcagatttatgcgcacaaggacggagatttgcgttcagcgttcttcattctctcctttaaacgaggagagttcatcccgttcttaaactggaccctgtacacgtatcctgaaaactggagggccttcaaggctctcatcgctgctcagtacagcggggctcaggtccgcgtgctctccgcaccaccccacttccattttggccaaaccaaccgcacccctgaatttctccgcaaatttcctgccggcaaggtcccagcatttgagggtgatgatggattctgtgtgtttgagagcaacgccattgcctactatgtgagcaatgaggagctgcggggaagtactccagaggcagcagcccaggtggtgcagtgggtgagctttgctgattccgatatagtgcccccagccagtacctgggtgttccccaccttgggcatcatgcaccacaacaaacaggccactgagaatgcaaaggaggaagtgaggcgaattctggggctgctggatgcttacttgaagacgaggacttttctggtgggcgaacgagtgacattggctgacatcacagttgtctgcaccctgttgtggctctataagcaggttctagagccttctttccgccaggcctttcccaataccaaccgctggttcctcacctgcattaaccagccccagttccgggctgtcttgggcgaagtgaaactgtgtgagaagatggcccagtttgatgctaaaaagtttgcagagacccaacctaaaaaggacacaccacggaaagagaagggttcacgggaagagaagcagaagccccaggctgagcggaaggaggagaaaaaggcggctgcccctgctcctgaggaggagatggatgaatgtgagcaggcgctggctgctgagcccaaggccaaggaccccttcgctcacctgcccaagagtacctttgtgttggatgaatttaagcgcaagtactccaatgaggacacactctctgtggcactgccatatttctgggagcactttgataaggacggctggtccctgtggtactcagagtatcgcttccctgaagaactcactcagaccttcatgagctgcaatctcatcactggaatgttccagcgactggacaagctgaggaagaatgccttcgccagtgtcatcctttttggaaccaacaatagcagctccatttctggagtctgggtcttccgaggccaggagcttgcctttccgctgagtccagattggcaggtggactacgagtcatacacatggcggaaactggatcctggcagcgaggagacccagacgctggttcgagagtacttttcctgggagggggccttccagcatgtgggcaaagccttcaatcagggcaagatcttcaagtgaacatctcttgccatcacctagctgcctgcacctgcccttcagggagatgggggtcattaaaggaaactgaacattg

SEQ ID NO: 117546 - DNA, 1008 bp, Artificial Sequence
  derived and/or modified sequence
ctttctttgcggaatcaccatggcggctgggaccctgtacacgtatcctgaaaactggagggccttcaaggctctcatcgctgctcagtacagcggggctcaggtccgcgtgctctccgcaccaccccacttccattttggccaaaccaaccgcacccctgaatttctccgccattgcctactatgtgagcaatgaggagctgcggggaagtactccagaggcagcagcccaggtggtgcagtgggtgagctttgctgattccgatatagtgcccccagccagtacctgggtgttccccaccttgggcatcatgcaccacaacaaacaggccactgagaatgcaaaggaggaagtgaggcgaattctggggctgctggatgcttacttgaagacgaggacttttctggtgggcgaacgagtgacattggctgctgagcccaaggccaaggaccccttcgctcacctgcccaagagtacctttgtgttggatgaatttaagcgcaagtactccaatgaggacacactctctgtggcactgccatatttctgggagcactttgataaggacggctggtccctgtggtactcagagtatcgcttccctgaagaactcactcagaccttcatgagctgcaatctcatcactggaatgttccagcgactggacaagctgaggaagaatgccttcgccagtgtcatcctttttggaaccaacaatagcagctccatttctggagtctgggtcttccgaggccaggagcttgcctttccgctgagtccagattggcaggtggactacgagtcatacacatggcggaaactggatcctggcagcgaggagacccagacgctggttcgagagtacttttcctgggagggggccttccagcatgtgggcaaagccttcaatcagggcaagatcttcaagtgaacatctcttgccatcacctagctgcctgcacctgcccttcagggagatgggggtcattaaaggaaactgaacattg

SEQ ID NO: 117547 - DNA, 1314 bp, Artificial Sequence
  derived and/or modified sequence
atggccgctggtaccctttatacataccccgaaaattggagagcgttcaaggccctgatagctgcccagtactccggagcacaggtcagagtactgagcgcgccccctcatttccacttcgggcagacgaaccggaccccggagttcctcaggaagttccctgccggaaaggtccctgccttcgagggagatgacgggttctgtgtctttgagtctaacgccatcgcttattatgtgtctaatgaggagctacgagggtcaacacctgaggcggctgcccaggtcgtgcagtgggtcagcttcgctgattccgacatagtacccccagccagcacatgggtgttccctactctcgggattatgcatcataataagcaggccacagagaacgctaaggaggaggtgagaagaattctgggcttgttggatgcttatctgaaaacaagaactttccttgtgggagagagagtgactcttgcagacattaccgtggtatgtaccctcctctggctctacaaacaggtcttggagcctagcttccgccaggcattcccaaacaccaatcgctggtttctgacctgcattaaccagccccaatttcgggctgtcctcggtgaagtgaagttgtgtgaaaagatggcccagttcgacgccaagaaattcgctgaaacgcaacctaaaaaggacactcccaggaaagagaagggaagtcgcgaagagaagcagaagccacaagctgagaggaaggaggagaagaaagctgctgccccagcccccgaggaggaaatggacgagtgtgaacaagcccttgcagcggaacctaaagcaaaagaccccttcgctcacctccccaagtctacgtttgtgctggacgagttcaagcgcaagtattccaacgaggacactctctccgtggcactgccctatttctgggaacatttcgacaaggatgggtggagcctgtggtacagcgaatacaggttcccagaagagctgactcagacatttatgagttgtaacttaataactggcatgtttcagagactggataagcttcgtaaaaacgccttcgctagcgttattctatttgggaccaacaacagctcctcaatttctggtgtgtgggtgttcagagggcaagaactagcatttccactgagtcccgattggcaggtagattacgaaagttacacctggaggaagttagaccctggtagcgaagaaacccagacactcgttcgggaatatttttcatgggagggtgctttccagcacgtcggaaaggcttttaaccagggtaagatcttcaagtag

SEQ ID NO: 117548 - DNA, 1464 bp, Artificial Sequence
  derived and/or modified sequence
atggctgagaggtgggtggcccccgccgtcctgcgaagggctaggtttgcttcaactttctttttatccccgcagatttatgcacataaagacggcgatctcaggagcgcattcttcatcttgtccttcaagcggggagagtttattcccttcctgaactggacactatatacgtaccctgagaactggcgggccttcaaggctctgattgctgcccaatacagtggcgcccaagtgagagtgctgagtgctcctccacattttcatttcggccagaccaataggactccagagttccttaggaaattcccagctggcaaagtgcccgccttcgaaggagatgatggtttttgcgtgtttgagtctaacgccattgcatattacgtgagcaatgaggagctgcggggctccacgcctgaagcggccgcccaagttgtgcaatgggtgtcattcgccgactcggacatagtgcccccagctagtacctgggtgtttcctacactaggcatcatgcaccacaacaaacaggcaaccgaaaacgctaaggaggaggtgcgccgcatactgggactgctcgatgcttatctgaagacccgaacattcttagtgggcgagcgagtaaccctggcagacatcaccgtagtctgcactctgctgtggctctacaaacaggtcctggaaccttcatttagacaagcatttccgaacactaacagatggttcttaacgtgcataaaccagccgcagtttcgagcagtgctgggtgaggttaagctgtgcgagaagatggcccagtttgatgcaaaaaagttcgccgagactcagcctaaaaaagacacgccacggaaggagaaaggctcaagagaggaaaaacaaaagccccaggccgaacgcaaggaggaaaagaaagccgctgctcccgccccggaggaggaaatggatgaatgtgagcaggcgctcgccgctgagccaaaggctaaagacccattcgcgcatctccctaagtctaccttcgtgctcgacgaatttaagcgaaaatattctaacgaggacacattgtcggtagcactcccctacttttgggagcacttcgacaaggatggatggagcctatggtatagtgaatatcgttttccagaagagctgacacagacattcatgtcatgtaatctgatcaccggcatgttccaaaggctggataaactcagaaaaaatgccttcgcctcagtgatcttattcggcaccaacaatagcagctcaatttccggcgtgtgggtgtttcgcgggcaggagcttgcctttcccctgagccctgactggcaggtggattacgaatcctatacctggaggaaactggatcccggaagcgaagagacacaaactctggtgcgcgaatacttttcctgggaaggggcatttcagcatgtcgggaaggcttttaaccagggcaagatcttcaaatag

SEQ ID NO: 117549 - DNA, 621 bp, Artificial Sequence
  derived and/or modified sequence
atgcaccacaataagcaggcaaccgaaaacgccaaggaggaggtcaggaggattctggggttattggatgcttacctgaagaccagaacctttctggtgggtgaacgggttacgttggcggcggaacctaaggccaaggacccgtttgcccacctgcctaaaagtacctttgttcttgatgaatttaagcgcaagtattccaacgaagacacactgtccgtggctctgccttacttttgggaacatttcgacaaggacggatggtcgttatggtactccgagtacaggttcccagaggaactgacccagacgtttatgagctgcaacctgataactggcatgtttcaacggctggataaattgaggaaaaacgcttttgcgagcgtgattctttttggtactaacaacagctcctccatttcgggagtatgggtgttccgtggccaagagctcgccttcccccttagtcccgattggcaggtcgactatgagtcctacacttggaggaaacttgaccccgggtctgaagagacacagacactcgttcgtgagtatttctcatgggagggggcgttccaacatgtgggtaaagctttcaaccagggaaaaatcttcaaatag

SEQ ID NO: 117550 - DNA, 1314 bp, Artificial Sequence
  derived and/or modified sequence
atggctgctggcaccctgtacacctacccagagaactggagggccttcaaggccctgattgctgcccagtacagcggggcccaggtgcgggtgctgagcgccccaccccacttccacttcggccagaccaacagaacacctgagttcctgaggaagtttcctgctgggaaggtgcctgcctttgaaggagatgatggcttctgtgtgtttgagagcaatgccatcgcctactacgtgtccaatgaggagctgcggggcagcaccccagaggccgccgcccaggtggtgcagtgggtgtcctttgctgacagcgacatcgtgcccccagccagcacctgggtgttccccaccctgggcatcatgcaccacaacaagcaggccacagaaaatgccaaggaggaggtgcggcgcatcctgggcctgctggatgcctacctgaagaccaggaccttcctggtgggggagcgggtgaccctggccgacatcaccgtggtgtgcaccctgctgtggctgtacaagcaggtgctggagcccagcttccggcaggccttccccaacaccaaccgctggttcctgacctgcatcaaccagccccagttccgggctgtgctgggggaggtgaagctgtgtgagaagatggcccagtttgatgccaagaagtttgctgagacccagcccaagaaggacacccccaggaaggagaagggcagccgggaggagaagcagaagccccaggccgagaggaaggaggagaagaaggctgctgccccagcccctgaggaggagatggatgaatgtgagcaggccctggccgctgagcccaaggccaaggacccctttgcccacctgcccaagagcacctttgtgctggatgagttcaagaggaagtacagcaatgaagacaccctgtctgtggccctgccctacttctgggagcactttgacaaggatggctggagcctgtggtacagcgagtaccgcttccctgaggagctgacccagaccttcatgagctgcaacctgatcaccggcatgttccagaggctggacaagctgaggaagaatgcctttgccagcgtcatcctgtttggcaccaacaacagcagcagcatcagcggcgtgtgggtgttccggggccaggagctggccttccccctgagcccagactggcaggtggactatgagagctacacctggaggaagctggaccccggcagcgaggagacccagaccctggtgcgggagtacttctcctgggagggcgccttccagcacgtgggcaaggccttcaaccagggcaagatcttcaagtag

SEQ ID NO: 117551 - DNA, 1464 bp, Artificial Sequence
  derived and/or modified sequence
atggccgagcgctgggtggccccagctgtgctgcggcgggccaggtttgccagcaccttcttcctgagcccccagatctatgcccacaaggatggagacctgcggagcgccttcttcatcctgtccttcaagagaggagagttcatccccttcctgaactggaccctgtacacctacccagagaactggagggccttcaaggccctgattgctgcccagtacagcggggcccaggtgcgggtgctgagcgccccaccccacttccacttcggccagaccaacagaacacctgagttcctgaggaagtttcctgctgggaaggtgcctgcctttgaaggagatgatggcttctgtgtgtttgagagcaatgccatcgcctactacgtgtccaatgaggagctgcggggcagcaccccagaggccgccgcccaggtggtgcagtgggtgtcctttgctgacagcgacatcgtgcccccagccagcacctgggtgttccccaccctgggcatcatgcaccacaacaagcaggccacagaaaatgccaaggaggaggtgcggcgcatcctgggcctgctggatgcctacctgaagaccaggaccttcctggtgggggagcgggtgaccctggccgacatcaccgtggtgtgcaccctgctgtggctgtacaagcaggtgctggagcccagcttccggcaggccttccccaacaccaaccgctggttcctgacctgcatcaaccagccccagttccgggctgtgctgggggaggtgaagctgtgtgagaagatggcccagtttgatgccaagaagtttgctgagacccagcccaagaaggacacccccaggaaggagaagggcagccgggaggagaagcagaagccccaggccgagaggaaggaggagaagaaggctgctgccccagcccctgaggaggagatggatgaatgtgagcaggccctggccgctgagcccaaggccaaggacccctttgcccacctgcccaagagcacctttgtgctggatgagttcaagaggaagtacagcaatgaagacaccctgtctgtggccctgccctacttctgggagcactttgacaaggatggctggagcctgtggtacagcgagtaccgcttccctgaggagctgacccagaccttcatgagctgcaacctgatcaccggcatgttccagaggctggacaagctgaggaagaatgcctttgccagcgtcatcctgtttggcaccaacaacagcagcagcatcagcggcgtgtgggtgttccggggccaggagctggccttccccctgagcccagactggcaggtggactatgagagctacacctggaggaagctggaccccggcagcgaggagacccagaccctggtgcgggagtacttctcctgggagggcgccttccagcacgtgggcaaggccttcaaccagggcaagatcttcaagtag

SEQ ID NO: 117552 - DNA, 621 bp, Artificial Sequence
  derived and/or modified sequence
atgcaccacaacaagcaggccacagaaaatgccaaggaggaggtgcggcgcatcctgggcctgctggatgcctacctgaagaccaggaccttcctggtgggggagcgggtgaccctggccgctgagcccaaggccaaggacccctttgcccacctgcccaagagcacctttgtgctggatgagttcaagaggaagtacagcaatgaagacaccctgtctgtggccctgccctacttctgggagcactttgacaaggatggctggagcctgtggtacagcgagtaccgcttccctgaggagctgacccagaccttcatgagctgcaacctgatcaccggcatgttccagaggctggacaagctgaggaagaatgcctttgccagcgtcatcctgtttggcaccaacaacagcagcagcatctctggagtgtgggtgttccggggccaggagctggccttccccctgagcccagactggcaggtggactatgagagctacacctggaggaagctggaccccggcagcgaggagacccagaccctggtgcgggagtacttctcctgggagggcgccttccagcacgtgggcaaggccttcaaccagggcaagatcttcaagtag

SEQ ID NO: 117553 - DNA, 1314 bp, Artificial Sequence
  derived and/or modified sequence
atggccgccggcaccctgtacacctaccccgagaactggcgggcctttaaagcactgattgccgcccaatatagtggcgctcaagttcgggttttatcagcacccccacattttcactttggacagacaaaccgcacccctgagttcctccggaaattccccgctgggaaggttcctgcctttgagggagacgatggattctgtgttttcgaatccaacgccattgcttattacgtgagtaacgaggagctgcgggggtcaacgcctgaggcagccgcgcaggtcgtgcagtgggtgtctttcgctgactccgatatcgtgccacctgcaagcacttgggtgtttccaacactcggaatcatgcatcacaacaagcaggcgaccgagaacgcgaaagaggaggtaagacggatcctcggattgttggatgcataccttaagactaggaccttcctagtcggggaaagggtaactctggccgatatcactgtggtgtgcaccttattgtggctttataaacaggtgttggagcccagcttccgacaggcatttcctaacactaatcgatggtttttgacatgcatcaaccaacctcagtttagagcggtgctgggtgaggtcaagctttgtgagaaaatggcccagtttgacgctaaaaaattcgctgaaacacagccaaagaaagataccccccgaaaggagaaggggtcccgagaagaaaagcagaagcctcaggcagaaaggaaggaagaaaaaaaagctgccgcccccgcgcccgaggaggagatggatgagtgcgagcaggctctcgcggccgagcccaaggccaaggacccatttgctcatctgccgaagagcacctttgtcctcgatgagtttaaacggaaatacagtaacgaggatacactgagcgtggccctcccctacttttgggagcatttcgacaaagacggatggtctctgtggtactcagaataccggtttcctgaggaattgacacagacttttatgtcttgcaacctcataaccggtatgtttcagaggcttgacaagttgcgaaagaatgcgttcgcctctgtgatcttatttgggacaaataactcctcaagcatttctggtgtgtgggtgttccgaggccaggaacttgcgtttcctctctcacccgattggcaggtggactatgaatcatatacatggcgcaagctggatcctggatctgaggaaactcagacactagtgcgcgaatatttctcttgggagggggcatttcaacacgtgggtaaagcgttcaatcaaggaaagatcttcaaatag

SEQ ID NO: 117554 - DNA, 1464 bp, Artificial Sequence
  derived and/or modified sequence
atggccgagcggtgggtggcccccgccgtgctgcggcgggcccggttcgcctctacttttttcctgtcaccccaaatttacgctcataaggatggggacctacgaagtgcctttttcatactgtcgttcaaacggggcgaatttatccccttcttgaactggaccttgtacacatatccagaaaactggcgcgccttcaaagctctgattgccgctcagtactctggagcgcaggtccgggttctgagtgcacctccccattttcactttgggcagaccaaccggacgcctgaatttctcagaaagtttcccgccggcaaagtccccgcgttcgaaggagacgatggattttgcgtcttcgaaagtaacgccatcgcttactatgtcagcaatgaagaattgaggggctctacgccagaggcggccgcgcaggtcgttcagtgggtttctttcgcagacagcgatatcgttcctcccgcgtctacatgggtctttccaactctcggcatcatgcaccacaacaaacaggcaaccgaaaacgccaaagaagaggtacgtcgcatactagggttgctcgacgcctacttgaaaacccgcacgtttctggttggagagagggtgaccctggcagatatcacagtggtgtgtactctgctgtggctatacaaacaggtgctggaaccttcttttcggcaggcctttcccaacaccaatagatggttcctcacatgtatcaaccaaccgcagttcagagcagtgttaggcgaagtcaagctgtgcgaaaagatggcccagttcgatgctaaaaagttcgccgagacacaaccgaagaaagatacacctaggaaggaaaaaggctccagggaggagaagcagaagccccaggccgagcggaaagaggaaaagaaggccgcagctccagcgcctgaggaagagatggatgagtgtgaacaggcccttgccgctgagcctaaggcgaaagaccctttcgcccatctgcctaaaagtacatttgtgctggatgagttcaaacgaaaatattctaatgaggacacgctgagcgtggccctaccatacttttgggagcactttgacaaggacggctggtcactttggtattccgaatataggttccctgaggaattaacccagacctttatgtcgtgcaatctgattacaggaatgttccagcgtttagataagctccgcaagaacgctttcgccagcgtcatcctgtttggtactaacaattccagtagcatttccggagtgtgggttttcagaggacaggagttggcatttcccctgtctccagactggcaagttgattatgagtcctatacttggcgaaagctggatccaggcagcgaggaaacacaaacattggtgagagagtacttctcatgggaaggtgcatttcagcacgtgggcaaagccttcaatcaaggcaagatctttaaatag

SEQ ID NO: 117555 - DNA, 621 bp, Artificial Sequence
  derived and/or modified sequence
atgcaccacaacaagcaggccaccgagaacgccaaggaggaggtgagaaggatattgggcttactggacgcctacctgaagactcgcactttcctggtcggggagagagtgaccctagcagcggagcccaaggccaaggatccattcgcgcacctcccaaaaagtacatttgtattagacgagttcaaacgaaagtactccaacgaagatacactcagcgtcgccttaccatacttctgggagcatttcgacaaggatggctggtccctatggtactccgagtatagattcccggaggaactgactcagacattcatgtcatgtaatttgatcactggtatgttccagcggcttgataaactgcggaagaacgccttcgcctcggtcattctcttcggaacgaataactcctcgagtatcagtggtgtgtgggtgttcaggggccaggagttagcctttccactgtcaccggattggcaggttgactacgaatcatacacctggaggaagctggaccccggatccgaggagacccagacactagtacgagagtattttagctgggagggggcttttcagcacgtgggcaaggcttttaaccaggggaaaatctttaaatag

SEQ ID NO: 117556 - DNA, 1314 bp, Artificial Sequence
  derived and/or modified sequence
atggctgccggtaccctgtatacttacccggaaaactggagagcttttaaagcattaattgccgctcaatactcaggtgcacaggtccgtgtgctgtcagctcccccacacttccattttggccagacaaaccgcacccctgaattcctcaggaaatttcccgctggcaaggtaccagccttcgaaggtgatgatggcttttgtgtgttcgaatcgaacgccatcgcctattatgtgtctaacgaagaacttcgtggctccactcctgaggccgcagcccaagtggtgcagtgggtctctttcgccgattctgacatcgtgccacctgcgtccacctgggttttccccactctcggcattatgcaccacaacaagcaggcaaccgagaatgccaaagaggaagtgcggagaatcctcggcctgttagatgcctatctgaaaacaagaaccttcttagtaggtgagcgggtcacccttgccgatattaccgtcgtatgtacactgttgtggttgtataaacaagtcctcgagccgtcctttcgtcaggctttccccaatactaatagatggtttctcacgtgcataaatcagcctcagtttagggcagtacttggtgaagtgaagctgtgtgaaaagatggcacagtttgacgctaagaaattcgcggaaacccagcctaaaaaagatacgccaagaaaagagaagggttcccgcgaagaaaagcagaaaccccaggcagagcgcaaagaagagaagaaggcggcagcccctgcacctgaggaggaaatggacgaatgcgaacaagctctagccgctgagccaaaagcaaaggatccattcgcccacctcccaaaaagtacattcgtccttgatgagttcaagcgtaagtactccaatgaagatactcttagcgtcgctcttccttatttctgggagcactttgacaaggatggttggagtttgtggtattccgagtatcgtttccctgaagagctgacacaaacctttatgtcctgcaaccttatcaccgggatgttccagcggctcgacaaactcaggaaaaatgccttcgctagcgtgatattgtttgggactaataacagtagcagcatatcaggagtttgggtctttcggggacaagagttggctttccctctgtcacccgactggcaagtggattacgagagttacacatggcggaagctggatcctggatctgaggagactcagactttggttcgggaatactttagttgggagggggcttttcaacacgtgggtaaagctttcaatcagggcaagatctttaagtag

SEQ ID NO: 117557 - DNA, 1464 bp, Artificial Sequence
  derived and/or modified sequence
atggccgaaaggtgggtggccccagcagtgttaagacgagccagattcgcctcaaccttcttcctgagcccgcagatatacgctcacaaggatggcgacttgcgttcggccttttttatccttagcttcaaacgcggagagtttatcccctttctgaactggacactatacacataccctgaaaattggagggcttttaaggccctgatcgccgcacagtattccggagcgcaggtgcgggtgctgtctgctccaccacacttccatttcgggcagaccaatagaactcccgaattcctcaggaagtttcccgctggcaaggtaccagccttcgagggagacgacggtttctgcgtgttcgagagcaacgcaattgcgtactacgtgtctaacgaggaactgagaggcagcacccccgaagccgctgctcaggtggttcagtgggtgagctttgctgattcggatattgtcccgccagcgtcaacctgggtctttccaacgctgggcatcatgcaccacaacaaacaggctaccgaaaacgcaaaagaggaagtccgtagaatcctggggctcttggacgcttacctgaaaactcggacgttcttggtcggagagcgagtcactctggccgatatcacagtagtgtgtacactactgtggctgtacaaacaagtgctggaaccaagctttagacaggccttcccaaacaccaacaggtggttcctcacctgtataaaccagcctcaatttagggctgttttaggggaagtgaagctctgcgaaaagatggcccaatttgacgccaaaaagttcgccgaaacccaaccgaagaaagacacccccaggaaggagaaggggagtagagaagagaagcaaaaaccgcaggcagagagaaaagaagaaaaaaaggcggctgccccagctccggaagaagaaatggatgaatgcgagcaggcactggctgctgaacctaaggcaaaggatcccttcgcccacctgcccaaatcaacctttgtcctcgacgagtttaaaagaaaatatagtaacgaagatacgctgtccgtcgcattgccctatttctgggagcactttgataaggatgggtggtccctgtggtacagcgaatacagattccctgaggagttaacacagaccttcatgtcctgtaacctcattacaggaatgtttcagcgtctggataagctccgcaagaacgccttcgcaagcgtgatcttgttcggtactaataacagtagctctatctccggagtatgggtcttcaggggacaggagctggcctttcctctgtcccccgattggcaggtggactatgaaagctacacctggagaaagctggatcccggatctgaggagacacagaccctcgttagagagtatttcagctgggagggggcattccagcacgttggcaaggcttttaaccaggggaaaatttttaagtag

SEQ ID NO: 117558 - DNA, 621 bp, Artificial Sequence
  derived and/or modified sequence
atgcaccacaacaaacaggccacagagaatgctaaagaggaggtaaggcgcatcttaggcctgctggatgcctacctgaagaccagaaccttcctggtgggggagagggtcacactggccgcagagcctaaggccaaggaccccttcgcccacttacccaaatcgacattcgtgctagacgaatttaagcgcaaatactcaaacgaagacaccctctccgtagctttgccttatttctgggagcacttcgacaaggacggctggtcactgtggtactccgagtacagattccccgaggaacttacacaaacgttcatgagctgcaatttgatcacagggatgtttcaacgactggataagttaaggaagaacgccttcgctagcgtgattctattcggtactaataattcttcttccatctctggcgtctgggtatttagaggacaggagctggcattcccactttctcccgattggcaagtggattacgaaagctacacctggcgaaagttagacccaggatctgaagagactcagaccttagtgcgcgagtacttctcatgggagggggcatttcagcatgtcgggaaagccttcaatcaagggaaaatttttaagtag

SEQ ID NO: 117559 - DNA, 1314 bp, Artificial Sequence
  derived and/or modified sequence
atggccgccggcaccctgtacacctaccccgagaactggagagccttcaaggccctgatcgccgcccagtacagcggcgcccaggtgagagtgctgagcgcccccccccacttccacttcggccagaccaacagaacccccgagttcctgagaaagttccccgccggcaaggtgcccgccttcgagggcgacgacggcttctgcgtgttcgagagcaacgccatcgcctactacgtgagcaacgaggagctgagaggcagcacccccgaggccgccgcccaggtggtgcagtgggtgagcttcgccgacagcgacatcgtgccccccgccagcacctgggtgttccccaccctgggcatcatgcaccacaacaagcaggccaccgagaacgccaaggaggaggtgagaagaatcctgggcctgctggacgcctacctgaagaccagaaccttcctggtgggcgagagagtgaccctggccgacatcaccgtggtgtgcaccctgctgtggctgtacaagcaggtgctggagcccagcttcagacaggccttccccaacaccaacagatggttcctgacctgcatcaaccagccccagttcagagccgtgctgggcgaggtgaagctgtgcgagaagatggcccagttcgacgccaagaagttcgccgagacccagcccaagaaggacacccccagaaaggagaagggcagcagagaggagaagcagaagccccaggccgagagaaaggaggagaagaaggccgccgcccccgcccccgaggaggagatggacgagtgcgagcaggccctggccgccgagcccaaggccaaggaccccttcgcccacctgcccaagagcaccttcgtgctggacgagttcaagagaaagtacagcaacgaggacaccctgagcgtggccctgccctacttctgggagcacttcgacaaggacggctggagcctgtggtacagcgagtacagattccccgaggagctgacccagaccttcatgagctgcaacctgatcaccggcatgttccagagactggacaagctgagaaagaacgccttcgccagcgtgatcctgttcggcaccaacaacagcagcagcatcagcggcgtgtgggtgttcagaggccaggagctggccttccccctgagccccgactggcaggtggactacgagagctacacctggagaaagctggaccccggcagcgaggagacccagaccctggtgagagagtacttcagctgggagggcgccttccagcacgtgggcaaggccttcaaccagggcaagatcttcaagtag

SEQ ID NO: 117560 - DNA, 1464 bp, Artificial Sequence
  derived and/or modified sequence
atggccgagagatgggtggcccccgccgtgctgagaagagccagattcgccagcaccttcttcctgagcccccagatctacgcccacaaggacggcgacctgagaagcgccttcttcatcctgagcttcaagagaggcgagttcatccccttcctgaactggaccctgtacacctaccccgagaactggagagccttcaaggccctgatcgccgcccagtacagcggcgcccaggtgagagtgctgagcgcccccccccacttccacttcggccagaccaacagaacccccgagttcctgagaaagttccccgccggcaaggtgcccgccttcgagggcgacgacggcttctgcgtgttcgagagcaacgccatcgcctactacgtgagcaacgaggagctgagaggcagcacccccgaggccgccgcccaggtggtgcagtgggtgagcttcgccgacagcgacatcgtgccccccgccagcacctgggtgttccccaccctgggcatcatgcaccacaacaagcaggccaccgagaacgccaaggaggaggtgagaagaatcctgggcctgctggacgcctacctgaagaccagaaccttcctggtgggcgagagagtgaccctggccgacatcaccgtggtgtgcaccctgctgtggctgtacaagcaggtgctggagcccagcttcagacaggccttccccaacaccaacagatggttcctgacctgcatcaaccagccccagttcagagccgtgctgggcgaggtgaagctgtgcgagaagatggcccagttcgacgccaagaagttcgccgagacccagcccaagaaggacacccccagaaaggagaagggcagcagagaggagaagcagaagccccaggccgagagaaaggaggagaagaaggccgccgcccccgcccccgaggaggagatggacgagtgcgagcaggccctggccgccgagcccaaggccaaggaccccttcgcccacctgcccaagagcaccttcgtgctggacgagttcaagagaaagtacagcaacgaggacaccctgagcgtggccctgccctacttctgggagcacttcgacaaggacggctggagcctgtggtacagcgagtacagattccccgaggagctgacccagaccttcatgagctgcaacctgatcaccggcatgttccagagactggacaagctgagaaagaacgccttcgccagcgtgatcctgttcggcaccaacaacagcagcagcatcagcggcgtgtgggtgttcagaggccaggagctggccttccccctgagccccgactggcaggtggactacgagagctacacctggagaaagctggaccccggcagcgaggagacccagaccctggtgagagagtacttcagctgggagggcgccttccagcacgtgggcaaggccttcaaccagggcaagatcttcaagtag

SEQ ID NO: 117561 - DNA, 621 bp, Artificial Sequence
  derived and/or modified sequence
atgcaccacaacaagcaggccaccgagaacgccaaggaggaggtgagaagaatcctgggcctgctggacgcctacctgaagaccagaaccttcctggtgggcgagagagtgaccctggccgccgagcccaaggccaaggaccccttcgcccacctgcccaagagcaccttcgtgctggacgagttcaagagaaagtacagcaacgaggacaccctgagcgtggccctgccctacttctgggagcacttcgacaaggacggctggagcctgtggtacagcgagtacagattccccgaggagctgacccagaccttcatgagctgcaacctgatcaccggcatgttccagagactggacaagctgagaaagaacgccttcgccagcgtgatcctgttcggcaccaacaacagcagcagcatcagcggcgtgtgggtgttcagaggccaggagctggccttccccctgagccccgactggcaggtggactacgagagctacacctggagaaagctggaccccggcagcgaggagacccagaccctggtgagagagtacttcagctgggagggcgccttccagcacgtgggcaaggccttcaaccagggcaagatcttcaagtag

SEQ ID NO: 117562 - DNA, 1523 bp, Artificial Sequence
  derived and/or modified sequence
gtcttctgtttcgtcctcgctttccggctgctgtttctccacggctctcctctttccccctcccttctctcccgggcggcttactttgcggcagcgccgagaaccccaccccctttctttgcggaatcaccatggcggctgggaccctgtacacgtatcctgaaaactggagggccttcaaggctctcatcgctgctcagtacagcggggctcaggtccgcgtgctctccgcaccaccccacttccattttggccaaaccaaccgcacccctgaatttctccgcaaatttcctgccggcaaggtcccagcatttgagggtgatgatggattctgtgtgtttgagagcaacgccattgcctactatgtgagcaatgaggagctgcggggaagtactccagaggcagcagcccaggtggtgcagtgggtgagctttgctgattccgatatagtgcccccagccagtacctgggtgttccccaccttgggcatcatgcaccacaacaaacaggccactgagaatgcaaaggaggaagtgaggcgaattctggggctgctggatgcttacttgaagacgaggacttttctggtgggcgaacgagtgacattggctgacatcacagttgtctgcaccctgttgtggctctataagcaggttctagagccttctttccgccaggcctttcccaataccaaccgctggttcctcacctgcattaaccagccccagttccgggctgtcttgggcgaagtgaaactgtgtgagaagatggcccagtttgatgctaaaaagtttgcagagacccaacctaaaaaggacacaccacggaaagagaagggttcacgggaagagaagcagaagccccaggctgagcggaaggaggagaaaaaggcggctgcccctgctcctgaggaggagatggatgaatgtgagcaggcgctggctgctgagcccaaggccaaggaccccttcgctcacctgcccaagagtacctttgtgttggatgaatttaagcgcaagtactccaatgaggacacactctctgtggcactgccatatttctgggagcactttgataaggacggctggtccctgtggtactcagagtatcgcttccctgaagaactcactcagaccttcatgagctgcaatctcatcactggaatgttccagcgactggacaagctgaggaagaatgccttcgccagtgtcatcctttttggaaccaacaatagcagctccatttctggagtctgggtcttccgaggccaggagcttgcctttccgctgagtccagattggcaggtggactacgagtcatacacatggcggaaactggatcctggcagcgaggagacccagacgctggttcgagagtacttttcctgggagggggccttccagcatgtgggcaaagccttcaatcagggcaagatcttcaagtgaacatctcttgccatcacctagctgcctgcacctgcccttcagggagatgggggtcattaaaggaaactgaacattgaa

SEQ ID NO: 117563 - protein, 213 aa, Artificial Sequence
  derived and/or modified sequence
MAPAQRPLLPLLLLLLPLPPPPFARAEDAARANSDRYAVYWNRSNPRFHAGAGDDGGGYTVEVSINDYLDIYCPHYGAPLPPAERMEHYVLYMVNGEGHASCDHRQRGFKRWECNRPAAPGGPLKFSEKFQLFTPFSLGFEFRPGHEYYYISATPPNAVDRPCLRLKVYVRPTNETLYEAPEPIFTSNNSCSSPGGCRLFLSTIPVLWTLLGS

SEQ ID NO: 117564 - DNA, 642 bp, Artificial Sequence
  derived and/or modified sequence
atggcccccgcccagagacccctgctgcccctgctgctgctgctgctgcccctgccccccccccccttcgccagagccgaggacgccgccagagccaacagcgacagatacgccgtgtactggaacagaagcaaccccagattccacgccggcgccggcgacgacggcggcggctacaccgtggaggtgagcatcaacgactacctggacatctactgcccccactacggcgcccccctgccccccgccgagagaatggagcactacgtgctgtacatggtgaacggcgagggccacgccagctgcgaccacagacagagaggcttcaagagatgggagtgcaacagacccgccgcccccggcggccccctgaagttcagcgagaagttccagctgttcacccccttcagcctgggcttcgagttcagacccggccacgagtactactacatcagcgccaccccccccaacgccgtggacagaccctgcctgagactgaaggtgtacgtgagacccaccaacgagaccctgtacgaggcccccgagcccatcttcaccagcaacaacagctgcagcagccccggcggctgcagactgttcctgagcaccatccccgtgctgtggaccctgctgggcagctag

SEQ ID NO: 117565 - DNA, 642 bp, Artificial Sequence
  derived and/or modified sequence
atggcgccggctcagcggcccctgctgcctctgctgttacttttactacccctgccacctccaccctttgcacgcgccgaggacgctgcacgcgcaaattccgataggtacgctgtgtactggaatagatcaaacccgcgattccatgcaggcgctggcgacgacggcggtggctatacagtggaggtgagcataaacgattacctggacatctactgcccacattacggcgcgccgctgccccccgctgagcgaatggagcactatgtcctttatatggtcaacggtgaggggcatgcctcctgcgaccaccgacagcgcggcttcaagcgatgggagtgcaacagacccgcagcacccggaggcccactcaaattttcagaaaagtttcagctgttcacaccattctctctgggcttcgagttcagacctggacacgaatattactacatctccgcaaccccacccaacgcggtcgatagaccatgtcttcgactcaaagtgtacgtgcgcccgacaaatgagactctgtacgaagctccagagccaatcttcacaagcaacaactcttgttcaagtcccgggggctgccgactgttcctaagcactatccctgtactatggaccttactgggctcctag

SEQ ID NO: 117566 - DNA, 642 bp, Artificial Sequence
  derived and/or modified sequence
atggccccagcccagaggcccctgctgcccctgctgctgctgctgctgcccctgcccccacctccatttgcccgggcagaagatgctgcccgggccaacagcgacagatatgctgtgtactggaacagaagcaacccccgcttccacgccggggctggagatgatggcggcggctacacagtggaggtgtccatcaatgactacctggacatctactgcccccactacggggcccccctgcccccagctgagaggatggagcactacgtgctgtacatggtgaatggagagggccacgccagctgtgaccaccggcagaggggcttcaagcgctgggagtgcaacagacctgctgcccctgggggccccctgaagttcagcgagaagttccagctgttcacccccttcagcctgggctttgagttccggcccggccacgagtactactacatcagcgccaccccaccaaatgctgtggaccggccctgcctgcggctgaaggtgtatgtgcggcccaccaatgagaccctgtatgaggcccctgagcccatcttcaccagcaacaacagctgcagcagccctgggggctgccgcctcttcctgagcaccatccctgtgctgtggaccctgctgggcagctag

SEQ ID NO: 117567 - DNA, 642 bp, Artificial Sequence
  derived and/or modified sequence
atggcccccgcccagcggcccctgctgcccctgctgctgctgctgctgccactgcctccaccccccttcgcgcgcgctgaagacgcagcccgcgcaaactccgacaggtacgccgtgtattggaatcgtagtaaccccaggtttcacgccggagccggcgacgacggcggcggctacaccgtcgaagtgtctatcaatgactatctggacatatattgcccacactatggggcaccactgccccccgcagaaaggatggagcattacgtactttacatggtaaatggcgaagggcacgcgagttgcgaccataggcagaggggatttaagaggtgggagtgtaataggcccgctgctcccgggggcccgttgaaattttccgaaaagtttcagcttttcactcctttttccctgggcttcgagtttcgccctggccacgagtattactacatctctgctacccccccaaatgctgtcgacaggccttgcctgaggctcaaggtttacgttcgcccaacgaacgaaaccctctacgaagcacctgagcctatcttcacatccaataacagctgtagcagccccggggggtgtaggctctttctgtcgactatacccgtgctgtggacactcttagggagctag

SEQ ID NO: 117568 - DNA, 642 bp, Artificial Sequence
  derived and/or modified sequence
atggcccctgcccagcgcccactgttaccactcctgttactattgctgcccctaccaccccctccctttgccagggccgaggacgccgctcgcgctaacagcgatcgctacgccgtgtattggaatcggagtaatcctcgctttcacgctggagccggtgatgacggtggaggctataccgtcgaggtttcaatcaatgactacttggacatctactgccctcattatggcgcacccctgccacctgccgaacggatggaacactacgtgctctacatggtaaacggggaggggcacgcttcttgcgaccacagacagcggggtttcaagcgatgggagtgcaacagaccggctgcgccaggcggacccctgaaatttagtgaaaagtttcaactttttacccccttctctcttggattcgaatttagaccgggtcatgagtactattatatatccgctacacctcccaacgccgtggatagaccgtgccttcggttaaaggtctatgtgcggccaacaaacgagaccctgtacgaagctcctgaaccaatttttaccagtaataacagctgttccagtccagggggatgcaggctgttcctctcaacgatccctgtactctggacactgctcggcagttag

SEQ ID NO: 117569 - DNA, 642 bp, Artificial Sequence
  derived and/or modified sequence
atggcgcccgcgcagcgcccgctgctcccgctgctgctcctgctgttaccgctgccgccgccgcccttcgcgcgcgccgaggacgccgcccgcgccaactcggaccgctacgccgtctactggaaccgcagcaaccccaggttccacgcaggcgcgggggacgacggcgggggctacacggtggaggtgagcatcaatgactacctggacatctactgcccgcactatggggcgccgctgccgccggccgagcgcatggagcactacgtgctgtacatggtcaacggcgagggccacgcctcctgcgaccaccgccagcgcggcttcaagcgctgggagtgcaaccggcccgcggcgcccggggggccgctcaagttctcggagaagttccagctcttcacgcccttctccctgggcttcgagttccggcccggccacgagtattactacatctctgccacgcctcccaatgctgtggaccggccctgcctgcgactgaaggtgtacgtgcggccgaccaacgagaccctgtacgaggctcctgagcccatcttcaccagcaataactcgtgtagcagcccgggcggctgccgcctcttcctcagcaccatccccgtgctctggaccctcctgggttcctag

SEQ ID NO: 117570 - protein, 340 aa, Artificial Sequence
  derived and/or modified sequence
MGPPHSGPGGVRVGALLLLGVLGLVSGLSLEPVYWNSANKRFQAEGGYVLYPQIGDRLDLLCPRARPPGPHSSPNYEFYKLYLVGGAQGRRCEAPPAPNLLLTCDRPDLDLRFTIKFQEYSPNLWGHEFRSHHDYYIIATSDGTREGLESLQGGVCLTRGMKVLLRVGQSPRGGAVPRKPVSEMPMERDRGAAHSLEPGKENLPGDPTSNATSRGAEGPLPPPSMPAVAGAAGGLALLLLGVAGAGGAMCWRRRRAKPSESRHPGPGSFGRGGSLGLGGGGGMGPREAEPGELGIALRGGGAADPPFCPHYEKVSGDYGHPVYIVQDGPPQSPPNIYYKV

SEQ ID NO: 117571 - DNA, 1023 bp, Artificial Sequence
  derived and/or modified sequence
atgggcccacctcacagcggccccggaggagtacgagtgggagcgctgctcttactaggagtgcttggcctggtgtcggggctgagcctcgaacccgtgtattggaactcggcaaataaacgtttccaggcagagggaggatacgttctttatccacagatcggggaccgccttgacctgctttgccctcgggcacgccccccaggacctcattcttctcctaattatgaattctataaactgtacctggtggggggggctcagggacgtcgatgcgaagccccccctgcgccgaacttgctgcttacttgtgatcgccccgaccttgacctaagatttaccataaagtttcaggaatatagtccaaacctgtggggtcacgagttcaggtctcaccacgactattacataatcgcaacgagcgacggcactcgcgaaggattggaaagtctgcagggcggcgtatgcctcacacgggggatgaaagtgctgttgagggtgggacagtcccctcggggcggagccgtgccaagaaaaccagtgagtgaaatgccaatggagcgggacagaggtgcagcccacagcctagagcccggaaaagagaatctgcctggcgatcctacctcaaatgctacaagccgcggggccgagggccctttaccacctccatcaatgcccgccgtggccggagccgccggcggactggctctcctattgctgggtgtggccggtgccggaggtgctatgtgctggcgtcgacgaagggcgaaaccctcagagtcacggcacccaggacccgggtcgttcgggcggggaggatccctgggcctaggcggcggcggcgggatgggacctcgagaagctgagccaggtgagttgggaatcgccctgcggggcggcggagcagctgaccctcccttctgcccgcattacgagaaggtgtctggcgattatggacatcctgtgtatatcgttcaggatggacccccgcagtcccctccaaacatttattataaggtgtag

SEQ ID NO: 117572 - DNA, 1023 bp, Artificial Sequence
  derived and/or modified sequence
atgggccccccccacagcggccctgggggcgtgcgggtgggcgccctgctgctgctgggcgtgctgggcctggtgtctggcctgagcctggagcctgtgtactggaacagcgccaacaagcgcttccaggccgagggcggctacgtgctgtacccccagatcggggaccggctggacctgctgtgcccccgggcccggcccccaggcccccacagcagccccaactatgagttctacaagctgtacctggtgggcggggcccagggccgccgctgtgaggcccccccagcccccaacctgctgctgacctgtgacagaccagacctggacctgcgcttcaccatcaagttccaggagtacagccccaacctgtggggccacgagttccgcagccaccacgactactacatcatcgccaccagtgatggcacccgggagggcctggagagcctgcagggcggcgtgtgcctgacccggggcatgaaggtgctgctgcgggtgggccagagcccccggggcggcgctgtgcccaggaagcctgtgtctgagatgcccatggagcgggacagaggagctgcccacagcctggagcccgggaaggagaacctgcccggggaccccaccagcaatgccaccagcagaggagctgagggccccctgcccccacccagcatgcctgctgtggccggggccgccggcggcctggccctgctgctgctgggcgtggccggggccggcggggccatgtgctggaggagaagaagagccaagcccagcgagagccgccaccctggccctggcagctttggccggggcggcagcctgggcctgggcggcggcggcggcatgggcccccgggaggccgagcccggggagctgggcatcgccctgcggggcggcggcgctgctgacccccccttctgcccccactatgagaaggtgtctggggactatggccaccctgtgtacatcgtgcaggacggccccccccagagcccccccaacatctactacaaggtgtag

SEQ ID NO: 117573 - DNA, 1023 bp, Artificial Sequence
  derived and/or modified sequence
atgggccccccccacagcggccccggcggcgtgcgggtgggcgccctccttctcctgggagtactggggcttgtttctgggctgagcctggagccggtgtactggaactcagccaataagaggttccaggctgagggaggctacgtgttgtacccccagatcggcgaccggttagatcttctttgcccacgagctcggcctccaggacctcattcttcgcccaattacgagttctacaaattatacctcgtcggaggggcccagggcagacgatgcgaagccccccccgctcctaatttactcttaacatgtgaccggccggatctggacctgagattcacaattaaattccaggaatactcccccaacctgtggggtcacgaatttaggtcccaccacgactactacatcatcgccacttccgacggcactcgggaaggattggaaagcctccaaggtggcgtgtgtttgactcggggaatgaaggtgctcctgagggtcgggcaaagtcccagaggcggcgcagtacccaggaagccagtttctgagatgcccatggagcgtgatcgcggcgccgctcactcactggagcctggcaaggagaacctccctggagaccccacatccaacgccaccagtcgcggtgctgagggccccctcccgcccccaagcatgcccgctgttgctggggccgcaggcggcctggctttgcttctcctgggtgtggctggagctggcggcgccatgtgctggagaaggcgccgtgctaagccttctgagagccgacaccccggcccaggctctttcggacgaggaggctcacttggcctcggagggggggggggcatgggcccacgagaagctgagccgggcgagctgggaatagcgctcagagggggcggggccgccgaccccccattctgtccccactatgagaaagtgtccggcgactacggtcaccccgtgtacattgtgcaggacgggccaccccaaagccctccaaatatctactacaaagtttag

SEQ ID NO: 117574 - DNA, 1023 bp, Artificial Sequence
  derived and/or modified sequence
atgggaccgcctcacagcggaccaggtggtgtgcgcgtgggtgccttactgctcctcggcgtactcggcctcgtgtccggtctgagtctggaaccggtgtactggaacagcgccaacaagcgctttcaggctgagggaggttatgttctgtacccgcagattggcgacagactcgatttgctgtgtcctagagcgagacctcccggacctcatagctcccctaactatgaattctacaaattgtacctggtcggcggagcacagggccgtagatgcgaggccccaccagcaccaaacctgttgctaacgtgtgaccgaccagaccttgaccttcggtttaccattaagtttcaagaatactctccaaatctatggggccacgagttccggtctcatcatgattactatatcatcgctacgtcagacgggaccagagagggcctggaatccctgcagggcggagtgtgtctgacaagaggcatgaaagtgctccttagagtggggcagagtccacgcggaggcgcagttccaaggaagcccgtgtctgagatgcccatggaaagagaccgaggagctgctcacagcctagaacccggaaaagaaaacctgcccggtgaccccacaagtaacgcgacatctcggggagccgaggggcctctgccccctccttcgatgcccgctgtggcaggggctgccggtggcctggccctgctcttattgggcgtggccggtgcgggtggggcaatgtgttggagacgacgacgagcaaaaccctcagagtcgcgccaccccggaccgggatcctttggtagaggagggagtctgggacttggtggaggcggtgggatgggccctagagaagctgagcctggcgagttgggaattgccttgagagggggaggtgccgcagatccaccgttctgtcctcactatgagaaggtgagcggagattatggtcaccctgtttatatagttcaagatgggccaccacagtcaccacccaacatctattataaggtttag

SEQ ID NO: 117575 - DNA, 1023 bp, Artificial Sequence
  derived and/or modified sequence
atgggccccccccacagcggccccggcggcgtgagagtgggcgccctgctgctgctgggcgtgctgggcctggtgagcggcctgagcctggagcccgtgtactggaacagcgccaacaagagattccaggccgagggcggctacgtgctgtacccccagatcggcgacagactggacctgctgtgccccagagccagaccccccggcccccacagcagccccaactacgagttctacaagctgtacctggtgggcggcgcccagggcagaagatgcgaggccccccccgcccccaacctgctgctgacctgcgacagacccgacctggacctgagattcaccatcaagttccaggagtacagccccaacctgtggggccacgagttcagaagccaccacgactactacatcatcgccaccagcgacggcaccagagagggcctggagagcctgcagggcggcgtgtgcctgaccagaggcatgaaggtgctgctgagagtgggccagagccccagaggcggcgccgtgcccagaaagcccgtgagcgagatgcccatggagagagacagaggcgccgcccacagcctggagcccggcaaggagaacctgcccggcgaccccaccagcaacgccaccagcagaggcgccgagggccccctgcccccccccagcatgcccgccgtggccggcgccgccggcggcctggccctgctgctgctgggcgtggccggcgccggcggcgccatgtgctggagaagaagaagagccaagcccagcgagagcagacaccccggccccggcagcttcggcagaggcggcagcctgggcctgggcggcggcggcggcatgggccccagagaggccgagcccggcgagctgggcatcgccctgagaggcggcggcgccgccgacccccccttctgcccccactacgagaaggtgagcggcgactacggccaccccgtgtacatcgtgcaggacggccccccccagagcccccccaacatctactacaaggtgtag

SEQ ID NO: 117576 - DNA, 3222 bp, Artificial Sequence
  derived and/or modified sequence
ggtttcctcccttagcccgctgccctcaatcccagcgaggctggggctccggctcggcgcccccttcctcgctccctggtccggcgccccatgccgcccccgcccggtccccggctcccccagtcccccacttaggcgggctcacagatcccggggtgctggcgcgtgggccgggggcgcgtagggcgcctgcagacggcccctggaagggctctggtggggctgagcgctctgccgcgggggcgcgggcacagcaggaagcaggtccgcgtgggcgctgggggcatcagctaccggggtggtccgggctgaagagccaggcagccaaggcagccaccccggggggtgggcgactttgggggagttggtgccccgccccccaggccttggcggggtcatggggcccccccattctgggccggggggcgtgcgagtcggggccctgctgctgctgggggttttggggctggtgtctgggctcagcctggagcctgtctactggaactcggcgaataagaggttccaggcagagggtggttatgtgctgtaccctcagatcggggaccggctagacctgctctgcccccgggcccggcctcctggccctcactcctctcctaattatgagttctacaagctgtacctggtagggggtgctcagggccggcgctgtgaggcaccccctgccccaaacctccttctcacttgtgatcgcccagacctggatctccgcttcaccatcaagttccaggagtatagccctaatctctggggccacgagttccgctcgcaccacgattactacatcattgccacatcggatgggacccgggagggcctggagagcctgcagggaggtgtgtgcctaaccagaggcatgaaggtgcttctccgagtgggacaaagtccccgaggaggggctgtcccccgaaaacctgtgtctgaaatgcccatggaaagagaccgaggggcagcccacagcctggagcctgggaaggagaacctgccaggtgaccccaccagcaatgcaacctcccggggtgctgaaggccccctgccccctcccagcatgcctgcagtggctggggcagcaggggggctggcgctgctcttgctgggcgtggcaggggctgggggtgccatgtgttggcggagacggcgggccaagccttcggagagtcgccaccctggtcctggctccttcgggaggggagggtctctgggcctggggggtggaggtgggatgggacctcgggaggctgagcctggggagctagggatagctctgcggggtggcggggctgcagatccccccttctgcccccactatgagaaggtgagtggtgactatgggcatcctgtgtatatcgtgcaggatgggcccccccagagccctccaaacatctactacaaggtatgagggctcctctcacgtggctatcctgaatccagcccttcttggggtgctcctccagtttaattcctggtttgagggacacctctaacatctcggccccctgtgcccccccagccccttcactcctcccggctgctgtcctcgtctccacttttaggattccttaggattcccactgccccacttcctgccctcccgtttggccatgggtgcccccctctgtctcagtgtccctggatcctttttccttggggaggggcacaggctcagcctcctctctgaccatgacccaggcatccttgtccccctcacccacccagagctaggggcgggaacagcccaccttttggttggcaccgccttctttctgcctctcactggttttctcttctctatctcttattctttccctctcttccgtctctaggtctgttcttcttccctagcatcctcctccccacatctcctttcaccctcttggcttcttatcctgtgcctctcccatctcctgggtgggggcatcaaagcatttctccccttagctttcagccccccttctgacctctcataccaaccactcccctcagtctgccaaaaatgggggccttatggggaaggctctgacactccaccccagctcaggccatgggcagcagggctccattctctggcctggcccaggcctctacatacttactccagccatttggggtggttgggtcatgacagctaccatgagaagaagtgtcccgttttgtccagtggccaatagcaagatatgaaccggtcgggacatgtatggacttggtctgatgctgaatgggccacttgggaccggaagtgacttgctccagacaagaggtgaccaggcccggacagaaatggcctgggaagtagcagaagcagtgcagcaggaactggaagtgccttcatccaggacaggaagtagcacttctgaaacaggaagtggtctggctggaactccaagtggcttagtctgggggatcaggaggtgggaggtggatggttcttattctgtggagaagaagggcgggaagaacttcctttcaggaggaagctggaacttactgactgtaagaggttagaggtggaccgagaaggacttttcccagtcttcagtggcacttcccaagatctcccttcccttgtgctctgtgctgattttaggacagctaagatgactgccatgtgctgtggcaggcctaatttgtcttgttctttcctttccatatcccagtataatctctgttaatcaacaggactaccccaagaacccatgtgctctcccgagtaacccagatggctgtcttgttcattccatcctacatttctgactcctttcagactcaacacagttcccttcttagtgaccaaaatggtggcctactggctggtctagctgacagtggtacttagcaaaggccactgtttccatagtgaccagctgatacctcttcctgccctctagtgtgcaattgggtgttgcctcagtttcctcccagctcagttttattagatcaaagctgttgttgggcaccaggttggccacctcaatcaccagccaagatggttgctttgtccaccagaggtcaagttcacctctctggtgctgtagttcccagctccttcctgatttttctaatcgctccttctggggaacaggaagttgatattgccatggtggcggggtatgccgtcacctcagtagttttactgtaaaagggaaatttgaacaacaaaaaccaaaaaaaataaaaataaaaaacttcaaaagttgacaagaa

SEQ ID NO: 117577 - protein, 3312 aa, Artificial Sequence
  derived and/or modified sequence
MMARRPPWRGLGGRSTPILLLLLLSLFPLSQEELGGGGHQGWDPGLAATTGPRAHIGGGALALCPESSGVREDGGPGLGVREPIFVGLRGRRQSARNSRGPPEQPNEELGIEHGVQPLGSRERETGQGPGSVLYWRPEVSSCGRTGPLQRGSLSPGALSSGVPGSGNSSPLPSDFLIRHHGPKPVSSQRNAGTGSRKRVGTARCCGELWATGSKGQGERATTSGAERTAPRRNCLPGASGSGPELDSAPRTARTAPASGSAPRESRTAPEPAPKRMRSRGLFRCRFLPQRPGPRPPGLPARPEARKVTSANRARFRRAANRHPQFPQYNYQTLVPENEAAGTAVLRVVAQDPDAGEAGRLVYSLAALMNSRSLELFSIDPQSGLIRTAAALDRESMERHYLRVTAQDHGSPRLSATTMVAVTVADRNDHSPVFEQAQYRETLRENVEEGYPILQLRATDGDAPPNANLRYRFVGPPAARAAAAAAFEIDPRSGLISTSGRVDREHMESYELVVEASDQGQEPGPRSATVRVHITVLDENDNAPQFSEKRYVAQVREDVRPHTVVLRVTATDRDKDANGLVHYNIISGNSRGHFAIDSLTGEIQVVAPLDFEAEREYALRIRAQDAGRPPLSNNTGLASIQVVDINDHIPIFVSTPFQVSVLENAPLGHSVIHIQAVDADHGENARLEYSLTGVAPDTPFVINSATGWVSVSGPLDRESVEHYFFGVEARDHGSPPLSASASVTVTVLDVNDNRPEFTMKEYHLRLNEDAAVGTSVVSVTAVDRDANSAISYQITGGNTRNRFAISTQGGVGLVTLALPLDYKQERYFKLVLTASDRALHDHCYVHINITDANTHRPVFQSAHYSVSVNEDRPMGSTIVVISASDDDVGENARITYLLEDNLPQFRIDADSGAITLQAPLDYEDQVTYTLAITARDNGIPQKADTTYVEVMVNDVNDNAPQFVASHYTGLVSEDAPPFTSVLQISATDRDAHANGRVQYTFQNGEDGDGDFTIEPTSGIVRTVRRLDREAVSVYELTAYAVDRGVPPLRTPVSIQVMVQDVNDNAPVFPAEEFEVRVKENSIVGSVVAQITAVDPDEGPNAHIMYQIVEGNIPELFQMDIFSGELTALIDLDYEARQEYVIVVQATSAPLVSRATVHVRLVDQNDNSPVLNNFQILFNNYVSNRSDTFPSGIIGRIPAYDPDVSDHLFYSFERGNELQLLVVNQTSGELRLSRKLDNNRPLVASMLVTVTDGLHSVTAQCVLRVVIITEELLANSLTVRLENMWQERFLSPLLGRFLEGVAAVLATPAEDVFIFNIQNDTDVGGTVLNVSFSALAPRGAGAGAAGPWFSSEELQEQLYVRRAALAARSLLDVLPFDDNVCLREPCENYMKCVSVLRFDSSAPFLASASTLFRPIQPIAGLRCRCPPGFTGDFCETELDLCYSNPCRNGGACARREGGYTCVCRPRFTGEDCELDTEAGRCVPGVCRNGGTCTDAPNGGFRCQCPAGGAFEGPRCEVAARSFPPSSFVMFRGLRQRFHLTLSLSFATVQQSGLLFYNGRLNEKHDFLALELVAGQVRLTYSTGESNTVVSPTVPGGLSDGQWHTVHLRYYNKPRTDALGGAQGPSKDKVAVLSVDDCDVAVALQFGAEIGNYSCAAAGVQTSSKKSLDLTGPLLLGGVPNLPENFPVSHKDFIGCMRDLHIDGRRVDMAAFVANNGTMAGCQAKLHFCDSGPCKNSGFCSERWGSFSCDCPVGFGGKDCQLTMAHPHHFRGNGTLSWNFGSDMAVSVPWYLGLAFRTRATQGVLMQVQAGPHSTLLCQLDRGLLSVTVTRGSGRASHLLLDQVTVSDGRWHDLRLELQEEPGGRRGHHVLMVSLDFSLFQDTMAVGSELQGLKVKQLHVGGLPPGSAEEAPQGLVGCIQGVWLGSTPSGSPALLPPSHRVNAEPGCVVTNACASGPCPPHADCRDLWQTFSCTCQPGYYGPGCVDACLLNPCQNQGSCRHLPGAPHGYTCDCVGGYFGHHCEHRMDQQCPRGWWGSPTCGPCNCDVHKGFDPNCNKTNGQCHCKEFHYRPRGSDSCLPCDCYPVGSTSRSCAPHSGQCPCRPGALGRQCNSCDSPFAEVTASGCRVLYDACPKSLRSGVWWPQTKFGVLATVPCPRGALGAAVRLCDEAQGWLEPDLFNCTSPAFRELSLLLDGLELNKTALDTMEAKKLAQRLREVTGHTDHYFSQDVRVTARLLAHLLAFESHQQGFGLTATQDAHFNENLLWAGSALLAPETGDLWAALGQRAPGGSPGSAGLVRHLEEYAATLARNMELTYLNPMGLVTPNIMLSIDRMEHPSSPRGARRYPRYHSNLFRGQDAWDPHTHVLLPSQSPRPSPSEVLPTSSSIENSTTSSVVPPPAPPEPEPGISIIILLVYRTLGGLLPAQFQAERRGARLPQNPVMNSPVVSVAVFHGRNFLRGILESPISLEFRLLQTANRSKAICVQWDPPGLAEQHGVWTARDCELVHRNGSHARCRCSRTGTFGVLMDASPRERLEGDLELLAVFTHVVVAVSVAALVLTAAILLSLRSLKSNVRGIHANVAAALGVAELLFLLGIHRTHNQLVCTAVAILLHYFFLSTFAWLFVQGLHLYRMQVEPRNVDRGAMRFYHALGWGVPAVLLGLAVGLDPEGYGNPDFCWISVHEPLIWSFAGPVVLVIVMNGTMFLLAARTSCSTGQREAKKTSALTLRSSFLLLLLVSASWLFGLLAVNHSILAFHYLHAGLCGLQGLAVLLLFCVLNADARAAWMPACLGRKAAPEEARPAPGLGPGAYNNTALFEESGLIRITLGASTVSSVSSARSGRTQDQDSQRGRSYLRDNVLVRHGSAADHTDHSLQAHAGPTDLDVAMFHRDAGADSDSDSDLSLEEERSLSIPSSESEDNGRTRGRFQRPLCRAAQSERLLTHPKDVDGNDLLSYWPALGECEAAPCALQTWGSERRLGLDTSKDAANNNQPDPALTSGDETSLGRAQRQRKGILKNRLQYPLVPQTRGAPELSWCRAATLGHRAVPAASYGRIYAGGGTGSLSQPASRYSSREQLDLLLRRQLSRERLEEAPAPVLRPLSRPGSQECMDAAPGRLEPKDRGSTLPRRQPPRDYPGAMAGRFGSRDALDLGAPREWLSTLPPPRRTRDLDPQPPPLPLSPQRQLSRDPLLPSRPLDSLSRSSNSREQLDQVPSRHPSREALGPLPQLLRAREDSVSGPSHGPSTEQLDILSSILASFNSSALSSVQSSSTPLGPHTTATPSATASVLGPSTPRSATSHSISELSPDSEVPRSEGHS

SEQ ID NO: 117578 - protein, 3317 aa, Artificial Sequence
  derived and/or modified sequence
MMARRPPWRGLGGRSTPILLLLLLSLFPLSQEELGGGGHQGWDPGLAATTGPRAHIGGGALALCPESSGVREDGGPGLGVREPIFVGLRGRRQSARNSRGPPEQPNEELGIEHGVQPLGSRERETGQGPGSVLYWRPEVSSCGRTGPLQRGSLSPGALSSGVPGSGNSSPLPSDFLIRHHGPKPVSSQRNAGTGSRKRVGTARCCGELWATGSKGQGERATTSGAERTAPRRNCLPGASGSGPELDSAPRTARTAPASGSAPRESRTAPEPAPKRMRSRGLFRCRFLPQRPGPRPPGLPARPEARKVTSANRARFRRAANRHPQFPQYNYQTLVPENEAAGTAVLRVVAQDPDAGEAGRLVYSLAALMNSRSLELFSIDPQSGLIRTAAALDRESMERHYLRVTAQDHGSPRLSATTMVAVTVADRNDHSPVFEQAQYRETLRENVEEGYPILQLRATDGDAPPNANLRYRFVGPPAARAAAAAAFEIDPRSGLISTSGRVDREHMESYELVVEASDQGQEPGPRSATVRVHITVLDENDNAPQFSEKRYVAQVREDVRPHTVVLRVTATDRDKDANGLVHYNIISGNSRGHFAIDSLTGEIQVVAPLDFEAEREYALRIRAQDAGRPPLSNNTGLASIQVVDINDHIPIFVSTPFQVSVLENAPLGHSVIHIQAVDADHGENARLEYSLTGVAPDTPFVINSATGWVSVSGPLDRESVEHYFFGVEARDHGSPPLSASASVTVTVLDVNDNRPEFTMKEYHLRLNEDAAVGTSVVSVTAVDRDANSAISYQITGGNTRNRFAISTQGGVGLVTLALPLDYKQERYFKLVLTASDRALHDHCYVHINITDANTHRPVFQSAHYSVSVNEDRPMGSTIVVISASDDDVGENARITYLLEDNLPQFRIDADSGAITLQAPLDYEDQVTYTLAITARDNGIPQKADTTYVEVMVNDVNDNAPQFVASHYTGLVSEDAPPFTSVLQISATDRDAHANGRVQYTFQNGEDGDGDFTIEPTSGIVRTVRRLDREAVSVYELTAYAVDRGVPPLRTPVSIQVMVQDVNDNAPVFPAEEFEVRVKENSIVGSVVAQITAVDPDEGPNAHIMYQIVEGNIPELFQMDIFSGELTALIDLDYEARQEYVIVVQATSAPLVSRATVHVRLVDQNDNSPVLNNFQILFNNYVSNRSDTFPSGIIGRIPAYDPDVSDHLFYSFERGNELQLLVVNQTSGELRLSRKLDNNRPLVASMLVTVTDGLHSVTAQCVLRVVIITEELLANSLTVRLENMWQERFLSPLLGRFLEGVAAVLATPAEDVFIFNIQNDTDVGGTVLNVSFSALAPRGAGAGAAGPWFSSEELQEQLYVRRAALAARSLLDVLPFDDNVCLREPCENYMKCVSVLRFDSSAPFLASASTLFRPIQPIAGLRCRCPPGFTGDFCETELDLCYSNPCRNGGACARREGGYTCVCRPRFTGEDCELDTEAGRCVPGVCRNGGTCTDAPNGGFRCQCPAGGAFEGPRCEVAARSFPPSSFVMFRGLRQRFHLTLSLSFATVQQSGLLFYNGRLNEKHDFLALELVAGQVRLTYSTGESNTVVSPTVPGGLSDGQWHTVHLRYYNKPRTDALGGAQGPSKDKVAVLSVDDCDVAVALQFGAEIGNYSCAAAGVQTSSKKSLDLTGPLLLGGVPNLPENFPVSHKDFIGCMRDLHIDGRRVDMAAFVANNGTMAGCQAKLHFCDSGPCKNSGFCSERWGSFSCDCPVGFGGKDCQLTMAHPHHFRGNGTLSWNFGSDMAVSVPWYLGLAFRTRATQGVLMQVQAGPHSTLLCQLDRGLLSVTVTRGSGRASHLLLDQVTVSDGRWHDLRLELQEEPGGRRGHHVLMVSLDFSLFQDTMAVGSELQGLKVKQLHVGGLPPGSAEEAPQGLVGCIQGVWLGSTPSGSPALLPPSHRVNAEPGCVVTNACASGPCPPHADCRDLWQTFSCTCQPGYYGPGCVDACLLNPCQNQGSCRHLPGAPHGYTCDCVGGYFGHHCEHRMDQQCPRGWWGSPTCGPCNCDVHKGFDPNCNKTNGQCHCKEFHYRPRGSDSCLPCDCYPVGSTSRSCAPHSGQCPCRPGALGRQCNSCDSPFAEVTASGCRVLYDACPKSLRSGVWWPQTKFGVLATVPCPRGALGLRGAGAAVRLCDEAQGWLEPDLFNCTSPAFRELSLLLDGLELNKTALDTMEAKKLAQRLREVTGHTDHYFSQDVRVTARLLAHLLAFESHQQGFGLTATQDAHFNENLLWAGSALLAPETGDLWAALGQRAPGGSPGSAGLVRHLEEYAATLARNMELTYLNPMGLVTPNIMLSIDRMEHPSSPRGARRYPRYHSNLFRGQDAWDPHTHVLLPSQSPRPSPSEVLPTSSSIENSTTSSVVPPPAPPEPEPGISIIILLVYRTLGGLLPAQFQAERRGARLPQNPVMNSPVVSVAVFHGRNFLRGILESPISLEFRLLQTANRSKAICVQWDPPGLAEQHGVWTARDCELVHRNGSHARCRCSRTGTFGVLMDASPRERLEGDLELLAVFTHVVVAVSVAALVLTAAILLSLRSLKSNVRGIHANVAAALGVAELLFLLGIHRTHNQLVCTAVAILLHYFFLSTFAWLFVQGLHLYRMQVEPRNVDRGAMRFYHALGWGVPAVLLGLAVGLDPEGYGNPDFCWISVHEPLIWSFAGPVVLVIVMNGTMFLLAARTSCSTGQREAKKTSALTLRSSFLLLLLVSASWLFGLLAVNHSILAFHYLHAGLCGLQGLAVLLLFCVLNADARAAWMPACLGRKAAPEEARPAPGLGPGAYNNTALFEESGLIRITLGASTVSSVSSARSGRTQDQDSQRGRSYLRDNVLVRHGSAADHTDHSLQAHAGPTDLDVAMFHRDAGADSDSDSDLSLEEERSLSIPSSESEDNGRTRGRFQRPLCRAAQSERLLTHPKDVDGNDLLSYWPALGECEAAPCALQTWGSERRLGLDTSKDAANNNQPDPALTSGDETSLGRAQRQRKGILKNRLQYPLVPQTRGAPELSWCRAATLGHRAVPAASYGRIYAGGGTGSLSQPASRYSSREQLDLLLRRQLSRERLEEAPAPVLRPLSRPGSQECMDAAPGRLEPKDRGSTLPRRQPPRDYPGAMAGRFGSRDALDLGAPREWLSTLPPPRRTRDLDPQPPPLPLSPQRQLSRDPLLPSRPLDSLSRSSNSREQLDQVPSRHPSREALGPLPQLLRAREDSVSGPSHGPSTEQLDILSSILASFNSSALSSVQSSSTPLGPHTTATPSATASVLGPSTPRSATSHSISELSPDSEVPRSEGHS

SEQ ID NO: 117579 - DNA, 9939 bp, Artificial Sequence
  derived and/or modified sequence
atgatggcccgaagacctccttggagaggcctgggggggcgatcaactcctatcctgcttctgctgttactaagtctattccccttgagtcaagaagagttaggcgggggtggccatcaggggtgggatcccgggcttgctgccacaaccgggccccgagcccacattgggggaggggccctggctctgtgccctgagtcgtccggcgtgcgagaagatggcggaccgggactcggtgtgcgcgagcctatttttgtaggactgagaggaaggaggcagagtgcaaggaacagccgcggaccaccagaacaacccaacgaagagctagggatcgagcacggtgtccagcctctgggctcccgtgaaagagagaccggtcaggggcctggcagtgttctgtactggaggcctgaggtttcctcctgtggacggaccgggccactgcaaaggggttcattatcccccggagccctctcgagcggcgtccctggcagcggcaattccagccctctgccctccgactttctgattcggcaccatgggccaaaacctgtcagctcccagcggaacgcaggtaccggtagtagaaaacgagtcggtacagctcggtgctgcggggagctgtgggccaccggctctaagggacagggagagcgtgccaccacaagcggcgccgaacgtaccgcaccccgcagaaactgccttccaggggcttctggcagtggaccagagctagactccgccccacgcacagctaggactgctccagcatcaggcagcgccccgcgtgagagccggacggcaccagagccggcaccaaagcggatgaggtctcggggcctattccgatgccgattcctcccacagcgacctggccctcgtccacctggtttgccggcgcgccccgaggcccggaaggtgacttcagccaatcgtgcgcgctttcgaagagctgcaaaccgccacccccagtttcctcagtataactaccagacactggtgcctgagaatgaggccgctggcactgccgtactgcgcgtcgtggcacaagatccagacgctggcgaggctggaaggcttgtatatagcctagctgctctgatgaacagcagatcattggagctgttctctattgatccacagtccggtctgataagaactgctgccgccctggatagggagtccatggagcgccattatctgcgggtaactgcacaggaccatggaagccctaggttgtcggccactactatggttgctgtcaccgtagccgaccggaacgaccatagccccgtattcgagcaggcccaatatcgcgaaactctgcgcgaaaacgttgaagagggctaccctattctccagctgagagcaacagatggcgacgcacctcctaatgcaaaccttcgctaccggtttgttgggcctcccgccgcccgggccgccgctgccgctgcctttgagatagaccctcgcagtggcctgatctccacatcaggtcgtgtggatagggaacacatggagtcctacgagctagtggtggaggcttcggaccagggtcaggaaccaggaccccgttcagcgaccgttagagtccacataacagtgctggacgagaacgacaacgccccgcaattttctgaaaaaaggtatgttgcccaagtacgagaggacgtacgcccacacactgtggtcttgcgagtgactgcaacagatcgggacaaagatgcgaatgggctagtccactataacatcatttcagggaattctcgaggccacttcgccatcgattcactgacaggtgaaattcaggtagttgcccccctggattttgaggccgaaagggaatatgccctgaggatccgggcccaggatgccggtaggcccccactctcaaataacaccgggctggctagcatccaggtggtggatatcaacgaccacatccccatctttgttagcacaccctttcaggtgtcagtgttggagaacgcccctcttggccactctgtaattcacattcaggctgtggatgctgaccacggagagaacgctcgactggagtattcactgaccggtgtcgcccctgacaccccatttgtgattaattctgccactggctgggtgagcgtgtctggaccacttgatagagaatctgttgaacactacttcttcggagttgaggcaagagatcacggctcccctcccctgtccgcatcagccagtgtcacagtgaccgtactagatgtgaacgataaccgacctgaattcacgatgaaggagtatcatttgcgccttaacgaggacgccgcagtgggaacttccgtggtgtccgttacggccgttgacagagacgccaacagcgcaatttcttatcagattacaggcgggaacacacggaacaggttcgcaatttctacccaggggggcgtcggtctggtcaccctggccctcccactcgattacaagcaggagaggtacttcaaactcgtgctgactgcatccgacagggcgcttcatgaccactgttatgttcacattaacatcactgatgccaacactcatagacctgtgttccagagtgctcactattccgtttctgtcaatgaggatcgccctatgggaagtacaattgtcgttatcagcgcaagcgacgacgatgtcggagaaaacgcccggatcacctacctgctggaagataatcttccccagtttcgaattgatgctgacagcggggcgattacactgcaggcccccctggactatgaggatcaggtcacttacacactggccataacagctcgggacaacggaatcccacagaaagccgacacaacctacgtggaggtgatggtcaacgacgtgaacgataatgctcctcagttcgtcgcgagtcactacaccggtcttgtgtccgaggatgcgcccccattcacatctgtgttgcagatctcagccactgaccgtgatgctcacgcaaacggccgcgtacaatacacattccaaaatggcgaggacggggatggggactttacaatcgagcccactagtggtattgtccgaactgttaggcggctcgacagggaggctgtctccgtgtacgaactgacagcatatgccgtggacagaggggttccccccctaaggacgccagtcagcattcaggtcatggtgcaagatgtcaatgacaatgcccccgtctttcccgcagaggaatttgaggtgagggtcaaagaaaactcaatagtcgggtccgtggtggcacaaatcaccgctgtggaccccgacgagggccccaacgcacatattatgtaccagattgtcgaaggcaacatccccgaactgttccagatggacattttttctggagagctgacagcgctgattgacctcgactacgaggcccgtcaggaatatgtgatcgtcgtgcaggcgacctcagcacccctggtgtctagggctaccgtgcacgtcagactggtcgaccaaaacgacaacagtccagtgctgaataactttcagatcctgtttaacaattacgtatcaaacaggagtgatactttccccagcgggatcatagggcgcatcccagcgtacgaccccgatgtctcggatcacttgttctattcttttgaacgaggaaacgagctgcagttgctggtggtcaaccagaccagcggggaactgcggctctcccgaaagctagacaacaacagacctcttgtggcaagcatgctcgtgacggtcaccgacggcctgcatagcgtgactgcccagtgcgtattgagagtagtgatcatcactgaggaactcctggccaactccctgaccgtaagactggaaaacatgtggcaagagcggttccttagtccgctcctgggtaggttcttagaaggagtcgctgcagtcctagctactccggcggaagacgttttcattttcaacatacagaatgatactgacgtgggcggtacagtgctgaatgtgtctttttctgcgttggcgcctcgcggcgccggcgccggggcagctggaccctggttttcttctgaagaattgcaggaacaactctacgtgcgtcgcgcagccctagccgctagatctttactggatgtgctcccgttcgatgacaatgtttgcctgagagagccttgtgaaaactacatgaaatgcgtttcggtcttacgttttgattcctccgcccccttcctggcctctgcttccacactctttcggcctatccagcccattgcaggactgcgatgtagatgccctcctggcttcacaggtgacttctgcgagacagagttggacctctgttatagtaatccctgccgcaacggaggtgcgtgtgcccggcgtgaaggtggctacacatgcgtgtgtaggccccggtttaccggagaggattgtgagttagatactgaagcaggacgatgtgtgcctggagtgtgtcgtaatggcggtacgtgcaccgatgcacccaacggtggatttaggtgccagtgcccggcaggcggggcattcgaaggtccccgttgtgaagtcgcggccagatcatttccccctagctcatttgttatgtttaggggactgcggcagcgcttccacttaacactctccctgtcatttgctaccgtccagcagtctggcctcctcttttataatggtcgtctgaacgagaaacacgactttctcgccctggagctcgttgcagggcaggtccggctgacttatagcactggtgagtctaacaccgttgtctctccaacagtgcccgggggattatccgacgggcagtggcacacagtgcacttgcgttattacaacaagcctaggacggacgcgctgggcggcgcacagggtccttcgaaggataaggttgcggttcttagtgtcgacgactgcgatgtagccgttgctctccagttcggggcagagattggcaactactcctgtgccgctgcaggagtccagactagctcgaagaagagtcttgatctgacaggccccctgctcttggggggggttcctaacctgccggagaatttcccagtaagtcacaaggatttcatcgggtgtatgcgggatctccatatcgacgggcgaagagtggacatggctgcgttcgtggccaacaatggcaccatggccggctgtcaggcaaaactgcacttttgcgactccggcccatgcaaaaactctgggttctgttccgaaagatggggatcgttcagttgtgattgccccgttgggttcggagggaaagattgtcagctgactatggctcaccctcatcattttcggggcaatggtaccctttcatggaactttggctccgacatggccgtgtctgtgccttggtacctcgggctggcatttaggactcgggccacacagggcgtgctgatgcaagtccaagccgggccacattccaccctcttatgtcaactggaccgtggcctcttatcagtcacagttaccaggggctctgggcgcgcttctcacctgttgttggatcaggtgacagttagcgatggaaggtggcacgacctcaggctggagttacaggaggagccaggagggcgcaggggtcatcacgtgctgatggtttccctggattttagccttttccaggatacaatggctgtggggtctgagctccagggcctcaaagtgaaacagctacatgtgggaggcttacctccagggtcagcagaggaggcacctcagggactggtcggatgtatccagggagtatggctgggcagcaccccctccgggtcacccgccctgctccctcctagtcacagagtgaatgcagaaccaggatgcgtagttaccaatgcttgcgcttccgggccatgcccaccacatgcagactgcagggatctgtggcagacctttagttgcacttgtcagcctgggtattatggaccaggttgcgtggatgcttgtctgctcaacccatgccagaatcagggatcttgccgacatctccccggcgcaccacacgggtacacatgtgactgcgtaggcggatactttggccatcattgtgagcacaggatggaccaacaatgtcctaggggttggtgggggtcccccacctgcgggccttgcaattgcgatgtccacaagggatttgacccaaactgtaacaagaccaacggtcaatgccattgcaaagagtttcattacagaccaaggggatctgattcctgccttccttgtgattgttatccagtggggtccacttcaaggagctgtgcaccacacagcggacagtgtccctgcagacccggagctctcggaaggcagtgtaatagctgcgacagtccttttgctgaagtgaccgcgagcggctgccgcgtgctgtatgacgcatgtccaaaaagcttacggtcaggcgtctggtggccccaaacaaaatttggcgttctggcgacagtgccctgtcctcgtggcgcactgggcgctgccgtgagactctgtgacgaggcacagggctggctggaaccagacctctttaactgcactagtcccgccttcagagagctatctttgctactggacggcctagagctgaataagaccgctctggatacgatggaggctaaaaaactggcacaacgcctgagggaagtgactggccacaccgaccactacttctcccaggacgtgagggttactgctcgcctactcgcgcaccttctggcctttgaatcacaccaacaaggatttgggctgacagccacccaagatgcacactttaacgagaatcttctatgggcaggatccgccctccttgctccagaaactggtgatctttgggccgccctcggacaacgcgctcccgggggatcgcccggatcggctggactagttaggcaccttgaggagtatgctgcaacactggccaggaacatggagctgacttaccttaacccaatgggtttggtcacaccaaacataatgctctcgatcgaccggatggagcacccatcatcgcctcgcggagcgagaagatatccacggtaccactccaacctgtttcgtggccaggatgcttgggacccacatactcacgtccttctgccatctcagagtcctcgtccttcaccgagtgaagtgctgccaacatcatcaagtattgagaactctacaacaagcagcgtggtacccccaccagcaccacccgagcctgagcctggaatctccattatcatcctgctggtctacagaactttgggcggactcttgcctgcacagttccaagcagaacggagaggtgcacgcctgcctcagaacccggtgatgaactcacctgtggtttcagttgcagtgtttcatggacgcaattttctgaggggtatccttgagtctccaatctctctcgaatttcggttgttgcagaccgctaacagaagtaaggccatctgcgtccagtgggatccacccgggctcgcagagcagcatggggtatggactgctcgggattgcgagctggttcaccggaacggttctcatgcacggtgccgctgcagccgcaccggcacgtttggagtgctaatggatgcctccccacgagaacgcctggagggcgatctcgagcttctggctgtgtttacccatgttgtggtggctgtaagcgtcgccgccctcgtgctgaccgccgctatcttactgtctttgcgtagcctgaaaagcaacgttcgaggcatccacgcaaatgttgcagcagccctgggggtcgccgagctcctgtttctgctagggatccaccgtactcacaaccagctagtctgtaccgcggtcgcaatattgttacattatttcttcctcagcacattcgcatggctttttgtgcaaggtctgcatttgtacagaatgcaagtggagcctagaaacgtggacaggggagccatgcgcttctatcatgcccttgggtggggcgtgcccgcagtacttttgggattagcggtcggtctcgaccctgagggctatgggaatcccgacttctgctggattagcgtgcacgagccactgatctggagtttcgctgggcccgtggtacttgtaattgtgatgaatggaaccatgtttctcctagcggcgaggacctcatgctcaaccggtcaacgtgaagctaaaaagaccagcgctctgaccttgagaagcagtttcctactcctcctgctggtgtccgccagttggctgttcgggttgctggccgtgaaccattccattctggccttccactaccttcatgcgggcctctgcggcttacaggggctggccgtactactccttttttgcgtgttgaacgccgatgcccgagccgcttggatgcctgcatgtctggggcgcaaggcggcccctgaagaagcccgccctgcccccggccttggaccaggcgcttacaacaataccgcgctgttcgaggagtccgggctgattaggatcacactcggcgcgagcaccgtgagtagcgtctctagcgcccgatccggccgaacacaagaccaggattctcagaggggacgctcttatttgagagataatgtgctggtgaggcacggatctgcagctgatcacacagaccatagtctccaagcccatgcaggacctactgacctggatgtggctatgtttcacagagacgctggagctgattccgactccgactcagacctgtccctagaggaagaacggtccctgtcgatcccctccagtgagtccgaggataatgggcgcaccaggggaagattccagaggcctctctgccgagccgcacaatccgaacggctcctcactcaccccaaagatgtcgacgggaacgacctgctgtcttattggccggccctgggagagtgtgaggcggctccctgtgctcttcaaacctgggggtcggaacgccggctgggcctggatacctcgaaagatgccgctaacaacaatcagccagaccccgcccttacatcgggggatgagacgagcttaggcagagcacaacgccagaggaaagggattctcaagaacagactgcagtaccccctcgtccctcagacccgcggcgcaccagagctgtcatggtgtcgggcggcaacactgggccaccgtgctgtgcccgcagcctcctatgggcgtatctatgcgggggggggaacggggtctttatcccagccagctagtcgttactcttctagagagcaactggatctcctcctccgacggcagctgtctcgagaacggctggaggaggcccccgcccccgtccttcggccattgtctcgcccaggctcgcaggaatgcatggatgcagcccctggacgtttggagccaaaagatcgaggttcaacactaccgcgcagacagccacccagagattatcccggcgccatggccggcagattcgggagtcgcgatgcgctggacctaggcgcaccgcgcgaatggttgagcacactgccacctcccagaagaactagagatctcgacccccagccaccacccttgcccctgagccctcaaaggcaactgagtcgggatcccttactgccatctagaccacttgatagcctttccagaagctcgaacagccgcgagcaattggaccaggttcccagtagacacccaagcagggaggcccttgggcccctgcctcagctgcttagagctagagaagactccgtgagcgggcctagtcatggtccctcaacggagcaactggatattctgtctagtattctggcaagctttaattcatccgcattgtctagcgtccagtccagctcaactcctctaggcccccatactacagccacaccctctgccacagcctcagtgcttgggccctcaactccccggtctgccacttcacatagcatcagcgagttgtcacccgatagcgaggtcccccgatctgaaggtcattcctag

SEQ ID NO: 117580 - DNA, 9954 bp, Artificial Sequence
  derived and/or modified sequence
atgatggcgcgccgtcccccctggcggggcttgggtggtcgaagtactcccatcttactcctcctgctcttgtcactcttcccactcagtcaggaagaactgggcggggggggccatcagggatgggaccccggtcttgcggccaccacgggaccaagagcccacattggaggcggagctctggcactttgtcctgagagttccggcgttcgagaagacggtggccccggcctcggagtccgagaaccaatattcgtcggccttcgcgggagacggcagagcgcacgcaattctcgagggcccccagagcaacctaatgaagagctcggaatagaacacggagtgcagccgctcggaagtagagaacgagaaaccgggcaggggcccggatctgtactgtactggcgaccagaagtgtctagctgtggtcggacgggtcctctgcaacgtggcagcttatcacccggtgcactgagtagcggagtgccaggatcgggcaactcatcccccctgccgagcgactttttgatcagacatcacggccccaagccagtgagtagccagcgcaatgcaggaaccggttcaaggaagcgggtcggtacagcacggtgctgtggcgagctctgggctaccggctccaagggacaaggagagagagcaactacaagcggggccgaacggactgctcctaggcggaactgcctaccaggagccagcggctctggcccagaactggacagcgcccctcggaccgcccggaccgcccccgcctctggatcagcccccagagagtctaggaccgcgccagaaccggcccctaagagaatgcggagtcgaggactcttcaggtgcaggttcctaccacaacgcccgggtccacgacctcctgggctgcccgccaggccggaagctcgcaaggtcacaagtgccaatcgtgcgaggtttagaagggctgctaatcgacaccctcagtttccgcagtacaattatcagactttggtgccagaaaatgaagccgctggaaccgcagtgttacgtgtggtcgcccaagatcctgacgccggagaggccgggagactcgtatattccctcgccgcactaatgaacagccgtagtttagagcttttctcaatagatccacagtcaggtctcataagaaccgccgctgccctggaccgcgagtcgatggagcggcactacctcagagtgacagcacaggatcacggctctcctagactgagcgctaccaccatggtcgccgtgacggtcgctgacagaaatgaccattcgccggttttcgaacaggctcagtaccgcgaaacactgagagagaacgttgaggagggctaccccattctccagctgagagccacagatggtgatgcccccccaaatgctaacctgcggtacagatttgtgggcccccccgctgctcgcgccgctgcggcggcagccttcgagatcgatccgcggtcaggactaatatcaacctcaggcagggtcgaccgcgagcatatggaaagctacgaactcgtcgtcgaggcaagcgaccagggacaggaaccagggcctcgttcagccaccgtacgggtgcatatcaccgttctcgacgagaacgacaacgctcctcagttttccgaaaagcggtatgtcgcgcaagtacgagaggacgtacggcctcataccgtggtattgcgcgtgactgcaacagatcgggacaaggatgctaacggcctggtacattacaatatcattagcgggaattcacgcggtcacttcgcaatcgatagtctgacaggcgaaattcaagttgttgcacccctcgattttgaagccgagcgcgagtatgcactgagaattcgcgcccaggacgctggccgcccacctctttcaaacaacactggattggccagcatccaagtcgtggatatcaacgatcacattccaatatttgtgtcgacacccttccaggttagtgtgctggagaatgcaccgcttggtcactctgtcatccacattcaggcagtggacgccgaccatggagaaaacgctcgcctcgaatattctctgacaggagtggcgcccgatacacctttcgtgatcaatagcgctaccgggtgggtctcagtgtccggaccgctagaccgagagagtgtggagcactatttttttggcgtcgaagcgcgggaccacgggagtccccccctgagtgcctctgcctctgtgaccgtaacagtgctcgatgtcaatgacaaccgacccgaattcacgatgaaggagtaccatctgcggctgaatgaggatgcagctgtgggaacttccgtcgtatccgttaccgctgttgaccgagacgccaactctgctatcagttatcagattaccggagggaatacacggaaccgattcgctatatcaacccaggggggcgtgggattggtgactttagctctcccccttgactataaacaggagcggtactttaaactggttttaactgcttccgatagagccctgcacgaccactgctatgtacacattaatattaccgacgcgaatacccacaggcccgtgttccagagtgcccactacagcgtgagtgttaacgaggaccggcctatgggcagtacgatcgtggtgataagcgccagcgatgatgacgttggggaaaatgctaggattacttacctgctagaagataacttaccccaatttcgcattgatgctgattccggagccataacacttcaggcaccgctggattacgaagatcaagtgacatacaccctagctattacggcgcgagataatgggataccacaaaaggctgatactacctacgtggaggtgatggtcaacgatgtgaatgacaacgctcctcaattcgtggcgagccattacacgggtctggtgagtgaagatgcccctccttttaccagcgtgctgcagatctccgctaccgacagagacgcacatgctaatggccgcgtacagtacactttccagaacggggaggatggcgatggggactttacgattgagcccacctcaggaatcgttcgaaccgtcaggagattggatagggaagccgtgtctgtttacgaactgaccgcctatgctgtggaccggggcgtaccaccactgagaactccagtgtcaatccaagtcatggtgcaagacgtgaatgacaacgctcctgtatttcccgctgaggagtttgaagtcagggttaaggagaattccattgtcggaagtgttgtagcccagatcacagctgtggaccccgacgagggccctaacgcacatatcatgtatcagatagtcgaagggaatatcccggagttgttccagatggatattttttccggcgagctcactgcactaattgaccttgattacgaagccagacaggaatacgtgattgttgtccaagctactagtgcgccactggtgtcaagggccacggttcacgttcggctagtcgatcagaacgataatagcccagtactcaataatttccaaatactgtttaataactatgtatccaataggtcagatacatttccctccggtattatagggcggattcccgcgtacgatccggacgtttccgaccacttattttatagtttcgagagaggcaacgaactgcaactgctggtggtgaaccaaacaagtggagagctcagattgtcacggaagctggataacaacagacctctggtcgcctctatgctggtaactgtaaccgatggtctccacagcgtgacggctcagtgcgtcttgcgcgtggtgataattactgaagagctactagccaattctcttaccgtccgccttgagaacatgtggcaggagcgattcctcagccccttgctggggagatttctggagggcgtcgctgccgtcttagctactcccgccgaggatgtctttatctttaatatacagaatgatactgatgtcggtggcactgtcctgaacgtctcctttagtgctctcgcccctaggggcgctggagcaggtgcggctggtccgtggttttccagcgaagagctccaggaacagttatatgtccggagagccgccctagcagccaggagcctccttgacgtcctacctttcgatgacaacgtctgtctgcgtgaaccatgtgagaattatatgaaatgtgtgtctgttctaagattcgattcatccgctccgtttctcgcatcagccagcacactctttcgccccatccaaccgattgccggactgaggtgcagatgcccaccagggttcactggggatttttgtgaaacagaactagatttgtgttactcgaatccttgtcggaacggaggagcctgtgcgcgcagggagggcggctacacttgcgtttgcaggcctcgtttcactggagaggactgtgaactggacaccgaagctggaaggtgcgtacccggagtgtgtaggaacggcggtacttgtaccgatgcccccaatggtggcttccgctgtcaatgtcctgccggcggggcatttgaaggacctagatgcgaggttgccgcccggtcttttccaccaagctctttcgttatgtttcgcggcctgcgccaaaggttccacctgacactctctctgtctttcgcgacggtacaacagagtggccttttattttataacggacgcctcaacgaaaagcacgacttcctggccttagagctggtcgccgggcaagtgaggctcacttactcaaccggtgagtccaataccgtggtttctccaacagtgccggggggcctctcagacggtcagtggcatacagttcatttgcgatactacaataaacccaggactgatgcattagggggggcacaggggccaagcaaagacaaagtcgccgtcctttctgtcgacgattgcgacgttgcagtcgccttgcagtttggggcagagatagggaattacagctgtgcggcagctggggtacagaccagctcaaagaaatccctggatttgactggaccccttctgcttggcggcgtcccaaacctccctgagaatttcccagtgtcacacaaagatttcatcggttgcatgcgggatctgcatatcgacggaagaagggttgacatggccgccttcgtcgccaataatggcaccatggcaggctgccaggcaaaattacacttctgtgatagcggaccttgtaagaactccggtttttgttccgagcggtggggcagcttctcctgtgactgcccagtggggttcgggggcaaggattgccaactaacaatggctcacccacatcatttcagaggcaatgggacgctcagctggaatttcggcagcgacatggccgtatcagttccatggtatctaggcctcgcatttaggacaagagccactcaaggcgtgcttatgcaggttcaagcggggcctcattccacactcttgtgccagctggaccggggcctcctgtccgtcacagtcacccgcggatctggccgcgctagccatctcttgctggaccaggttacagtttccgacggcaggtggcatgacctacgtcttgagctgcaggaggaaccgggaggccggagaggacaccatgtgctgatggtgagcctggacttctcactcttccaagatactatggccgtggggtcagagctccagggtctcaaagtcaagcagttacatgttggcggactcccaccagggtcagctgaggaagcccctcaaggcctggttgggtgtattcaaggcgtgtggctgggctctaccccgagcggctcgccagccctgctccccccatcccacagagtcaatgctgagccgggatgtgtcgtgacaaatgcgtgcgcttctgggccctgtcctccccacgcagattgtcgcgacttatggcagacattctcctgcacatgtcagcctggctactatggccctggatgcgttgacgcatgtctcctgaacccttgtcagaatcagggcagctgtaggcatctgcccggtgcgcctcacggctatacctgcgattgcgttgggggttattttggccaccactgtgagcaccgcatggaccaacaatgtccccggggatggtggggctcacccacctgcggcccctgtaattgtgacgttcacaaaggtttcgatcctaattgcaataagaccaacggccagtgccattgtaaggagttccactataggccccggggctctgacagctgtttgccatgcgattgctatcccgtagggtctacatctcgctcatgcgccccccattcaggacagtgtccatgtcgtccaggcgccttaggacggcagtgcaattcatgcgatagtccctttgcagaagtcacggcaagcggctgtcgggtactgtatgacgcctgccccaagagtctgagatcaggtgtgtggtggccccagacaaagttcggagttctcgccaccgtgccatgcccaagaggagctctggggcttcgtggggccggagctgctgtgagactgtgcgatgaggcgcagggatggctggaaccagacctgtttaattgtacatctcccgcttttcgcgaactctcattactcctggatggactggagctcaacaagaccgccttagatacaatggaagctaagaagctggcacaacgcttaagagaggtgaccgggcatacagaccactatttttctcaggacgtcagggtaactgcccgactcttggcacacctgctggctttcgaaagccaccagcagggtttcggtctgacagcaactcaggacgcacacttcaatgagaacttgttgtgggccggctcagctctgctggcacctgaaacgggggatttgtgggcagctttagggcagcgcgccccaggcggtagccctgggagcgccggtctcgtgcgccacctcgaggagtatgcggcaactctagcacgtaatatggagctcacctacttgaaccccatgggcctggtcacaccaaatattatgctttcgatcgatagaatggaacatccatctagcccgcgcggagccaggcgttaccccagataccactcaaatctgttcagaggacaggatgcctgggaccctcacacccacgtcctcctcccttctcaatctccgaggccttccccttccgaagtcctgcccacttcatcaagtattgagaattcaactaccagcagcgtagtgcccccccccgctcccccagagccagaacctgggatcagcatcattatcctgctggtgtatcggaccttaggcggcctgctgcctgcccagttccaggcagagcgacgcggcgcacggcttcctcagaacccggttatgaatagccccgtcgtctccgtcgcagtgttccacggccgaaattttctgaggggcattctcgagtctcctatttctctggaatttcgactcctgcagaccgccaatcgcagcaaggccatctgtgttcagtgggatccccctgggttggccgagcagcacggagtgtggaccgctagggattgtgaactcgttcaccgcaacggctctcacgctcgttgtagatgctcgcggaccgggacatttggcgttctgatggatgcaagtccacgggaacgcctagaaggcgatctggagttactcgcggtgtttacacacgttgtcgtggcagtctcagtggctgctcttgtccttacggccgctatactgcttagcctccggtccctaaagtcgaacgtcagggggatccacgcaaatgtggcagcagctctgggtgtcgccgaactgctgtttctgttgggaattcatcggacccataatcagttagtgtgtaccgctgtggccatcctgctgcattacttttttctcagcacattcgcctggctgttcgtgcaaggactgcacctttatcgcatgcaggtggaaccgcgtaacgtggaccgaggggctatgcgtttctatcacgctcttggatggggtgtacctgctgtgctattgggcttggccgtgggccttgatccagagggatacggcaaccccgatttttgctggatttccgtccacgagccacttatatggagtttcgcagggccagttgtcttggtgatcgtaatgaacggcactatgttcttgctggcagccaggacctcatgctctacaggccaacgagaggccaaaaaaacatcggcgctaaccctgcgaagtagcttcttgttactgctgctggtgtccgcaagctggttattcgggctgctggcagtcaatcactctattcttgccttccattacctgcatgctgggttatgtgggttgcaggggttggctgtgctcctgttgttctgcgttctgaacgctgacgcaagggctgcatggatgcctgcttgtctcggccgaaaggcagcgccagaagaagctcgccctgcacctggtctaggaccgggagcctataacaatactgcccttttcgaagaatcagggttaataagaattaccttgggcgctagcactgtgtcatccgtgtccagcgctcggtcgggaagaacacaagaccaggacagtcagcgcggtagatcttacttgagagacaacgtgctggtgcgccacggatcagctgcagatcatacagaccacagcctgcaagctcatgcgggaccaaccgacctggacgtggcaatgtttcacagagacgcaggcgccgactctgactctgatagtgacctctcactggaagaggagcgatccctaagcattcctagttctgagtccgaagataatggacgcacaagaggccgattccagaggccactctgtcgggccgctcagagtgaaagactgctgacacaccccaaggatgtggacgggaacgatctgctcagctattggcccgctctaggcgagtgtgaagcagctccctgcgccctgcagacttggggatctgaacgccggctgggcctggacacgtctaaagacgccgcgaataacaaccagccagaccccgctctaaccagtggtgacgagacctctctgggcagggctcagagacagaggaagggcatccttaaaaatcgcttgcagtatccactcgtcccccagaccagaggagctcctgagctgtcatggtgccgggccgccactctagggcaccgggcggtgcctgctgcaagctatggcaggatttacgcgggtggaggcacaggttcgctgtctcagccggcctctcgctacagttccagagaacaactagacctcctcctgaggagacaacttagccgcgaacggctagaggaagccccggcccccgttctgcggcccctcagccgacctggcagccaggagtgtatggacgcagctcctggtcggctggaacctaaggacagagggtctaccctgcctcggcggcagccacctcgggactaccccggggcaatggctggaagattcggaagccgtgacgccttggacctgggagcacctcgagaatggttatctacactgcccccaccaaggaggacccgcgaccttgacccccaaccacccccactgccactgagcccacagaggcagttatctagagaccctctcttgccctccagaccattagactcactctcccgtagctcaaactcaagagaacagcttgaccaggtgcccagccgccaccccagccgcgaggctctgggacccctccctcagctgttgcgggctagggaggattcagtgagcggaccgtcccacggcccttccacagaacagctcgatattctctcatctatccttgcttcttttaattcctccgctcttagcagtgtgcagtctagttcaactcctctcggccctcacaccaccgccacccccagtgccacagcctcagtccttggaccatcaacccccaggtctgccaccagtcattccatttcagagttgtctccagacagcgaggtgcctcgcagcgaggggcacagctag

SEQ ID NO: 117581 - DNA, 9939 bp, Artificial Sequence
  derived and/or modified sequence
atgatggcccggcggcccccctggaggggcctgggcggccgcagcacccccatcctgctgctgctgctgctgagcctcttccccctgagccaggaggagctgggcggcggcggccaccagggctgggaccccggcctggccgccaccaccggcccccgggcccacatcggcggcggggccctggccctgtgcccagagagcagcggcgtgcgggaggatggcggccctggcctgggcgtgcgggagcccatctttgtgggcctgcggggccggcggcagagcgccaggaacagccggggccccccagagcagcccaatgaggagctgggcattgaacatggagtgcagcccctgggcagccgggagcgggagaccggccagggccctggctctgtgctgtactggaggcctgaggtgagcagctgtggccgcacaggccccctgcagaggggcagcctgagccctggggccctgagcagcggcgtgcccggcagcggcaacagcagccccctgcccagcgacttcctgatccgccaccacggccccaagcctgtgagcagccagagaaatgccggcaccggcagcaggaagagggtgggcacagcccgctgctgcggggagctgtgggccaccggcagcaagggccagggcgagcgggccaccaccagcggggctgagaggacagcccccaggaggaactgcctgcccggggccagcggcagcggccctgagctggacagcgcccccaggacagccaggacagccccagccagcggcagcgccccccgggagagcaggacagcccctgagcccgcccccaagaggatgaggagccggggcctcttccgctgccgcttcctgccccagaggcctggccccaggcctcctggcctgcctgcccggcctgaggccaggaaggtgaccagcgccaacagagcccgcttccggcgggccgccaacagacacccccagttcccccagtacaactaccagaccctggtgcctgaaaatgaagctgctggaacagctgtgctgcgggtggtggcccaggaccctgatgctggggaggccggccgcctggtgtacagcctggccgccctgatgaacagccgcagcctggagctgttcagcattgacccccagagcggcctcatcagaacagctgctgccctggaccgggagagcatggagcggcactacctgcgggtgacagcccaggaccacggcagcccccggctgagcgccaccaccatggtggccgtgacagtggccgacagaaatgaccacagccctgtgtttgagcaggcccagtaccgggagaccctgcgggagaatgtggaggagggctaccccatcctgcagctgcgggccacagatggagatgcccccccaaatgccaacctgcgctacagatttgtgggccccccagctgcccgggctgctgctgctgctgcctttgaaattgaccccaggagcggcctcatcagcaccagcggccgggtggaccgggagcacatggagagctatgagctggtggtggaggccagtgaccagggccaggagcccggccccaggtctgccaccgtgcgggtgcacatcaccgtgctggatgaaaatgacaatgccccccagttcagcgagaagcgctacgtggcccaggtgcgggaggatgtgcggccccacacagtggtgctgcgggtgacagccacagaccgggacaaggatgccaacggcctggtgcactacaacatcatcagcggcaacagccggggccactttgccatcgacagcctgactggagagatccaggtggtggcccccctggactttgaggccgagcgggagtatgccctgcgcatccgggcccaggatgctggccggccccccctgagcaacaacacaggcctggccagcatccaggtggtggacatcaatgaccacatccccatctttgtgtccacccccttccaggtgtctgtgctggagaatgcccccctgggccacagcgtcatccacatccaggccgtggatgctgaccacggggagaatgcccggctggagtacagcctgactggagtggccccagacaccccatttgtgatcaacagcgccaccggctgggtgtctgtgtctggccccctggaccgggagagcgtggagcactacttcttcggcgtggaggcccgggaccacggcagcccccccctgagcgccagcgcctctgtgacagtgacagtgctggatgtgaatgacaacagacctgagttcaccatgaaggagtaccacctgcggctgaatgaagatgctgctgtgggcacctctgtggtgtctgtgacagctgtggacagagatgccaacagcgccatctcctaccagatcaccggcggcaacaccaggaacagatttgccatcagcacccagggcggcgtgggcctggtgaccctggccctgcccctggactacaagcaggagcgctacttcaagctggtgctgacagccagtgaccgggccctgcatgaccactgctacgtgcacatcaacatcacagatgccaacacccacaggcctgtgttccagagcgcccactacagcgtgtctgtgaatgaagatcggcccatgggcagcaccatcgtggtgatcagcgccagtgatgatgatgtgggagaaaatgcccgcatcacctacctgctggaggacaacctgccccagttcagaattgatgctgacagcggggccatcaccctgcaggcccccctggactatgaggaccaggtgacctacaccctggccatcacagcccgggacaatggcatcccccagaaggctgacaccacctacgtggaggtgatggtgaatgatgtgaatgacaatgccccccagtttgtggccagccactacacaggcctggtgtctgaagatgccccacccttcacctctgtgctgcagatcagcgccacagacagagatgcccacgccaacggccgggtgcagtacaccttccagaatggagaagatggagatggagacttcaccatcgagcccaccagcggcatcgtgaggacagtgcggcggctggaccgggaggccgtgtctgtgtatgagctgacagcctatgctgtggacagaggagtgccccccctgcggacccctgtgtccatccaggtgatggtgcaggatgtgaatgacaatgcccctgtgtttcctgctgaggagtttgaggtgcgggtgaaggagaacagcatcgtgggctctgtggtggcccagatcacagctgtggaccctgatgagggccccaatgcccacatcatgtaccagatcgtggagggcaacatccctgagctgttccagatggacatcttctctggagagctgacagccctgattgacctggactatgaggcccggcaggagtatgtgattgtggtgcaggccaccagcgcccccctggtgtcccgggccaccgtgcacgtgcggctggtggaccagaatgacaacagccctgtgctgaacaacttccagatcctcttcaacaactacgtgagcaacagaagtgacaccttccccagcggcatcatcggccgcatcccagcctatgaccctgatgtgtctgaccacctgttctacagctttgaaagaggaaatgagctgcagctgctggtggtgaaccagaccagcggggagctgcggctgagcaggaagctggacaacaaccggcccctggtggcctccatgctggtgacagtgacagatggcctgcacagcgtgacagcccagtgtgtgctgcgggtggtgatcatcacagaggagctgctggccaacagcctgactgtgcggctggagaacatgtggcaggagcgcttcctgagccccctgctgggccgcttcctggagggcgtggccgctgtgctggccaccccagcagaagatgtgttcatcttcaacatccagaatgacacagatgtgggcggcaccgtgctgaatgtgtccttcagcgccctggcccccaggggggccggggccggggctgctggcccctggttcagcagcgaggagctgcaggagcagctgtatgtgagaagagctgccctggccgcccggagcctgctggatgtgctgccctttgatgacaacgtgtgcctgcgggagccctgtgagaactacatgaagtgtgtgtctgtgctgcgctttgacagcagcgcccccttcctggccagcgccagcaccctcttccggcccatccagcccatcgccggcctgcgctgccgctgccccccaggcttcaccggggacttctgtgaaacagagctggacctgtgctacagcaacccctgcagaaatggaggagcctgtgcccggcgggagggcggctacacctgtgtgtgccggccccgcttcaccggggaggactgtgagctggacacagaggccggccgctgtgtgcctggggtgtgcagaaatggaggcacctgcacagatgccccaaatggaggcttccgctgccagtgcccagctgggggcgcctttgagggcccccgctgtgaggtggccgcccgctccttcccccccagcagctttgtgatgttccggggcctgcggcagcgcttccacctgaccctgagcctgagctttgccaccgtgcagcagagcggcctgctcttctacaacggccgcctgaatgagaagcatgacttcctggccctggagctggtggccggccaggtgcggctgacctacagcactggagagagcaacacagtggtgagccccaccgtgcctgggggcctgagtgatggccagtggcacacagtgcacctgcgctactacaacaagcccaggacagatgccctgggcggggcccagggccccagcaaggacaaggtggccgtgctgtctgtggatgactgtgatgtggccgtggccctgcagtttggagctgagatcggcaactacagctgtgccgctgctggggtgcagaccagcagcaagaagagcctggacctgaccggccccctgctgctgggcggcgtgcccaacctgcctgagaacttccctgtgagccacaaggacttcatcggctgcatgagggacctgcacattgatggccggcgggtggacatggccgcctttgtggccaacaacggcaccatggccggctgccaggccaagctgcacttctgtgacagcggcccctgcaagaacagcggcttctgcagcgagcgctggggcagcttcagctgtgactgccctgtgggctttggaggcaaggactgccagctgaccatggcccacccccaccacttcagaggaaatggcaccctgtcctggaactttggaagtgacatggctgtgtctgtgccctggtacctgggcctggccttccgcacccgggccacccagggcgtgctgatgcaggtgcaggccggcccccacagcaccctgctgtgccagctggaccggggcctgctgtctgtgacagtgacccggggcagcggccgggccagccacctgctgctggaccaggtgacagtgtctgatggccgctggcatgacctgcggctggagctgcaggaggagcccggcggccggcggggccaccacgtgctgatggtgtccctggacttcagcctcttccaggacaccatggctgtgggcagcgagctgcagggcctgaaggtgaagcagctgcacgtgggcggcctgcccccaggcagcgctgaggaggccccccagggcctggtgggctgcatccagggcgtgtggctgggcagcacccccagcggcagccctgccctgctgccccccagccaccgggtgaatgctgagcccggctgtgtggtgaccaatgcctgtgccagcggcccctgcccccctcatgctgactgccgggacctgtggcagaccttcagctgcacctgccagcccggctactacggccctggctgtgtggatgcctgcctgctgaacccctgccagaaccagggcagctgccgccacctgcccggggccccccacggctacacctgtgactgtgtgggcggctacttcggccaccactgtgagcacaggatggaccagcagtgcccccggggctggtggggcagccccacctgtggcccctgcaactgtgatgtgcacaagggctttgaccccaactgcaacaagaccaacggccagtgccactgcaaggagttccactaccggccccggggcagtgacagctgcctgccctgtgactgctaccctgtgggcagcaccagccgcagctgtgccccccacagcggccagtgcccctgcaggcctggggccctgggccggcagtgcaacagctgtgacagcccctttgctgaggtgacagccagcggctgccgggtgctgtatgatgcctgccccaagagcctgcggtctggagtgtggtggccccagaccaagtttggagtgctggccaccgtgccctgccccaggggggccctgggcgctgctgtgcggctgtgtgatgaggcccagggctggctggagccagacctcttcaactgcaccagccctgccttccgggagctgagcctgctgctggatggcctggagctgaacaagacagccctggacaccatggaggccaagaagctggcccagaggctgcgggaggtgacaggccacacagaccactacttcagccaggatgtgcgggtgacagcccggctgctggcccacctgctggcctttgagagccaccagcagggcttcggcctgacagccacccaggatgcccacttcaatgaaaacctgctgtgggccggcagcgccctgctggcccctgagactggagacctgtgggccgccctgggccagagggcccctgggggcagccctggcagcgctggcctggtgcgccacctggaggagtatgctgccaccctggccaggaacatggagctgacctacctgaaccccatgggcctggtgacccccaacatcatgctgagcattgacaggatggagcaccccagcagccccaggggggcccggcgctacccccgctaccacagcaacctcttccggggccaggatgcctgggacccccacacccacgtgctgctgcccagccagagcccccggcccagccccagcgaggtgctgcccaccagcagcagcattgagaacagcaccaccagctctgtggtgcccccaccagcccctcctgagcctgagcccggcatcagcatcatcatcctgctggtgtaccgcaccctgggcggcctgctgcctgcccagttccaggccgagcggcggggggcccggctgccccagaaccctgtgatgaacagccctgtggtgtctgtggccgtgttccacggcaggaacttcctgcggggcatcctggagagccccatcagcctggagttccggctgctgcagacagccaacagaagcaaggccatctgtgtgcagtgggaccccccaggcctggccgagcagcacggcgtgtggacagcccgggactgtgagctggtgcacagaaatggcagccacgcccgctgccgctgcagcaggacaggcaccttcggcgtgctgatggatgccagcccccgggagcggctggagggggacctggagctgctggccgtgttcacccacgtggtggtggccgtgtctgtggccgccctggtgctgacagctgccatcctgctgagcctgcggagcctgaagagcaatgtgcggggcatccacgccaacgtggccgccgccctgggcgtggccgagctgctcttcctgctgggcatccacaggacccacaaccagctggtgtgcacagctgtggccatcctgctgcactacttcttcctgagcacctttgcctggctgtttgtgcagggcctgcacctgtacaggatgcaggtggagcccagaaatgtggacagaggagccatgaggttctaccacgccctgggctggggcgtgcctgctgtgctgctgggcctggccgtgggcctggaccctgagggctacggcaacccagacttctgctggatctctgtgcatgagcccctcatctggagctttgctggccctgtggtgctggtgattgtgatgaatggcaccatgttcctgctggccgcccggaccagctgcagcacaggccagcgggaggccaagaagaccagcgccctgaccctgcggagcagcttcctgctgctgctgctggtgtctgcctcctggctgtttggcctgctggccgtgaaccacagcatcctggccttccactacctgcatgctggcctgtgtggcctgcagggcctggccgtgctgctgctcttctgtgtgctgaatgctgatgcccgggccgcctggatgcctgcctgcctgggcaggaaggccgcccctgaggaggcccggcctgcccctggcctgggccctggggcctacaacaacacagccctgtttgaggagagcggcctcatccgcatcaccctgggcgccagcacagtgtcctctgtgtcctctgcccggagcggccgcacccaggaccaggacagccagaggggccgcagctacctgcgggacaacgtgctggtgagacatggcagcgctgctgaccacacagaccacagcctgcaggcccacgccggccccacagacctggatgtggccatgttccacagagatgctggagctgacagcgacagcgacagcgacctgagcctggaggaggagaggagcctgagcatccccagcagcgagagcgaggacaatggccgcacccggggccgcttccagaggcccctgtgccgggccgcccagagcgagcggctgctgacccaccccaaggatgtggatggaaatgacctgctgagctactggccagccctgggagaatgtgaggccgccccctgtgccctgcagacctggggcagcgagcggcggctgggcctggacaccagcaaggatgctgccaacaacaaccagcctgaccctgccctgaccagcggagatgagaccagcctgggccgggcccagaggcagaggaagggcatcctgaagaaccggctgcagtaccccctggtgccccagaccaggggggcccctgagctgtcctggtgccgggccgccaccctgggccacagagctgtgcctgctgccagctatggccgcatctatgctgggggcggcaccggcagcctgagccagcctgccagccgctacagcagccgggagcagctggacctgctgctgcggcggcagctgagccgggagcggctggaggaggccccagcccctgtgctgcggcccctgagcaggcctggcagccaggagtgcatggatgctgcccctggccgcctggagcccaaggaccggggcagcaccctgccccggcggcagcccccccgggactacccaggggccatggccggccgcttcggcagcagagatgccctggacctgggcgccccccgggagtggctgagcaccctgcccccacccaggaggacccgggacctggacccccagcccccacccctgcccctgagcccccagaggcagctgagccgggaccccctgctgcccagccggcccctggacagcctgagccgcagcagcaacagccgggagcagctggaccaggtgcccagccgccaccccagccgggaggccctgggccccctgccccagctgctgcgggcccgggaggacagcgtgtctggccccagccacggccccagcacagagcagctggacatcctgagcagcatcctggccagcttcaacagcagcgccctgagctctgtgcagagcagcagcacccccctgggcccccacaccacagccaccccatctgccacagcctctgtgctgggccccagcacccccaggtctgccaccagccacagcatcagcgagctgagcccagattctgaggtgcccaggtctgagggccacagctag

SEQ ID NO: 117582 - DNA, 9954 bp, Artificial Sequence
  derived and/or modified sequence
atgatggcccggcggcccccctggaggggcctgggcggccgcagcacccccatcctgctgctgctgctgctgagcctcttccccctgagccaggaggagctgggcggcggcggccaccagggctgggaccccggcctggccgccaccaccggcccccgggcccacatcggcggcggggccctggccctgtgcccagagagcagcggcgtgcgggaggatggcggccctggcctgggcgtgcgggagcccatctttgtgggcctgcggggccggcggcagagcgccaggaacagccggggccccccagagcagcccaatgaggagctgggcattgaacatggagtgcagcccctgggcagccgggagcgggagaccggccagggccctggctctgtgctgtactggaggcctgaggtgagcagctgtggccgcacaggccccctgcagaggggcagcctgagccctggggccctgagcagcggcgtgcccggcagcggcaacagcagccccctgcccagcgacttcctgatccgccaccacggccccaagcctgtgagcagccagagaaatgccggcaccggcagcaggaagagggtgggcacagcccgctgctgcggggagctgtgggccaccggcagcaagggccagggcgagcgggccaccaccagcggggctgagaggacagcccccaggaggaactgcctgcccggggccagcggcagcggccctgagctggacagcgcccccaggacagccaggacagccccagccagcggcagcgccccccgggagagcaggacagcccctgagcccgcccccaagaggatgaggagccggggcctcttccgctgccgcttcctgccccagaggcctggccccaggcctcctggcctgcctgcccggcctgaggccaggaaggtgaccagcgccaacagagcccgcttccggcgggccgccaacagacacccccagttcccccagtacaactaccagaccctggtgcctgaaaatgaagctgctggaacagctgtgctgcgggtggtggcccaggaccctgatgctggggaggccggccgcctggtgtacagcctggccgccctgatgaacagccgcagcctggagctgttcagcattgacccccagagcggcctcatcagaacagctgctgccctggaccgggagagcatggagcggcactacctgcgggtgacagcccaggaccacggcagcccccggctgagcgccaccaccatggtggccgtgacagtggccgacagaaatgaccacagccctgtgtttgagcaggcccagtaccgggagaccctgcgggagaatgtggaggagggctaccccatcctgcagctgcgggccacagatggagatgcccccccaaatgccaacctgcgctacagatttgtgggccccccagctgcccgggctgctgctgctgctgcctttgaaattgaccccaggagcggcctcatcagcaccagcggccgggtggaccgggagcacatggagagctatgagctggtggtggaggccagtgaccagggccaggagcccggccccaggtctgccaccgtgcgggtgcacatcaccgtgctggatgaaaatgacaatgccccccagttcagcgagaagcgctacgtggcccaggtgcgggaggatgtgcggccccacacagtggtgctgcgggtgacagccacagaccgggacaaggatgccaacggcctggtgcactacaacatcatcagcggcaacagccggggccactttgccatcgacagcctgactggagagatccaggtggtggcccccctggactttgaggccgagcgggagtatgccctgcgcatccgggcccaggatgctggccggccccccctgagcaacaacacaggcctggccagcatccaggtggtggacatcaatgaccacatccccatctttgtgtccacccccttccaggtgtctgtgctggagaatgcccccctgggccacagcgtcatccacatccaggccgtggatgctgaccacggggagaatgcccggctggagtacagcctgactggagtggccccagacaccccatttgtgatcaacagcgccaccggctgggtgtctgtgtctggccccctggaccgggagagcgtggagcactacttcttcggcgtggaggcccgggaccacggcagcccccccctgagcgccagcgcctctgtgacagtgacagtgctggatgtgaatgacaacagacctgagttcaccatgaaggagtaccacctgcggctgaatgaagatgctgctgtgggcacctctgtggtgtctgtgacagctgtggacagagatgccaacagcgccatctcctaccagatcaccggcggcaacaccaggaacagatttgccatcagcacccagggcggcgtgggcctggtgaccctggccctgcccctggactacaagcaggagcgctacttcaagctggtgctgacagccagtgaccgggccctgcatgaccactgctacgtgcacatcaacatcacagatgccaacacccacaggcctgtgttccagagcgcccactacagcgtgtctgtgaatgaagatcggcccatgggcagcaccatcgtggtgatcagcgccagtgatgatgatgtgggagaaaatgcccgcatcacctacctgctggaggacaacctgccccagttcagaattgatgctgacagcggggccatcaccctgcaggcccccctggactatgaggaccaggtgacctacaccctggccatcacagcccgggacaatggcatcccccagaaggctgacaccacctacgtggaggtgatggtgaatgatgtgaatgacaatgccccccagtttgtggccagccactacacaggcctggtgtctgaagatgccccacccttcacctctgtgctgcagatcagcgccacagacagagatgcccacgccaacggccgggtgcagtacaccttccagaatggagaagatggagatggagacttcaccatcgagcccaccagcggcatcgtgaggacagtgcggcggctggaccgggaggccgtgtctgtgtatgagctgacagcctatgctgtggacagaggagtgccccccctgcggacccctgtgtccatccaggtgatggtgcaggatgtgaatgacaatgcccctgtgtttcctgctgaggagtttgaggtgcgggtgaaggagaacagcatcgtgggctctgtggtggcccagatcacagctgtggaccctgatgagggccccaatgcccacatcatgtaccagatcgtggagggcaacatccctgagctgttccagatggacatcttctctggagagctgacagccctgattgacctggactatgaggcccggcaggagtatgtgattgtggtgcaggccaccagcgcccccctggtgtcccgggccaccgtgcacgtgcggctggtggaccagaatgacaacagccctgtgctgaacaacttccagatcctcttcaacaactacgtgagcaacagaagtgacaccttccccagcggcatcatcggccgcatcccagcctatgaccctgatgtgtctgaccacctgttctacagctttgaaagaggaaatgagctgcagctgctggtggtgaaccagaccagcggggagctgcggctgagcaggaagctggacaacaaccggcccctggtggcctccatgctggtgacagtgacagatggcctgcacagcgtgacagcccagtgtgtgctgcgggtggtgatcatcacagaggagctgctggccaacagcctgactgtgcggctggagaacatgtggcaggagcgcttcctgagccccctgctgggccgcttcctggagggcgtggccgctgtgctggccaccccagcagaagatgtgttcatcttcaacatccagaatgacacagatgtgggcggcaccgtgctgaatgtgtccttcagcgccctggcccccaggggggccggggccggggctgctggcccctggttcagcagcgaggagctgcaggagcagctgtatgtgagaagagctgccctggccgcccggagcctgctggatgtgctgccctttgatgacaacgtgtgcctgcgggagccctgtgagaactacatgaagtgtgtgtctgtgctgcgctttgacagcagcgcccccttcctggccagcgccagcaccctcttccggcccatccagcccatcgccggcctgcgctgccgctgccccccaggcttcaccggggacttctgtgaaacagagctggacctgtgctacagcaacccctgcagaaatggaggagcctgtgcccggcgggagggcggctacacctgtgtgtgccggccccgcttcaccggggaggactgtgagctggacacagaggccggccgctgtgtgcctggggtgtgcagaaatggaggcacctgcacagatgccccaaatggaggcttccgctgccagtgcccagctgggggcgcctttgagggcccccgctgtgaggtggccgcccgctccttcccccccagcagctttgtgatgttccggggcctgcggcagcgcttccacctgaccctgagcctgagctttgccaccgtgcagcagagcggcctgctcttctacaacggccgcctgaatgagaagcatgacttcctggccctggagctggtggccggccaggtgcggctgacctacagcactggagagagcaacacagtggtgagccccaccgtgcctgggggcctgagtgatggccagtggcacacagtgcacctgcgctactacaacaagcccaggacagatgccctgggcggggcccagggccccagcaaggacaaggtggccgtgctgtctgtggatgactgtgatgtggccgtggccctgcagtttggagctgagatcggcaactacagctgtgccgctgctggggtgcagaccagcagcaagaagagcctggacctgaccggccccctgctgctgggcggcgtgcccaacctgcctgagaacttccctgtgagccacaaggacttcatcggctgcatgagggacctgcacattgatggccggcgggtggacatggccgcctttgtggccaacaacggcaccatggccggctgccaggccaagctgcacttctgtgacagcggcccctgcaagaacagcggcttctgcagcgagcgctggggcagcttcagctgtgactgccctgtgggctttggaggcaaggactgccagctgaccatggcccacccccaccacttcagaggaaatggcaccctgtcctggaactttggaagtgacatggctgtgtctgtgccctggtacctgggcctggccttccgcacccgggccacccagggcgtgctgatgcaggtgcaggccggcccccacagcaccctgctgtgccagctggaccggggcctgctgtctgtgacagtgacccggggcagcggccgggccagccacctgctgctggaccaggtgacagtgtctgatggccgctggcatgacctgcggctggagctgcaggaggagcccggcggccggcggggccaccacgtgctgatggtgtccctggacttcagcctcttccaggacaccatggctgtgggcagcgagctgcagggcctgaaggtgaagcagctgcacgtgggcggcctgcccccaggcagcgctgaggaggccccccagggcctggtgggctgcatccagggcgtgtggctgggcagcacccccagcggcagccctgccctgctgccccccagccaccgggtgaatgctgagcccggctgtgtggtgaccaatgcctgtgccagcggcccctgcccccctcatgctgactgccgggacctgtggcagaccttcagctgcacctgccagcccggctactacggccctggctgtgtggatgcctgcctgctgaacccctgccagaaccagggcagctgccgccacctgcccggggccccccacggctacacctgtgactgtgtgggcggctacttcggccaccactgtgagcacaggatggaccagcagtgcccccggggctggtggggcagccccacctgtggcccctgcaactgtgatgtgcacaagggctttgaccccaactgcaacaagaccaacggccagtgccactgcaaggagttccactaccggccccggggcagtgacagctgcctgccctgtgactgctaccctgtgggcagcaccagccgcagctgtgccccccacagcggccagtgcccctgcaggcctggggccctgggccggcagtgcaacagctgtgacagcccctttgctgaggtgacagccagcggctgccgggtgctgtatgatgcctgccccaagagcctgcggtctggagtgtggtggccccagaccaagtttggagtgctggccaccgtgccctgccccaggggggccctgggcctgcggggggccggggctgctgtgcggctgtgtgatgaggcccagggctggctggagccagacctcttcaactgcaccagccctgccttccgggagctgagcctgctgctggatggcctggagctgaacaagacagccctggacaccatggaggccaagaagctggcccagaggctgcgggaggtgacaggccacacagaccactacttcagccaggatgtgcgggtgacagcccggctgctggcccacctgctggcctttgagagccaccagcagggcttcggcctgacagccacccaggatgcccacttcaatgaaaacctgctgtgggccggcagcgccctgctggcccctgagaccggggacctgtgggccgccctgggccagagggcccctgggggcagccctggcagcgctggcctggtgcgccacctggaggagtatgctgccaccctggccaggaacatggagctgacctacctgaaccccatgggcctggtgacccccaacatcatgctgagcattgacaggatggagcaccccagcagccccaggggggcccggcgctacccccgctaccacagcaacctcttccggggccaggatgcctgggacccccacacccacgtgctgctgcccagccagagcccccggcccagccccagcgaggtgctgcccaccagcagcagcattgagaacagcaccaccagctctgtggtgcccccaccagcccctcctgagcctgagcccggcatcagcatcatcatcctgctggtgtaccgcaccctgggcggcctgctgcctgcccagttccaggccgagaggagaggagcccggctgccccagaaccctgtgatgaacagccctgtggtgtctgtggccgtgttccatggaagaaacttcctgcggggcatcctggagagccccatcagcctggagttccggctgctgcagacagccaacagaagcaaggccatctgtgtgcagtgggaccccccaggcctggccgagcagcacggcgtgtggacagcccgggactgtgagctggtgcacagaaatggcagccacgcccgctgccgctgcagcaggacaggcacctttggagtgctgatggatgccagcccccgggagcggctggagggggacctggagctgctggccgtgttcacccacgtggtggtggccgtgtctgtggccgccctggtgctgacagctgccatcctgctgagcctgcggagcctgaagagcaatgtgcggggcatccacgccaacgtggccgccgccctgggcgtggccgagctgctcttcctgctgggcatccacaggacccacaaccagctggtgtgcacagctgtggccatcctgctgcactacttcttcctgagcacctttgcctggctgtttgtgcagggcctgcacctgtacaggatgcaggtggagcccagaaatgtggacagaggagccatgaggttctaccacgccctgggctggggcgtgcctgctgtgctgctgggcctggccgtgggcctggaccctgagggctacggcaacccagacttctgctggatctctgtgcatgagcccctcatctggagctttgctggccctgtggtgctggtgattgtgatgaatggcaccatgttcctgctggccgcccggaccagctgcagcacaggccagcgggaggccaagaagaccagcgccctgaccctgcggagcagcttcctgctgctgctgctggtgtctgcctcctggctgtttggcctgctggccgtgaaccacagcatcctggccttccactacctgcacgccggcctgtgtggcctgcagggcctggccgtgctgctgctcttctgtgtgctgaatgctgatgcccgggccgcctggatgcctgcctgcctgggcaggaaggccgcccctgaggaggcccggcctgcccctggcctgggccctggggcctacaacaacacagccctgtttgaggagagcggcctcatccgcatcaccctgggcgccagcacagtgtcctctgtgagcagcgcccggagcggccgcacccaggaccaggacagccagaggggccgcagctacctgcgggacaacgtgctggtgcgccacggcagcgctgctgaccacacagaccacagcctgcaggcccatgctggccccacagacctggatgtggccatgttccacagagatgctggagctgacagcgacagcgacagcgacctgagcctggaggaggagaggagcctgagcatccccagcagcgagagtgaagataatggaagaacccggggccgcttccagaggcccctgtgcagagctgcccagagcgagcggctgctgacccaccccaaggatgtggatggaaatgacctgctgagctactggccagccctgggggagtgtgaggccgccccctgtgccctgcagacctggggcagcgagcggcggctgggcctggacaccagcaaggatgctgccaacaacaaccagcctgaccctgccctgaccagcggagatgagaccagcctgggccgggcccagaggcagaggaagggcatcctgaagaaccggctgcagtaccccctggtgccccagaccaggggggcccctgagctgtcctggtgcagagctgccaccctgggccacagagctgtgcctgctgccagctatggccgcatctatgccggcggcggcaccggcagcctgagccagcctgccagccgctacagcagccgggagcagctggacctgctgctgcggcggcagctgagccgggagcggctggaggaggccccagcccctgtgctgcggcccctgagccggcccggcagccaggagtgcatggatgctgcccctggccgcctggagcccaaggaccggggcagcaccctgccccggcggcagcccccccgggactacccaggggccatggccggccgcttcggcagcagagatgccctggacctgggcgccccccgggagtggctgagcaccctgcccccacccaggaggacccgggacctggacccccagcccccacccctgcccctgagcccccagaggcagctgagccgggaccccctgctgcccagccggcccctggacagcctgagccgcagcagcaacagccgggagcagctggaccaggtgcccagccgccaccccagccgggaggccctgggccccctgccccagctgctgcgggccagagaagattctgtgtctggccccagccacggccccagcacagagcagctggacatcctgagcagcatcctggccagcttcaacagcagcgccctgagctctgtgcagagcagcagcacccccctgggcccccacaccacagccacccccagcgccacagcctctgtgctgggccccagcacccccaggtctgccaccagccacagcatcagcgagctgagcccagacagcgaggtgcccaggtctgagggccacagctag

SEQ ID NO: 117583 - DNA, 9939 bp, Artificial Sequence
  derived and/or modified sequence
atgatggcccggcggcccccctggcggggcctgggcggccggagcacccccatactcttgctgctgctattgtctctgtttccgctctctcaggaggaacttggcgggggaggccaccagggatgggatccagggctggcagcaacaacgggcccccgcgctcacatcggcggtggcgcactggcattgtgtcccgaatcgtctggggtacgggaggacggaggcccaggactgggcgtgagggagcctatctttgtcggcctaagaggccggaggcagagcgccaggaatagtcggggtcccccagagcagccaaacgaagaattaggcattgaacacggagtacagccccttggtagccgggaaagagaaacgggccaagggccaggatcagtcctatattggcgcccggaggttagctcttgtggtcggacaggacctctacagaggggatcgctgtcccccggcgccctgtcgtccggggtgccaggcagtggtaactctagtcctctgcccagtgattttcttatacgccatcatggacccaaacccgtaagcagccagagaaatgctgggactggcagccgaaagagggtcggaacagcgcgctgttgcggagagctctgggccactggctcaaagggccagggcgagcgcgccactacgtccggcgctgagcggacggccccccgccgcaactgtttgcctggcgcaagcggaagcggacctgaactcgactctgctccgaggaccgcccgaacggcaccagcatcaggctcagcaccacgcgagagtagaaccgcgcctgagcctgcaccaaagagaatgcggtcacggggtctgtttaggtgtagatttcttcctcagaggcctggacctaggcctccaggcctgccagcacgaccagaagctcgcaaagtgaccagtgccaatcgagctcggtttcgccgagccgccaaccgtcacccacagttcccgcagtataattatcagactctggtcccggaaaatgaagctgctggaaccgccgtgctgagagtggtggctcaagatccagacgccggggaggccggcagattggtgtacagcttagccgccctcatgaattcacggagcctggagctgttctcgattgatccacagtccggcctcatccgaactgccgccgccctagaccgcgaaagtatggagaggcattacctccgagtaaccgcccaggaccacggctctccgcgactgtccgccacgacgatggtggcagtgactgtggcggatcgcaacgaccacagtcctgttttcgagcaggcccagtaccgggaaaccttgcgcgagaatgtagaggaaggatatcctattctgcagctgagggcaaccgatggggacgctccgccaaacgccaatctgagatataggtttgtgggcccccctgccgccagggcagccgccgccgcagcattcgaaatagaccctagaagcggtctgataagcacctccggacgtgtggatagggagcacatggaaagttacgagcttgtggtggaggcctcagaccaagggcaggagccaggcccaagaagcgctaccgttcgcgttcacatcaccgtactggacgagaacgacaacgctccccagttttccgagaaacgatacgtggcccaagtacgggaggatgtgagaccccatacagtagttctgcgggttacagcaacggaccgcgacaaggatgcaaacggactggtacattataatatcattagcggtaattcacgcggtcacttcgctattgactccctaacaggcgaaatccaggtagtcgctcccctcgacttcgaagccgagcgagagtatgccctcagaatccgggcacaagatgccgggaggccccctctctctaataatactggactggcctcaatccaggtggtggatatcaacgatcacatcccgatttttgtgtccacacctttccaggtgtctgtgttggagaatgccccacttggtcacagtgtcatccatatccaagccgttgatgcagaccacggagagaatgctcgccttgagtactcactaacaggcgtggcccccgatactccctttgtgatcaattccgctaccggttgggtgtccgtgagtggccctcttgacagggagtctgttgagcattacttttttggtgtggaggccagggaccacggcagccctccactgagcgcaagtgcttctgtgacagtgactgtattggacgtgaatgacaaccgcccagagttcaccatgaaggagtaccacctccgcctgaacgaggatgccgccgtgggcacctctgttgtaagtgtcactgctgtggatcgggatgctaactcagcgatttcctaccagatcactggaggcaatactaggaatcggtttgcaatctctactcagggcggagttggcctggtaaccctcgctttacccctggattataagcaagagaggtacttcaaactggtccttacagcctctgacagggcactacatgaccactgctatgtccacatcaatatcacggatgcgaacacccaccggcccgtctttcagtcagctcactattccgtgtctgttaacgaagatcgacccatgggatctacaatcgttgtgattagcgcctcagatgacgatgttggagaaaacgcccggattacctacttacttgaagacaacctcccacagtttcgcatcgacgccgattccggcgcaattactctgcaggccccactagactatgaggaccaggtcacttataccttggccattaccgctagggacaacggtatcccccagaaggccgacaccacgtacgtggaggtgatggtgaacgatgtgaacgacaacgctccgcaatttgttgctagccactatactggactggtgagtgaagacgccccaccatttacttctgttcttcagatatctgcaacagatagggacgcccatgccaacgggcgtgtacagtatacattccagaatggagaagacggggatggggacttcaccatcgaacccactagcggaatcgtgcgtacagttcgcagactggatcgcgaagcagtaagcgtgtacgagctcacagcttacgcagtggacaggggcgtgcctccacttagaacgccagtaagcattcaggttatggtccaggacgttaatgacaatgcccctgtttttcctgccgaggagttcgaggttcgcgttaaggagaactcaattgtggggagcgtagtggcacagatcaccgctgtcgatccagacgaggggccgaacgcccatattatgtaccaaattgtggaagggaacattcctgagctgttccaaatggatatctttagcggcgagttgaccgctctcatcgatctggactatgaggccagacaggagtacgtaattgtagtgcaggctactagcgccccgctcgtctctcgggcaaccgtgcacgttagattggtcgatcaaaacgacaacagccccgtgctgaataacttccagatcctattcaacaactacgtgtccaataggtcagatacatttccttccgggattataggtagaatccctgcctacgatccggacgtttccgatcacctcttttattctttcgagcggggaaacgaactccagctgcttgtggtcaatcagacatccggcgagctaagactgtctaggaagctggataacaacagacccttggtagcatcaatgttggtgacagtgaccgacggcctgcatagtgttactgcgcagtgcgtgctgcgcgttgtaattataactgaagagttacttgccaattccctgaccgtgcggctagaaaacatgtggcaagaacgctttctgtcaccactgctcggtagatttctcgaaggcgtagctgctgtcttggctacacccgcagaggatgtattcatttttaatatccagaatgatactgatgtgggggggacagtgctgaatgtgtccttttccgccctggcccctcgtggcgctggagctggtgcagccggcccctggtttagtagcgaggagctgcaagagcagctctacgtcagacgggcggctctcgccgccaggagcttgctggatgtcctaccattcgacgataacgtttgcctgcgggagccttgcgaaaattatatgaagtgtgttagtgtgctgcgctttgacagttccgcgcccttccttgcgagtgccagcactttgttcagacccattcagcccattgccgggttgcggtgccggtgccccccaggatttactggagacttttgcgagaccgaattagatctttgttattccaacccttgtagaaatggcggggcttgtgctaggcgcgagggcggatacacttgcgtttgtcggccacgtttcacaggcgaagactgtgagctagatacggaagccggccggtgtgtgcccggcgtctgcaggaacggaggcacatgcacggacgcccccaacggcggattccgatgccagtgtccggctggcggcgcctttgaaggcccccgatgcgaagttgcagcaaggagttttcccccctcctcattcgttatgttccggggactgagacaaagattccatctgacccttagcctcagtttcgcaacagtccaacagtctggtttactcttctataacggtagactgaatgaaaagcatgacttcctggcactggagctcgttgccgggcaggtaaggttaacctactcaactggagagtcgaatacggtcgtgagccccaccgtgcctggtgggctgtccgatggccagtggcatacagtgcacctccggtactataacaaacccaggaccgatgcactcgggggcgctcagggcccatccaaagacaaggtggccgtactgagcgtggacgactgcgacgtggcagtcgccctgcagttcggggcagaaatcggaaattattcttgtgctgccgccggcgttcagacgtcaagcaaaaaatccctggacctgactggaccattgttactgggtggcgttcccaacctgccagagaacttccccgtgtcccacaaggacttcattgggtgcatgcgcgacctgcatattgacggccggcgtgtggacatggcagcctttgtggccaacaatggcaccatggcagggtgccaagcaaagctgcacttctgtgatagcggtccttgtaagaacagcgggttctgttcagaacgctggggcagtttctcctgcgactgtccagtgggtttcggcgggaaggactgtcagctaactatggcccacccccatcattttcgtgggaatggtaccctgtcttggaattttgggagcgacatggcggtgtccgttccttggtacttgggactcgcgttccggacccgagcgacacaaggtgttctgatgcaggtgcaagccggcccccattcaacactcctttgtcaactggatagaggcttactgagtgtgaccgtaactagaggtagcggtagagcatcccacctcctccttgaccaggttaccgtatctgacggacggtggcacgacttgagattagagttgcaagaagaacctggtgggcggcgcggtcatcatgtgttgatggtcagcctcgactttagtctgttccaggacacaatggcagtgggaagtgagctccagggtctgaaagtgaagcaactgcacgttggcggcttgccacctggtagtgctgaggaggcaccacaggggctggtgggctgcattcaaggcgtgtggcttgggagcaccccatccggcagccccgctctactacctcctagtcacagagtaaatgctgaaccaggatgcgtggtcacaaatgcatgtgcctcaggcccctgcccacctcacgccgattgccgcgacctgtggcagacctttagctgcacctgtcagcccggctactacgggcccggctgcgttgacgcctgcttgcttaatccttgtcaaaaccaggggtcatgccgacaccttccaggggctccacacggatacacctgtgactgcgtgggcggctacttcgggcaccattgcgaacatcgaatggaccaacaatgtcccagggggtggtggggatcgcccacatgtggcccgtgtaattgtgacgttcataaagggtttgatccaaactgtaacaaaacaaacggacagtgtcattgcaaagaatttcattataggccacgcggcagcgatagctgccttccttgcgactgttaccccgttggctcaacctctcggagctgcgctccgcactccgggcagtgtccttgtcgaccaggggcacttggacgtcaatgtaattcttgcgactctcccttcgccgaggtaaccgccagcgggtgtagagtgctctatgacgcctgtcccaaatcactgcggagcggcgtctggtggcctcagacaaagtttggagtgttggcaacagtaccctgccccaggggagccctgggagctgccgtacgtctctgtgacgaagcacaaggatggttggaaccagacctatttaattgtactagtcctgctttccgggagctgagtctgttgttagatggtctggaactcaataagacagcattggatacaatggaggctaagaaactagcccagaggctgagggaagtgacaggacacacagatcactactttagccaggacgtgcgcgtgacggccaggttactggcacatcttctcgcattcgaatcgcaccagcagggatttgggctgacagccacacaggatgcacattttaacgaaaacttgctgtgggccggctcagctctgctggcacccgagaccggcgacctgtgggcagcgctgggccagcgggcgcccgggggcagcccaggatcagctgggctggtccgccatctggaggaatacgccgccaccctggcccggaatatggaactcacatatctgaatcctatgggactagtgacacctaacattatgctgtcaatcgaccggatggagcaccccagctccccgagaggggccaggaggtaccctcgataccattcaaacctttttcggggacaggatgcttgggatccgcatacccatgttctcttgccctcacagtcacctaggcctagcccctctgaggtcctgcccacttcttcctcgatagagaacagcacaacgtcctcagttgtacccccacccgcccctccggaaccagagcccggaattagcatcattattctgctcgtttatcgtacactgggcgggctcctgcctgcacaattccaggccgagcgtcgcggcgctagactgcctcagaatcccgtgatgaactcgcctgttgtgtcagttgccgtgttccacggaaggaacttcttacggggcatcctggaaagcccaataagcctagagtttcgcctcttgcagacagcaaaccggagcaaggcaatttgcgtacagtgggaccccccgggactcgcagagcaacacggagtgtggactgcgcgagactgtgaactagttcataggaatgggtcccacgcccgctgccggtgcagccgcacgggcacatttggcgtgctaatggatgcaagtcctagagagcgactcgaaggcgatttggagctcctggcagtctttacgcatgtggtggtggctgtcagtgtggcggctttggtcctcaccgcagcgatcctcctaagcctccggagtctgaaaagcaatgtaaggggaatccacgctaacgttgccgcagccctgggcgtcgctgaattgttatttctcttggggattcatcgcacgcacaaccagcttgtttgcactgcggtggctattctattgcactacttctttctctccacgttcgcctggctgttcgtacaggggcttcacctctatcgaatgcaggtggagcctcggaacgtggatcgcggagccatgcgcttctaccacgcactaggatggggggtaccagcggttctccttggcttggccgtagggctggaccccgagggatatgggaatcccgacttctgctggataagcgtgcacgagccactcatttggtcctttgccgggccagtggtgctggttatcgtgatgaacgggaccatgttcctgctcgcagcgagaacttcatgctcgactggtcaacgagaggccaaaaaaacctctgccctaacactgaggtcatcttttctgctgttactgcttgtgtcagctagctggttgtttggattactggctgttaatcattccattctcgccttccactatctccatgctgggttgtgcggtttgcagggcctggcagttctactacttttctgcgttttgaatgccgacgcccgagccgcctggatgccagcctgtctggggcgtaaagccgcccccgaggaagctcgccccgcacccggtctgggcccaggggcttataataatacagccttgtttgaggagtccggcctgatccggattactctgggagcaagcacggtatcctctgtgagctcggcaaggagcggccgtactcaggaccaagatagccagagggggcgcagctatctgcgcgataacgtgctggtgcgacatgggagcgccgctgaccatactgaccattctcttcaggcccatgccggcccaaccgacttggatgtagccatgtttcatagagacgctggcgccgatagcgacagcgattcagaccttagtctggaagaagaacgcagcctgtctattccctccagtgagtccgaggataatgggcgcaccagaggaagattccagcgcccactatgtcgggctgcccagtctgagcggctcctcacccatccaaaggacgtggatgggaacgatttgttgtcgtactggccagcgctaggcgaatgcgaagctgctccctgcgcccttcagacttgggggagcgagcggcgactaggtctggacacctctaaagacgccgctaataacaaccaacccgaccccgccttaacaagcggtgatgagacttctttgggtagggctcagcgccagcggaaaggcatcctgaaaaatcggctccaataccctcttgtgccgcaaacacgcggggctcctgaactgtcttggtgccgagcagctaccttaggacacagggcagtgcccgcagcctcttatggtcgaatttatgctggaggaggcacaggctcgctgtcacagcctgcttccaggtattcaagcagagagcaattggacttactgttgcgccgccagctgagtcgggaacgcctggaggaggcgccagctcccgtgctgagacctctcagccgtcctggcagccaggaatgcatggatgcagcgcccggacgcctggaacctaaagatcgcggctcaacgcttccacggaggcagcccccccgcgattatcccggggccatggcaggcagattcgggagcagagacgcactagatctcggggctcccagagaatggctgagtaccctgccccctccccggcgcacccgtgacctggaccctcagccaccaccgcttcctctgtcacctcaacgacagttgtcacgggaccccctcctaccatcaagaccgctcgactcgttgagcaggagcagtaacagcagggaacagctagatcaggtcccctccaggcacccttctagggaagctttaggccccctgcctcaactccttcgtgctagggaagatagtgtgtcaggcccttcacatgggccctccaccgagcaactcgatattcttagttcaatactcgccagcttcaacagcagtgctttatcaagcgttcagtcctctagcacgcctcttggaccacacaccaccgctacaccctccgcaaccgcctcagtgctcggcccctctactccgcggtccgccaccagccactctatatccgaactgtcaccagattccgaggtgccgcggtccgagggacactcttag

SEQ ID NO: 117584 - DNA, 9954 bp, Artificial Sequence
  derived and/or modified sequence
atgatggcccggcggcccccctggcggggcctgggcggccggagcacacctattctgctcttgctcttactatctttgtttcctctgtcccaggaggaacttgggggtggggggcaccaggggtgggatccgggattagctgcaaccactggtccaagggcccacattggcgggggcgcactagccctgtgtccagagagcagtggcgtaagagaggatggcggccccggtttaggtgtgagggagcccattttcgtgggacttcgtggtcgccgacagtcagcaaggaactccagagggcccccagagcagcctaacgaggagctcggaattgagcacggggtccagccgcttggctccagagaaagagaaacgggccaaggcccaggaagcgttttatactggcgcccagaggtgagttcatgcggcagaacagggccgttacagcgcggttcactgagccctggggcgttgagcagtggcgtacctggctccggaaacagcagtcctctccctagcgacttcttgattcggcaccacggacccaagccagtctcctcccagcggaacgcaggcaccgggtcaaggaaacgggtaggaaccgctaggtgttgtggagagctttgggccaccggtagcaagggacagggtgaaagagctacgacaagcggggctgagcgcacagcccctcggcgaaattgcctcccaggggcatctgggagcggtccggagctggattcggcacctagaacagcacgaacagccccagcttctggcagtgcaccccgggagagcagaacagccccagaacctgcccctaaaaggatgagatctcggggcctgtttcgctgccgctttctgccacagaggccgggtcctagacccccgggtttacctgcgagaccggaagcccgaaaggtcacaagcgcaaatagagcccgcttcaggcgggccgcgaacagacatcctcagtttccacagtacaattatcagaccctggtccccgagaatgaagccgcagggacagctgtcctacgggtagtggcccaggatccagatgcaggcgaggccggtagactagtatattctctcgctgcactgatgaactcccggtctcttgagctgttcagtatcgaccctcagagcggattgatcagaactgcggccgcattagatcgcgagtcaatggagagacattacttacgcgtgacagcgcaggatcatggtagtccacgtctctctgctactacaatggttgccgtaaccgtggctgatcggaacgaccactccccggtgtttgagcaggctcagtaccgggagacactcagggagaacgtggaggaaggctaccccatccttcaattgagagctactgacggagacgcccctcctaacgctaaccttcgctataggttcgttggtcctcccgccgcccgagccgcggcggccgctgcattcgaaatagacccccgctcgggcctgatttctacatctggccgcgttgatagagaacacatggaaagctatgagctggtggtggaggcttctgatcaagggcaggaacctggcccccggagcgccacggtgagagtgcatataaccgtgctagatgaaaatgacaacgccccgcagttttctgaaaaacggtatgttgcccaggtgcgagaagacgttagaccacatacagtagtgctgcgcgtgacggcaaccgacagagataaggacgccaatgggctagtccattacaacatcatatctggaaacagcagaggccatttcgccatcgattctcttaccggggagatccaggtggtcgcacctttggattttgaagccgaacgggagtatgctctcaggattcgcgctcaagacgcagggcgacccccactttcaaacaataccggactggcttccatccaggtggtggacatcaatgatcacatccccatctttgtatcaacgcctttccaggtaagcgtcttagaaaatgcgccccttggccactccgtaattcacatccaggccgtggatgccgaccatggagagaacgcacggctggaatattctctgaccggcgtggcccccgatacccctttcgtgatcaatagtgccaccggctgggtttctgtgagcggaccactcgatagagagtccgtcgagcactatttctttggggtcgaggctcgcgatcatggatctccacctttgtctgcttctgctagtgtgacagtgacagttctggacgtcaatgacaatagacccgaatttaccatgaaagagtatcatttgaggctgaacgaggacgccgctgtcgggacctctgtggtatcagttaccgccgttgatagagatgccaattcagccatttcctaccagataaccggggggaacaccagaaatagatttgctatttctacgcagggcggtgttggccttgtgaccttagctttaccgctggactataagcaggagcggtacttcaaacttgtcctaacagctagtgatagagccctgcacgaccattgttatgttcatatcaatatcacagatgctaatacgcatcgcccagtgttccagagtgcccactacagcgtcagcgtcaacgaggatcggcccatggggtccacgatcgtggtcatctccgcgagcgacgacgacgtgggcgaaaatgctcgcatcacatacctgctcgaagacaatctcccccagtttcgcattgacgccgactccggggccataacccttcaggctcctttggactatgaggatcaagttacgtataccctcgccattactgccagggataatggtattccacaaaaggcagataccacgtacgtcgaagttatggtcaatgacgtgaatgacaacgctccacagtttgtcgctagccactacactggccttgtaagcgaggatgctccacctttcacttccgttcttcagatctccgcgacagatagagacgctcacgccaatggtcgtgtgcagtacacttttcagaatggggaagacggcgatggggactttaccatcgagcctacatcaggcatcgtcagaacagttaggcggctcgatagggaagccgtgtcagtgtacgaattgaccgcttatgcagtggaccgtggagtccctcccttgcgaacgcccgtgagcatccaggttatggtacaggatgtgaatgacaatgcacctgtcttcccagccgaggaattcgaagtacgggtgaaggaaaatagtatagtaggctcagttgttgctcagattaccgccgttgaccctgatgaggggcctaatgctcatatcatgtatcaaatcgtggagggtaacatccctgaattgtttcagatggacattttctcgggtgaactgacagctttaattgacctggactacgaggcacgccaggaatatgtcattgtggtgcaggccacaagcgctccccttgtgtcgcgggccacggtccacgtgcggctggtggaccagaacgacaatagccctgtgctgaataacttccagattttgtttaataattatgtgagcaacaggagcgacacgtttccatctgggattattggcaggataccagcatacgacccggacgtaagtgaccacctgttttactcattcgagagggggaatgagctgcagctactggtagtgaaccagacctccggagaactccgactgtcacggaagctggacaacaaccggccccttgtcgcaagcatgctggtcaccgtgaccgacgggctgcacagtgtcactgcacaatgtgtgctgcgtgtggtcataataactgaggagctgctcgcaaactccctcactgtgcggctggagaacatgtggcaggagagattcctgtctccccttctgggtcggttcctcgagggggtcgcagctgtcctagctaccccagccgaagatgtcttcatatttaatatccagaatgacactgacgtcggcgggacggtgctcaacgtgagcttttcagctctagccccccggggcgccggagcaggggctgccggaccatggttctcctccgaggaattacaagagcaactgtacgtgcgccgtgccgctctggctgccagaagtctgctggatgtgttgccgttcgatgataatgtctgtctgcgtgagccatgcgaaaattacatgaagtgcgtcagtgttcttcgcttcgatagcagcgcaccattcttggccagcgcttccacactttttcggcctatacaacctattgccggtctgcgatgcagatgtccccctggctttaccggtgacttctgtgagactgaactggatctgtgctactcgaacccatgtagaaacggcggcgcttgtgctcggagagagggaggttatacatgcgtctgtcggcctaggtttaccggtgaggattgtgagttggacaccgaggcgggacggtgcgtaccgggggtctgccgcaacggcggaacttgcaccgacgcccccaatggcggattcagatgtcaatgtccagctggcggggcattcgaaggtccacgatgtgaggtagccgcaaggagcttccctcctagctcctttgtgatgttccgtgggctgcggcaaaggtttcatctgactctgtcactgagctttgccaccgtacagcagtccggcctgcttttttacaacgggcggctcaacgagaagcacgatttccttgctctcgagctggttgctgggcaagtgcggttgacttactctacaggcgaaagcaatacagtcgtcagtcccaccgtgcccgggggcctcagcgatgggcaatggcatacggtgcacctgcgctactataacaaaccacgtaccgacgctctcgggggcgctcagggcccctccaaagacaaagtggcagtgctcagcgtggacgattgcgacgtagcggtggccctgcagttcggcgcggaaattggaaactactcctgcgcagctgcaggggttcaaactagttccaagaagagcttggacttaacaggtccactcctgctgggaggtgtccctaatctgccggaaaattttcctgttagccataaagatttcattgggtgcatgagggatcttcacatcgatggacggagagtggacatggcggcatttgttgctaacaacggtaccatggcgggttgccaggcgaaattgcacttctgcgattccggaccttgtaaaaattccggcttctgttctgaacgctggggttccttctcatgcgattgccccgtaggtttcgggggaaaggattgtcagcttacaatggctcaccctcatcactttcgggggaatggcacacttagttggaatttcggaagtgacatggctgtatcggtaccatggtacttgggactagcgtttagaaccagagcgactcagggggtcctgatgcaggtacaggctgggccacatagtactctgttgtgccagctggacaggggcctgctgagtgttaccgtaacaagaggatccgggcgagcctcacatcttttactggatcaggtaaccgtttctgatggcagatggcacgatttgcgtcttgagctgcaggaagaacctgggggccgacgtggacaccatgtattgatggtgtcgctggatttttctctgttccaggacaccatggcagtcggctcagaacttcagggactcaaggtgaaacagttgcacgtcggagggttacctcctgggagtgcggaggaagcgccccagggcttggttggttgcatccaaggcgtttggctcggctcgaccccttctggcagccccgcacttctcccgccaagtcacagggttaacgccgagcctgggtgcgtggttaccaatgcttgcgcaagtggtccatgtcccccacatgccgactgccgcgacctttggcaaaccttcagttgtacatgtcagcctggttattatggccctggatgtgtggatgcctgcctcctgaacccatgccagaatcaaggcagttgccggcatctgccaggcgcgccccacggatacacttgcgactgtgttggcggatactttggacaccattgtgagcaccggatggaccagcagtgcccccgagggtggtgggggtctccaacctgcggcccatgtaattgcgatgtccataagggcttcgacccgaactgtaacaagaccaacggccaatgccactgtaaggagtttcactaccgtcctcgggggtccgactcctgtctaccctgtgactgttatcccgtcggttccacctctagaagctgtgctcctcactctggacaatgtccttgtagacctggcgctctgggaaggcagtgcaattcttgcgactcgccatttgcagaagtgacggcctctgggtgtcgggtactatatgacgcttgtcctaagagcttgcgtagcggtgtgtggtggccccagacaaaattcggggttcttgctaccgttccgtgccccaggggtgccctaggcctcaggggggccggtgcagccgttagactgtgcgacgaggcacaagggtggctcgaacccgacctctttaactgcacaagccctgccttcagagaactttcactactgctcgacgggctcgagcttaacaagacagccctggatacaatggaagccaagaaattggcacaacggctgagggaagtgaccggccatacggatcattacttctcgcaggatgtgagagttaccgcccgtttgctagcacatctgctggctttcgaaagccaccagcaaggctttgggctgaccgcgacacaggatgctcattttaatgagaatctgttatgggccggaagtgccctactagcacccgaaaccggcgacctgtgggccgcgctcggccagcgagcccccggcgggtcacctggtagcgccgggcttgtacggcatctagaagagtatgcggcgactttggcacggaatatggaattaacctacctgaatcccatgggactggtgaccccaaacatcatgctttcaattgaccgcatggagcaccctagtagcccccgcggcgctcgaagatacccaagatatcactccaatttgttcagaggacaggacgcttgggacccccatactcacgtcctgttgccgagccagagcccacgtccttcccccagcgaggtgctccccacaagtagttcgatcgaaaattctacaacaagttccgtggtgccccctcctgctcctccagaaccagaaccaggaatcagcattattatcctcttagtgtaccggacactgggaggtctcttaccggcacaatttcaggctgagagacgaggtgcaagactgcctcagaaccctgtgatgaactccccggtggtatcagttgcggtgttccacggccgcaatttcttacgcggcattctcgagtccccgatttccctggagttcagactcctacagacagccaacaggagcaaggctatctgcgtacagtgggatcccccgggactggccgagcagcacggagtctggaccgcccgcgactgcgaattggtgcaccgtaatggaagccacgctaggtgccgatgcagccgaactgggactttcggtgtcttaatggacgcctcaccacgggagcgacttgagggcgatctagagttgctcgcggtgttcactcacgtggtagtggcagtatccgttgccgccctggtgttgaccgccgcaatcctgctgagcctcagatcactgaagtcaaatgtaaggggtatccatgcgaacgtggctgcagctcttggtgtagctgagctgctgttcctcctgggcattcataggacacataaccaactcgtgtgcaccgctgtcgctatcctcctccattatttttttttgtccacttttgcatggctgtttgtccagggactgcacctataccgtatgcaagtggagcccagaaatgtggatagaggtgcaatgcgcttctaccatgccctgggatggggggtgccagcggtgctcctcgggcttgctgtaggcctggatcccgaaggatacggcaaccccgatttctgctggattagcgttcacgaacccctgatttggagcttcgccggacctgtggtccttgtcatcgtcatgaacggaacaatgtttctcctggcagccaggacttcatgctccacaggtcagcgtgaggcgaagaagactagcgctctgaccttgcgctcgtcctttctgctgctcctgctcgtctccgcaagctggctgttcgggctattagcggtgaatcacagcattctcgcctttcactatctgcacgcaggtctatgtggactgcaggggctcgctgtactgttgcttttttgcgtcctcaatgccgatgctcgtgcagcttggatgcccgcctgcctaggcagaaaagccgctccagaagaggctcgtccagcccctggcctgggccccggagcctataacaatacagctctcttcgaagagtccggtctcattcgtatcacactgggtgcatcgaccgtcagcagcgtgtcatccgcgcgcagcggacgaacccaggaccaggactcacaaagagggcgatcctacctcagggataatgtattagtgcggcacggcagtgccgccgaccacacggatcatagcctacaggcccatgccgggccaacagatctcgacgtggctatgtttcatcgggatgctggcgctgactcagatagtgactcggatctgtcactggaagaggaacgatccttatccattcccagctcagaaagtgaggataacgggagaaccaggggaaggtttcagcgcccactatgcagggcagcccagagcgaacggcttctcactcaccctaaggacgtggatggaaatgatttacttagttattggcctgccctgggggaatgcgaggctgctccgtgcgctcttcagacttggggcagcgagcgacgtctcggtctggatacatccaaggatgccgccaacaataaccaaccggaccccgccctgacaagtggtgatgaaacctctttggggcgggcccaaagacagcggaagggaattttaaagaacaggctccaatatccactcgtgcctcagacccgaggcgccccggagctgagttggtgccgtgcggccacccttggacatcgcgctgtgccagctgcctcatacggccgaatctacgccggggggggcaccggaagtttaagccagcccgccagtagatactcctcacgggagcagctggaccttctgctgcggagacagctctctagagaacgccttgaggaagcgcccgctcccgtacttaggcccctgtcccgccctggcagccaggaatgtatggatgccgccccggggcggctggagccgaaggacagaggttcaactctccctagacggcagccaccccgagactatcctggcgccatggccgggcggttcgggtcaagagacgctctggatctaggagccccacgggaatggctgtccacccttccgccccccagaaggacccgggaccttgatcctcagccaccccccctccctctgtctccacaaagacagctgagccgcgatcctttgctgccgtcacgacccttggatagcctgtccagaagttcaaactcgcgggaacaattggaccaagtgccaagtcgtcaccccagccgggaggcactcggccctctgccacagctcctgagggctagagaagatagcgtatcggggcctagccatggtccttctaccgagcagctcgatattctgagtagcatccttgcctccttcaactctagcgcactctctagtgtgcagtctagctccacgcccctggggccccacacaactgctacgccttccgctacagcatcggtactcggcccttccaccccaagatccgctaccagccactctattagcgaattaagccctgattctgaagtgccacgaagcgaggggcactcatag

SEQ ID NO: 117585 - DNA, 9939 bp, Artificial Sequence
  derived and/or modified sequence
atgatggccaggagacctccatggagaggcctcgggggacgttcaacacctatcttgctgttgcttctcttgtcgctgttcccattaagccaggaagagctggggggaggcggacatcaggggtgggatcctgggctcgccgcaacaacaggacctagggcccacataggcggaggcgcactggccctatgcccagagagctcaggcgtacgggaggatggtggacctggcttgggcgttagagagccaatatttgtaggcttgcgtggcagaagacagagtgcccgaaactcaaggggcccacccgagcagcctaatgaggaattaggcatcgaacacggggtgcagcccctggggagccgggaaagggagaccggccagggtcccggttctgtactttactggcgcccagaggtgtctagctgtggcaggacaggacctttgcagcgaggcagcttaagtcctggagctttaagtagtggcgttcctgggagtggaaactcctccccacttcccagcgatttcctgattagacaccatggacccaaaccagtgagcagtcagcgcaacgcagggacgggatccagaaaaagggtaggtacagctagatgctgcggggaactctgggccaccgggtccaagggacagggggaacgggcaaccacaagcggcgcagagcggaccgcaccacggcgtaattgtctgcccggagcctctgggtctggccctgagctcgacagcgctcctagaactgctaggacggcacctgcctccggatctgcccctcgcgagtcgcggacagcacctgagcctgcccctaagagaatgagaagcaggggcctctttcggtgtaggtttttacctcagcggccagggcctcgccctccaggtttgcctgccaggccagaggctcggaaagtgacttccgcaaatagagcacggttcagacgggcagcgaaccgacatccacaatttccacaatataactaccagaccctggtgcctgaaaacgaggccgctgggacggccgtcttgcgagtcgtggctcaggaccccgatgctggcgaagccggtcgactggtgtactccctggccgcactaatgaactccaggtctctggaactgttcagcatagacccacagagtggtctcatcagaaccgcagcggcactcgatagggagtccatggaaagacattatcttcgggtcaccgcacaggaccacgggtcccctcgattgtccgccactacgatggtcgccgtgacagtggccgatcgcaatgatcattcacctgttttcgaacaggcccagtaccgagaaactctcagagaaaacgtggaagaaggctatcccattttacaacttcgggcaacggatggtgatgcaccacctaacgccaatttgcggtaccggtttgtaggcccacctgccgcacgcgctgccgcagccgcagcatttgagatagacccgaggtctggcctcatttccactagcggccgagtggaccgggagcacatggagtcgtatgagctcgtcgttgaagcctcggatcaggggcaggaacccggtcccaggtccgccactgttagggtgcacatcacggtgttagacgaaaacgataacgcccctcagtttagtgaaaagagatatgttgcccaggttagggaggatgtgaggcctcacacagtggtgctacgcgtaaccgccaccgatcgggacaaagatgcaaatggcctagtccactacaatattatcagtggaaacagtcgtggccactttgctatcgacagcctcactggagaaatccaggtggtggcaccactcgattttgaggctgagagagagtatgcccttcgtattagggctcaggacgcaggcagaccgccactgagcaacaatacaggccttgcgtcaattcaggtcgtggacattaatgaccatattcctatattcgtcagtacaccatttcaggtcagcgtgctcgaaaacgcaccgctcgggcattcagtgatccacatccaggccgttgatgccgatcatggcgaaaatgctcgtttggaatactcactgacgggggtggcgccagatacaccgttcgtcatcaactccgccactggctgggtgagtgtgagtggacccctggaccgcgagtcagtcgaacactacttttttggagtggaggccagagaccatggatcgccccctctgtctgccagcgcctccgtgactgtgactgtactggacgtgaacgacaatagacccgaattcaccatgaaggaataccatcttagactgaacgaggacgccgcagtgggcacttctgtcgtgtcagtcacagcggtggatagagacgcaaactccgctataagctaccagatcactggcggaaacacccggaatcgatttgctatttcgacccaaggtggcgtggggctagtcacacttgccctgccactggactacaaacaagagaggtactttaagctcgtgctcactgcctctgatcgcgcactgcatgatcattgttacgttcacatcaatattactgacgcgaacacccaccgaccagtcttccagtcagcgcactatagtgtgagcgtcaacgaagatcggcctatgggatctacaatcgttgtaatctctgcaagcgacgacgacgtgggggaaaatgccagaattacctatctgcttgaggataatttacctcagtttagaattgacgctgatagcggcgcaataactctccaggccccactcgactatgaggaccaggtgacttacacgctcgcgatcaccgccagggacaacggcataccccagaaagccgatacgacgtacgtagaagtgatggttaatgacgtgaatgacaatgcaccacaatttgtcgccagccactataccggactggtcagcgaagacgccccaccttttactagcgtgctgcagatctctgcaaccgacagagacgcccacgccaatggtagggtacagtacaccttccagaatggagaggacggggacggcgactttactattgagccgacatcagggatcgtgagaactgtgcggcgtctggacagagaagctgttagtgtgtacgagctgactgcatacgctgtggatcgaggcgtgccgccactgagaaccccagtgagtatccaggtcatggtgcaggacgtgaatgataatgcacccgtgttccccgcagaggaattcgaggtaagggtcaaggaaaacagtatcgtgggttctgtggtggcgcagatcaccgcagtggatccagacgagggtccaaacgctcacataatgtaccagatcgtagaaggaaatatacccgagctgttccagatggatattttttccggtgagctcaccgcattgatcgatctcgactatgaagccagacaggaatatgtgattgtggtccaggctacttcagcaccactggtgagccgagccaccgtccatgttagactcgtggatcagaatgacaattctccagttctgaacaattttcagatcctgtttaacaattacgtgtccaaccgttcagatacctttccatccggaataattggacgtatacctgcatatgacccagacgtttcggatcacctgttctacagcttcgaaagaggtaacgagcttcagctgctggtagtgaaccagacttctggcgagctccggttatctcggaagctggataacaatcgccctctggtggctagtatgttggtgaccgtaacagatggactgcactccgtgactgcgcaatgcgtgctgagggtcgtgattatcaccgaagagctgttagctaatagcctgaccgtccggctcgagaacatgtggcaggagcgtttccttagtcccctgcttggacgcttcctggagggcgtggcagcagtgctggccaccccggctgaggacgtgttcattttcaacatccaaaatgacactgacgtgggagggactgtgctgaacgtctccttttcagctttagctcccaggggcgctggagcaggtgctgctggcccttggttcagctccgaggaactgcaagagcagctgtatgttcgaagggccgctctcgccgcacgcagcctgttggacgtgctcccctttgacgacaatgtttgtcttcgcgagccttgtgaaaactatatgaagtgcgtgagtgtgcttcggttcgactcttcagctccttttttagcgtccgcatccaccctgttcagacctattcagcctattgcagggcttcggtgtcggtgccctcctggattcacaggtgacttctgtgaaaccgagcttgatctgtgttactccaacccttgccggaacggaggcgcatgtgcaaggcgcgagggcggatacacttgtgtgtgccgccctcgtttcacaggagaggactgtgaactcgataccgaagccggaagatgcgttcccggtgtttgtagaaatgggggaacctgtaccgatgccccaaacgggggtttcaggtgccagtgccccgctggcggtgcctttgagggtccacgttgcgaagtggcggcacgttccttccccccatcctccttcgtaatgtttaggggacttagacagcggtttcacctgaccttgtcgttatccttcgcgactgtgcaacaatcagggctgctgttctacaatgggaggttgaacgagaagcacgatttcctggccctagaactcgtcgctggtcaggttaggctgacttatagcactggcgaatcaaatacggtggtttccccaacggttccaggcggactctccgatggccagtggcataccgtgcacctgcgatactataataaacctagaacagacgctctgggaggagcccagggcccttctaaggacaaggtagcggtcctctctgttgacgattgtgatgtggccgtcgcattgcaattcggtgcggaaatcgggaactactcttgcgctgctgcgggtgtgcaaacctccagtaagaaatctctagaccttactggcccacttctcctcggtggcgttcccaacctacccgaaaactttccggtgtctcacaaggactttatcgggtgtatgagagacttgcacatcgatgggagacgcgtcgatatggccgctttcgtcgccaacaacgggaccatggctggttgtcaggcgaaactccatttttgcgatagtgggccatgtaagaactctggattctgtagtgaacgctggggctctttctcatgtgactgtcctgtgggctttggcggaaaggattgtcagttaacaatggctcacccccatcatttccgtggaaacggaaccctttcatggaattttgggagtgatatggctgtcagtgtaccctggtatctcggtctggcatttagaactcgggctacccaaggcgtgctcatgcaggtgcaggctggaccccacagtaccctgttgtgccagctcgatcgcggtctgttatcagtaacagtgacaaggggtagcggaagagccagtcatctccttctagatcaagttacagtgtccgacgggagatggcacgacctccgcttggaactccaggaagagccgggtgggaggcgcggacatcacgttcttatggtctctctggacttttccctatttcaggatacgatggcagtcggatctgaactccagggcttgaaagtgaagcagctgcacgtgggagggctgcccccagggagcgctgaggaggccccacagggcctcgtgggctgcatacagggagtttggttaggatctaccccgagtgggagcccggctctcctgccgccatcccatcgagtaaacgccgaaccaggctgtgtggtaaccaatgcctgcgcttctggaccttgtcctccacacgcggattgtagggacctgtggcagacattctcctgcacttgtcagcccggatattacgggcctggctgcgtggatgcgtgcctgctgaacccctgtcaaaaccaaggcagctgtaggcacctccccggtgccccacacggatatacctgtgactgcgttggcggatacttcggacaccattgcgaacatcggatggaccagcagtgcccccgaggctggtggggcagtcccacctgcggcccttgtaattgtgacgtacacaaagggtttgacccgaactgcaacaagacgaatggccagtgtcactgcaaggagtttcattacaggcccaggggctcagattcctgtctaccttgcgattgctaccctgtggggtctacctctagatcctgtgcacctcactcggggcagtgcccttgtaggccgggtgccttgggacgccagtgcaacagctgtgacagcccatttgcggaggtgactgcctctgggtgccgggtgctgtacgatgcctgtcctaaatccttaagaagtggagtatggtggccgcaaaccaaattcggcgttctcgctactgtcccttgtccaaggggcgcactgggggcagccgtgaggctgtgcgacgaagcccaggggtggttggagccagacttatttaattgtacctcccccgcattccgtgagttaagcctgctgctcgatggcctggagctgaacaaaaccgctctcgatacaatggaggcaaagaagttggctcagaggctgcgggaagtgactgggcacacggaccactacttcagccaggacgtgcgcgtgaccgccaggttgctcgcccacttgctggccttcgaaagccatcagcagggattcggtctgaccgcaactcaggacgcccactttaacgagaacctgctctgggctggttctgccctgctggcccctgaaaccggcgacctgtgggctgctcttggacagagggctcccggagggtcgcccggtagtgcagggttagtgagacatttagaagagtacgctgctacactcgccagaaacatggaactgacgtatctgaaccccatggggttagttacaccaaacatcatgctgagcatcgatcgcatggagcacccttccagtcctagaggtgctcgtcgctatccaaggtaccactccaatctattcagggggcaagacgcctgggaccctcatacccacgttctgctcccctcccagagccctaggccctcgccctcggaagttttgccaacttcctctagcattgagaacagcactacttccagtgttgttccaccccctgcccctccagaacctgagccgggaatctccatcatcattctactggtgtaccgtacactgggaggtctgctacctgcccagttccaagccgagcgcaggggcgcacgcctccctcaaaatcccgtgatgaattctcccgtggttagtgtggccgtattccacgggagaaactttctgcggggaatcttagagagcccaatttctttggagtttcggctgttgcagacagctaatcgctccaaggcgatttgcgttcagtgggatcctccagggctcgccgagcagcacggggtctggaccgctcgggattgtgaactcgtacacaggaacggctctcacgcaaggtgtcggtgttcacggacgggcacttttggagtcctgatggatgccagtcctcgcgagcgcctggaaggcgatcttgagctcttggcggtcttcactcatgtcgtggttgccgtatcagtggcagccttggtgctgaccgcagctatcctgctgtctctgcgctccctcaaaagtaacgtgcgcggtattcatgccaatgttgcagccgcactgggcgtcgccgagctcctatttttgctggggattcaccgaacccacaaccagctggtatgcaccgcggttgccatcttgcttcactacttttttctctccaccttcgcctggctattcgttcagggtttacacctgtatcgtatgcaagtggaacctcgtaatgtggatcggggagccatgagattttaccatgccctcggttggggagtgcccgctgtgcttctaggccttgccgtggggttggatccagaaggctacgggaaccccgacttttgttggattagcgtgcatgaacccctgatctggagctttgcagggcctgtggtgctggtgatcgttatgaatggcaccatgttcctgttggccgctaggaccagctgttccactggtcagcgcgaagcgaaaaagacttctgctctcacactccggagtagttttctattgctactgctggtctccgcctcttggttgttcggactcctcgccgtgaaccactcaatactagcattccactacttgcacgccggactgtgcgggctgcagggactggctgtgctgcttttgttttgtgtcttaaacgccgatgccagagcggcttggatgcccgcttgtcttggtcgaaaggctgcaccagaggaagcgagacccgctccgggtttaggccctggggcatataataacacagcactgtttgaggagagcgggttgatccggattactctgggtgcttcaactgtatccagcgtttcatctgcacggtcaggcagaacccaagatcaggattcacaaagaggtcgaagctatctgagggacaatgtgttagtacgccacgggtcagcagctgatcacactgatcatagcctacaggctcacgcaggccctactgatctcgacgtggccatgttccaccgtgatgccggtgccgatagtgactctgactctgatttaagcttggaggaagagcgcagtttgtcaataccgagttccgaatcggaggacaacggcagaaccagagggcgattccagagacctctttgccgagctgcacagagtgagcgactgctcacccatccaaaagatgtagacggaaacgatttactctcgtattggcccgctctcggcgagtgtgaagctgcaccctgcgccctgcagacgtggggaagcgaacgtcgcctcgggctcgacacttccaaggacgctgctaataacaatcaacctgacccggcattaacgtcaggcgacgaaacctccctgggaagggcccagcgacaacgcaaggggatcttgaagaatcgccttcagtaccctcttgtgccgcagactcgaggcgctccagagctatcctggtgccgagcagctactcttggtcatcgcgctgtgcccgcagcctcctatggcaggatctacgccggaggcggaacaggctctctgtcccagcctgccagcagatactctagccgcgagcaactggacctgctgttgcgacgccagttaagcagagagcgactggaggaggctcctgctcctgtgctgcggcctctgagccgccctggctcccaggagtgtatggacgcagcacctggacgcctcgagcctaaggatagaggctccaccctacctagacggcagccccctcgcgactatccaggagcaatggcaggcagattcgggtcgcgggacgctctggatctaggtgctccgcgtgagtggctgtccactctgccaccccctcgcagaacccgagatctggacccccagccacctcctctccctctgtcgcctcagcgtcagctctcccgggatccactgttaccaagcagacctcttgatagtttgtcccggagcagcaattccagggaacaacttgaccaggtgccgtcccggcatccctcccgcgaagcccttggccctctgcctcagctgctgcgggctcgggaagattccgtctctggcccatcacatggacccagcaccgagcagctcgacatactttcatcgatcctggcgtctttcaactcaagcgctctgtcgtccgtccagagctctagcacccccctgggcccacacacgacagcgactccaagcgcaaccgcgagcgtgttgggaccaagtacacccaggtccgctacatcacactcgatcagcgaactgtcacctgattcagaggtgcctcgctccgagggacacagctaa

SEQ ID NO: 117586 - DNA, 9954 bp, Artificial Sequence
  derived and/or modified sequence
atgatggcccgacgccctccttggcgcggacttggtggtcgttcgaccccgatcctgctgctccttctactctctttgtttccattgtctcaagaggaactggggggtggaggtcatcagggctgggatccaggactggcagcgaccaccggccctagggctcacatcgggggtggcgctctggcattatgccccgaaagctcgggcgtgagagaagacggagggcctggattgggcgtcagagagcctatatttgtcggccttcgcggaaggcggcagtccgcgagaaatagtcgaggtccacctgagcagccaaacgaagaattgggaattgaacatggggtgcagcctctgggctcacgcgagcgggagacagggcagggtccaggatccgtcttatactggcgtcctgaggtttcttcctgtggccgaactggacccctacagagaggcagtctgagccctggcgctctgtcttcaggcgtgcctggaagtggcaatagttcgcctttaccatccgacttcctgatcaggcaccacggtcctaaaccggtatctagccagagaaacgctggcaccggctcaaggaagcgggtaggcactgccaggtgttgtggtgaattgtgggcgacgggctcaaagggtcaaggcgaaagagctactacgtccggtgctgagcgcacagccccaagacgtaattgtttaccgggtgcctctggtagtggacccgagctggattccgccccacgcactgcacgcacggcccctgcgtctggcagcgcccctcgcgagtcacggacggccccagagccggcaccaaagaggatgcggagcaggggtctatttaggtgtcgttttctgcctcaaaggccaggccctcgtcctccaggcctgccggcacgtcctgaagctaggaaggtgacatcagccaatcgagcgagattcagacgtgctgctaatcgacacccgcagttcccacaatacaactaccaaaccctcgtgcccgaaaatgaggccgctggcacagccgtcctgcgtgttgtcgcgcaggatcctgatgcaggtgaagccggtcgactggtgtacagtctagctgctctgatgaactctcggtccctggagctcttcagcattgaccctcagtcgggcctgatcaggaccgccgcagccctcgatagggagtccatggagcgccactacttgcgagtaaccgcccaggatcacgggagcccaaggctgtccgccacaactatggtcgcagtcacagtcgcggaccgcaatgatcactcccctgtttttgaacaggcccagtaccgagaaacacttcgcgaaaatgtcgaggaggggtatcccatcttgcagctccgtgcgacagatggggacgcccctcccaacgccaatctaaggtaccgcttcgtgggccctccagccgcacgagccgctgccgctgctgcctttgaaatcgatcctcgtagcgggctcatctcaacctctggtagggtagatcgggagcacatggagtcatatgaactcgttgtagaggcatctgatcaggggcaggaacccggtcccagatcagcaacagtgagggtgcatattaccgtgctggatgagaatgataacgctccccagttcagcgaaaagcgatacgtggcccaagtgagggaggacgtcaggccccacaccgtggtgctgagagtgactgccaccgatagagataaggacgccaatggactcgtgcactacaacatcatatccggtaattccagaggccatttcgccattgattccctgaccggtgaaatccaggtggttgcacctctggacttcgaggccgaaagggagtatgctctgaggattcgggctcaggacgccggtagacctccactttctaacaataccggccttgcttccattcaggtggtcgacattaatgatcacatcccaatattcgtgtccaccccttttcaggtgtcagtcctggaaaatgcccctctaggccacagcgtgatccatatacaagcggtcgacgccgatcatggcgagaatgccaggcttgaatattccctgacgggggtggccccagatactccctttgtcattaattcagccactgggtgggtgagcgtaagcggcccactagaccgcgagtctgttgagcattatttttttggggtcgaggctagagatcacggttccccccctctttccgcctccgcaagcgttaccgtgaccgtactggacgtcaatgacaacaggccagagttcactatgaaagaatatcacttgaggctcaacgaagatgcagccgttggtactagcgtagtgagcgtcacagccgtggatagggacgcgaacagtgccatctcctaccaaataacagggggaaatacccgtaatcggttcgccatcagtacccaaggaggagttggactggtcaccctcgcacttcccctggattataagcaagagagatattttaagctggtgctgacagcctcggaccgtgcgctgcacgaccactgctacgtgcacatcaacatcacagacgctaacacgcacagaccagtatttcaatcagcgcattactccgtgtctgtcaatgaggacaggccgatgggaagcacaatagtggttatctcagcctctgacgacgatgtgggggagaatgcgcgaatcacatacctcttagaagataacctgccccagttccgcatagatgccgattctggagctattaccctgcaggcccctctcgattacgaggatcaggttacatacaccctcgccatcaccgctcgcgacaatgggataccacagaaggccgatacgacctacgtggaggttatggtgaacgacgtgaacgacaacgccccacagttcgttgcctctcattacaccggcctggttagcgaagatgctccgcctttcacatctgtgctgcagatcagtgctactgaccgggacgcccacgcaaacgggcgtgtgcagtatacctttcagaacggcgaggacggtgacggcgatttcacaatcgagccaaccagcgggatcgttcggacagtccggcgtctcgatagggaggccgtgagtgtttatgagttgacagcctatgccgtagaccgtggcgtgccccctttaaggaccccagtgtccatccaagtgatggttcaggacgtcaatgacaacgccccagtgttccccgcagaggagtttgaggtgcgggtgaaagaaaactctatagtggggagtgtagttgctcagattacagcggttgaccctgacgaagggccaaatgcacacatcatgtaccagatcgtggaggggaatattccagagttgttccagatggatatctttagcggcgaactcaccgccctcattgatctggattacgaagcacgccaagagtatgtaatcgtcgttcaggctactagtgctccactagtctctagagccaccgtgcacgtccggctggtcgaccaaaatgacaactcacctgtgctcaacaactttcagattctctttaacaattacgtctccaatagatctgacaccttccctagcggaatcattgggaggatccccgcatacgatcccgacgtcagcgaccacctcttctattcatttgagcgcggaaacgagctgcagctcctggtggtgaatcaaactagtggcgagctgcggttaagtcgtaaactcgacaacaatcgtccattggtagcatccatgctggtgacggtcacagatggattacattcagttaccgcccagtgtgtgcttcgcgtggtcatcattacggaagaactgctggccaattctctgaccgtccgcctggaaaacatgtggcaggagagatttctcagcccccttttgggaagatttcttgaaggagttgccgctgtactggctacccctgcagaagatgtgttcatttttaacattcaaaatgacaccgatgtcggaggcaccgtcctgaatgtgtccttcagtgcgcttgcccctagaggtgctggagccggagcagccggtccatggttcagcagtgaggagttgcaggaacagctgtatgttcgacgtgctgcacttgcggctagaagcctccttgatgtacttccatttgatgacaacgtttgcctgagggaaccctgcgagaattacatgaaatgtgtctccgtgttacggttcgactcatcagccccttttcttgctagcgccagcacactgtttcgtcctatccagccgatcgctggcctgcgttgtcgctgcccgccaggattcacgggagatttttgcgaaacggaactcgatttgtgctactctaacccttgcagaaacggtggcgcatgtgctcgcagggaaggcggatacacctgcgtctgcaggccaagatttacaggggaagactgtgaactcgataccgaggccggtaggtgcgttcccggtgtgtgccgcaatgggggtacttgcactgatgccccaaacggtggcttcagatgtcagtgccccgcagggggtgcttttgaaggccctcgctgcgaggtagctgctcgatcttttcctccgtcttcgttcgtgatgtttagggggttgcgccagcgctttcacctgactctctctctgagtttcgctacagtccagcagtcaggtctcctcttttacaatggacgcctgaatgaaaagcatgattttctggcactcgagctcgttgccggacaagttcgactcacctacagtacaggagaaagcaacactgttgtcagccctactgtgcctgggggtttaagtgatggccagtggcacacagtgcatctacgctattataacaaaccacgaactgacgcgctgggcggagctcaaggccctagtaaggataaggtcgctgtgctgtctgttgatgattgcgatgtggctgtggcccttcagttcggcgcagagattggtaattactcttgcgccgcagcaggagtgcagacaagttcaaagaagtccctcgatttaacaggccctctgctcctgggaggagtaccaaacctgcctgagaattttcccgtgtctcataaggatttcatcggatgcatgagggaccttcacattgacggtagaagagttgatatggctgctttcgtggcaaacaacggtactatggctggctgccaggccaagttgcatttttgtgactctgggccatgcaagaacagcggattctgtagcgagaggtggggaagcttttcttgtgattgccccgtcggttttgggggaaaggattgccagttgactatggcacacccccatcatttccggggaaatggaaccttatcctggaatttcgggtcagatatggccgtgtctgtcccatggtatcttggcttggcttttagaacccgtgctacacagggggtcttaatgcaagtccaagccggtcctcattccactttactatgccagctggataggggtctgctgagcgtcacagtgactcgtggttcaggacgagcatcacacttgctgctggaccaggtgactgtaagcgacggcaggtggcacgacttgaggctggaacttcaggaagagcccggtggccgtcgtggacaccacgtgcttatggttagcttagacttttccctcttccaggatactatggcggtcgggtcggagcttcagggactcaaggtcaagcagcttcacgtgggcggactgccacccggttcggctgaagaggccccacaggggttggtgggttgtatccagggtgtctggctcgggtcgacaccttcgggatctcctgccctcctacccccatcccaccgcgtaaacgcagagccaggttgtgtggtgacgaacgcgtgtgccagtgggccatgcccgccacacgctgattgccgagacctttggcagacattcagttgcacctgccagccaggatactatggcccaggttgcgtggatgcctgcttactgaacccctgccagaaccaaggatcctgcagacacctgcccggtgcaccacacggatacacttgcgactgcgtcggtggttatttcggtcaccactgcgagcatcggatggatcagcaatgccctaggggatggtgggggtctccaacatgtggcccttgtaactgtgacgtgcataagggattcgatcccaactgtaataagacgaatggtcaatgccattgtaaggaatttcactaccgtccaaggggttccgactcctgcctcccgtgtgattgttatcctgtggggtctacctccagaagctgcgcccctcactctggacagtgtccttgcagacccggagctttaggccgtcagtgcaactcatgtgactcaccctttgctgaagttaccgcatcaggatgtcgagtgctgtatgatgcctgcccaaaaagtttgaggtcgggcgtgtggtggccccagactaagtttggcgttctggctactgtcccttgtcccaggggtgccttgggtcttcgcggagctggtgctgccgtgagactatgcgatgaggcacaggggtggctggaaccagacctgttcaattgcactagccctgccttcagagagctctcccttctgttagacggtcttgaactgaacaaaacagcgctagataccatggaagctaagaaactggcacagaggctccgcgaagtgacggggcatacagatcattacttctctcaggacgtgcgcgtcaccgcgcgattgctcgcacacctcctggcctttgaatctcaccagcaagggttcggcttaacggcaactcaggacgctcacttcaacgaaaacctcttatgggctggtagcgccctcctcgcacccgagacgggggacctgtgggccgctcttggccagagagcccctggagggtcaccagggtcggcagggctagtacggcacctggaagaatacgccgcaacgctcgccagaaacatggaactgacatacttgaacccaatgggtctggttacccccaacattatgctgagcatcgacaggatggagcacccctccagccctcgcggagctagaaggtatccacgctatcactctaacctctttcgaggacaggacgcctgggatcctcatacccatgtgttactgccttcccagtcccccaggcctagcccaagcgaggtgcttcctacctcctcctctatcgagaactctaccacaagttctgtagtccctccaccggcacctcccgagccggaacctggcatcagtatcatcattctgctggtgtacagaaccctgggtggattactcccagcccagtttcaagctgaacgcagaggcgctcgactccctcagaaccccgttatgaactcccccgtagtgtctgttgccgtgtttcatggcaggaattttctgcgcggaattctggaatcaccaatttcactcgagtttagattactgcagactgccaacaggtccaaagccatatgtgttcagtgggacccccctgggctggcagagcaacacggggtgtggactgcacgggattgtgagttggtgcataggaacggctcccatgccaggtgtagatgttctcggaccggcacattcggcgtgctgatggacgccagtcccagagagagactggagggggatctcgagctcctcgccgtattcacccacgtcgtggtcgcagtgtctgtggctgccctcgtcctcaccgccgcaatcctcctctctctccgaagcctgaagagcaacgtgcgaggcatccacgccaatgtggccgcagccctgggtgtggccgagctgctttttcttctggggattcatagaactcacaatcagctcgtgtgcacagcagttgctattttgcttcactactttttcctgtcaactttcgcctggttgttcgtgcaaggcctgcacctgtaccgtatgcaggtggaacccaggaacgtggacagaggagcaatgaggttttaccacgcccttgggtggggagtgccggcagtactgttaggccttgctgtcggcttggaccctgaaggctacggaaaccctgacttctgctggatcagcgtccacgagcccctcatctggtcatttgcaggccctgtagtcttggtgatagtgatgaacgggacgatgttcctgctggctgcccgaacaagctgctcaaccggccagagagaggcgaaaaagacctccgccctgaccctccgcagctccttcttgctgctgctgttagtgagcgcgtcctggttgtttggtctactcgcagtaaaccatagcatactcgccttccactatcttcacgctggcctgtgtgggctacaagggctggctgtccttctgttattctgcgtgctgaacgctgatgctagagcggcttggatgcctgcatgcctggggagaaaggcagcccctgaggaagcaaggccagccccagggctgggaccgggtgcatacaacaacacagccctgtttgaggagtcaggcttaatacggattactctcggagcctcaactgtgtccagtgtgagtagtgccagaagtgggagaacccaggaccaggattctcagcggggaaggtcatacctccgggataatgtcctcgtacgtcacggctccgccgcagatcacacagaccactcgcttcaagcccacgcgggacccacagacttggatgtggctatgtttcatcgggatgctggagctgacagcgattctgacagtgacctgtcactcgaggaagagcgctccctgtctattcccagcagtgagagcgaagataatgggaggacccggggacggttccaaagaccgctctgtcgagcagcacaaagcgaaagactgctaacgcacccaaaagatgtggatggaaacgacctacttagctattggcccgcattaggagagtgcgaagcagccccatgcgctctgcagacctggggcagcgaacgcagactgggccttgatacgagtaaagatgccgctaacaataatcagcctgatccggcattgacatccggggacgaaaccagcttaggcagagcccaaaggcagcgtaaagggattctgaaaaatcgcctgcagtaccccttggtaccccagacaaggggcgctcccgaactcagctggtgccgcgcagcaacattgggccaccgggctgtccccgctgcctcttacggcaggatctacgctggcggtgggaccggatccttgagtcagcccgctagcaggtatagctccagggagcagttagacctattacttaggaggcagttgagtcgagagcgacttgaagaggccccagcacccgtgttgcgccctctgagccggcctggtagccaagagtgcatggatgcggctcccggtcgacttgagccaaaggaccggggaagtacactgccgaggcggcagcccccaagggattaccctggagcgatggcgggtaggttcgggtctagagacgcacttgaccttggagccccacgcgagtggctgagcactttgcctccgccacgaagaacaagggacttggacccacagccccctcctctcccgttgtcccctcagaggcagctaagtcgcgacccccttctgccaagtcgacctttggactccctctctcgtagttccaattctcgagaacaactggaccaggtgccatcacggcatccctcgagggaagcgctaggtcctcttccccagctgctaagagcgcgtgaggattccgtctctggaccctcacatggccctagtacagagcaactggacattctttccagcattctagccagcttcaacagcagtgccctgagctcagtgcagtcctctagtactccccttggccctcacactactgccacacctagtgcaacggccagtgtgctgggcccatccacacctcgttctgcgacaagccacagcatatccgagttatccccagatagcgaggtccccagatcggagggccactcataa

SEQ ID NO: 117587 - DNA, 9939 bp, Artificial Sequence
  derived and/or modified sequence
atgatggcgcggaggcccccttggagggggctcggcggcaggtccaccccaatcctgctgctcttgctgctgtccctgttccctttgtctcaagaagaactgggcggcggaggacaccagggttgggatccaggactggccgcaactaccgggcctagggcgcacatcgggggtggggcactcgcactgtgccccgaaagctcaggtgttagggaagatggcggtccagggctcggagtcagggagcccatctttgtgggactgaggggaaggagacagagcgcaagaaatagtcgtgggccaccagaacagcccaatgaagaactaggaatcgaacatggtgtccaacccctcggctctcgggagcgcgaaacaggacaaggacccggaagcgtgctctactggcggccagaggtctcgtcttgtggcagaactggccctctacagcgaggaagcttaagccctggcgccctctcctctggcgtccccggctcaggtaatagttcccccctaccctcagatttcctgattcgccatcacggacccaagcctgtcagcagccagaggaatgctggaacgggatcacgcaagagagtcggaaccgctcgctgttgcggtgaactgtgggcaaccggttccaagggccaaggcgaaagagcaacaacctcaggggccgaaaggactgctccacggcggaattgcctgcccggcgcatctggctcaggacctgaactggattccgcacctcgcactgctcggaccgccccagcctccggctctgcacccagggaatctcgaacggctcccgaacctgccccaaaacggatgaggtcacgtggcctgttccgctgtaggttcctgccgcagcggcctggaccccgccctcccggattgcccgctcggccagaggcccgaaaagtgacatctgccaatagggctagattcagacgggcagcgaacagacaccctcagttccctcagtacaattaccagacactggtcccggaaaacgaagccgccggaactgccgtgctcagagttgttgctcaggatccagacgctggtgaagccggtagattagtctattccctggctgcactcatgaactcccggagtctggaactgttttcaatagacccccagtctggactgatcagaaccgcagctgccctggacagagagagcatggaacgccactatcttagagtgacggcgcaagatcacggatctcccaggctgtccgccaccaccatggtcgcagtgacggttgccgatcggaatgatcatagtccggttttcgagcaggctcaataccgagaaactctgagagaaaacgtggaggaaggatatccgatcctacagctcagagctactgacggtgacgcacctccaaacgctaatctgaggtaccggtttgtgggaccccctgcagccagagctgcagctgccgcagcatttgaaatcgacccgcgtagtggattgataagtaccagcgggcgggtcgaccgtgaacacatggagagttacgagcttgtcgttgaggcttctgatcagggccaggaacccgggcctcgttcagccacagttcgggtccacatcacggttttggatgagaacgataatgccccacagttcagcgaaaagcgctatgtcgcacaggtccgggaggacgtccggccccacacagtcgtgttgcgcgtgaccgccaccgacagagacaaggatgccaacgggcttgtgcattacaacattatctcagggaactctcgtggccactttgccatcgactccctgaccggcgagattcaggtggttgctcccctggatttcgaggcagaacgtgagtacgcactgcgtatacgggcccaggacgccgggaggccacctctgagcaataacacaggcctggcttctatacaggtcgtagacatcaatgaccacatccctatctttgtttctactccattccaggttagcgtcctggaaaacgctcctctggggcatagcgtgattcacatacaggctgtcgacgcagatcacggagaaaacgctaggctggaatactccttaactggcgttgctcccgatacaccttttgttattaattcagccactggctgggtcagcgtgagcggccccctcgaccgggaatccgtcgaacactattttttcggcgtggaagcaagagatcacgggtctcccccattgtctgcgtccgctagcgtaacggttacagtgctggatgtgaacgacaacagaccagagtttaccatgaaggaataccacctccggttgaacgaggatgccgcagtcggcacctctgttgtgagtgtgacagctgtagatcgcgatgccaacagcgcaatctcctaccagatcaccggaggaaatacacgcaatcgtttcgctatcagcacacaaggaggggtgggactggtaactctggcactgcctctggattacaaacaagagagatattttaagctggttctgacagcttccgaccgcgctcttcacgatcactgttatgtacatattaatatcactgatgccaacactcatcgccctgtctttcagagtgcccactatagcgtgtccgtcaatgaagatagacctatgggatcaacgatcgtcgttatctccgcgagtgacgacgacgtgggtgagaatgctcgaataacctacttgcttgaggacaatcttccacaatttcgcatcgatgccgactccggcgctatcactctgcaggccccactggattacgaggaccaagttacctacactctcgcaatcaccgcccgtgacaacggaatcccacagaaagccgacaccacttatgtcgaggtcatggtaaacgacgtgaacgataacgcacctcagttcgtggcgagtcattatacaggactcgtgtccgaagacgctcccccttttacctccgtgctgcagatctccgcaacagatagggatgcacatgctaatgggcgagtccagtacacgtttcagaatggagaggacggggatggagacttcaccattgagccaaccagcggcatcgtgagaacagtccgaagactcgaccgcgaggcggtgagcgtgtacgagctgacggcctatgccgtcgatagaggcgttcctccactgaggacacctgtgagcatccaggtaatggtccaagacgtgaatgataatgcacccgtgttccccgccgaagaattcgaggtgcgagtcaaagaaaacagcatcgtagggtcagtggtcgcacagatcacggccgttgaccctgatgaagggccaaatgcccatattatgtaccagatcgtcgagggaaatatccccgagctgttccagatggacatattctcaggggagctgactgccctgatagacctcgattatgaagcacgccaggaatatgtaattgttgtgcaggcgacctcagccccccttgtgtcacgtgccaccgtacacgtgaggcttgtggatcaaaatgacaattccccggtgctgaacaactttcagattctgttcaacaactacgtgtccaaccgtagcgataccttcccaagcggcatcatcggtaggattccagcttacgaccccgatgtgtcagaccatctgttttactcctttgaacgcggaaacgaattgcagctgctggtagtgaatcaaacatctggggagcttcggctgtcccggaaactcgataacaaccgcccgctcgttgcctctatgctcgtgacggtcacagatggcctgcactctgtgactgcccagtgcgtactacgcgttgtgatcatcactgaggagttactggccaactcccttaccgttagactagagaacatgtggcaggagcggtttctgtcacccctgcttggaaggttcttagaaggcgtggccgccgtgctggccacccctgctgaggatgtgtttatttttaatatccagaacgacaccgacgtcggcgggacagttctaaacgtcagcttttccgctttggctccacgtggagccggagccggcgctgccggtccctggttttcatcggaggaacttcaggaacagttatatgtcaggagagctgccctcgccgcgcgatctttactggacgtgcttcctttcgatgataacgtttgtctccgggaaccttgtgagaactatatgaaatgtgtgtcagtgctcaggttcgactctagcgcccccttcctcgcctctgcttctacactgtttcgtccaatacagccaattgccgggctgaggtgtcggtgccctccggggttcactggggacttttgtgaaactgagctggatctttgctattccaatccgtgtcgcaatggcggagcttgcgcacgccgggaaggaggctatacctgtgtctgccgacctcgatttacaggagaggattgtgagcttgataccgaggcaggccgctgtgttccaggcgtatgtagaaacggcgggacatgtaccgacgctcctaatgggggcttcaggtgccaatgcccagccggaggtgcatttgagggaccccgatgcgaggtagctgcaaggagttttccaccctcctcgtttgttatgtttagaggtctgaggcaaaggttccatttgaccctgtccctgtccttcgctaccgtgcaacagtccggactgttgttttacaatggccgtctgaatgaaaaacatgactttcttgcactcgagctggtagcggggcaggtgagactcacatatagcaccggggagagcaatactgtggtctcccccacagttccaggcgggctgtccgatggccagtggcataccgtacatttgcgctactataacaaaccacgcaccgatgcactgggcggagctcagggacctagcaaggataaagtcgcggtgctgagcgtagacgattgtgatgtggccgtggcactgcagtttggggctgagattgggaattattcctgtgcagctgccggcgttcaaactagcagcaaaaaatcactcgacctgaccggccctctcctgctcggtggagttccaaacttgcccgagaattttcccgtatcccacaaggattttattggctgcatgagagacttgcatatcgacggtcgccgagttgatatggcggccttcgtggctaacaatggcacgatggctggttgccaggccaagctccatttctgcgactcaggaccgtgtaaaaactctggcttttgctctgaacgctgggggtcattcagctgcgattgtccagtaggtttcggcggaaaggattgtcaacttacgatggcacacccccaccattttaggggtaacggaacattaagctggaacttcggttctgatatggcggtgtctgtaccatggtacctgggactggccttccgcacacgggccactcagggagtactaatgcaggtccaagcaggtccccattccacactgttgtgtcagttggaccgtggattactgagtgtaacagtcacgaggggaagcggtcgggcatctcatctgctgttagaccaagtcaccgtttcagacggccgctggcatgatctgagactggagctgcaggaagagcccggaggccgccggggccaccacgttctcatggtgtctctggacttctcactgttccaggatacgatggcagtcggatccgaattgcagggcctgaaggttaagcagctccacgtcggaggactgccacctggcagcgccgaagaagcgcctcaaggcctggtcggttgtattcagggagtctggttaggcagcaccccaagcggatctccagctttgcttccaccttcacacagagtaaatgcggaacctgggtgtgtggtcactaacgcatgtgcctccggcccttgtccccctcatgcagactgccgggatttgtggcagaccttttcatgcacatgtcagccgggttactacggaccggggtgtgtagatgcttgcttgcttaatccgtgtcagaatcagggctcgtgcaggcacctgccaggggctcctcatggttacacgtgcgattgtgtagggggttacttcgggcaccattgcgaacataggatggatcagcaatgtccccgtggctggtggggcagcccaacatgcggaccatgcaattgtgatgttcataagggctttgacccaaactgcaacaagaccaacggtcagtgtcattgcaaagaattccactatcgacctcggggctctgattcctgcctgccctgcgattgttatccagtaggctcaacatcccgcagctgcgctcctcactctggacagtgtccttgcagaccaggggctctcggtaggcagtgcaacagttgcgattcaccttttgctgaagtgaccgccagtggctgcagggtgttgtacgacgcatgcccaaaatctctgcgaagtggtgtgtggtggccccagaccaagtttggcgtgctggcaacagttccttgccctcgaggggcattgggggcagcagttcggctctgtgacgaagcccagggatggcttgagcccgacctgtttaattgtaccagcccagcctttcgcgagctgagccttctcctcgatgggctcgaactgaacaagactgcgctcgatactatggaggccaaaaagttggcccagcgccttcgagaggtcactgggcatactgatcactacttttcccaggatgtgcgggtgacagccagactcctggcgcatttactagcattcgaaagccaccaacagggctttggtttgaccgccacacaggatgcccattttaatgaaaatctcctttgggctgggagtgcccttttggccccggagaccggggatctctgggctgcactcgggcagagagctcctggcgggtcaccagggtctgccggcctggtcaggcacttagaagagtatgccgccacgcttgctcgtaatatggagctaacgtacctgaaccctatgggcttagtgacacccaacattatgctctctatcgatcgcatggagcacccatccagccccaggggggctcgccgctatcctaggtaccacagcaacctgtttagggggcaggacgcatgggatccccacacacatgttctcttgcctagccagtccccccggccctctccgagcgaagtgttgcccacatcatcgtccatcgagaattctaccactagttctgtggtacccccgccggcgcccccagagcctgagcccggaattagcataatcatcctgttggtgtataggacattaggcggactcctccccgcacagtttcaggcagagcggaggggggctagattgcctcagaaccctgtaatgaactcacctgtggtgtcagtagctgtgttccatggccgaaactttctgagaggtattcttgagagcccaatttctctggaatttagattactgcaaactgccaacagatccaaggctatatgcgttcagtgggatccaccagggttagccgagcagcatggagtttggacagcccgggattgcgagctggtccacaggaacggatcccatgcgcggtgtaggtgctcccgcactggcacgttcggagtgctcatggacgcatctcctcgagaacggcttgagggtgatctggagttacttgccgttttcacacatgtcgtggtggctgtaagcgtcgccgcccttgtgttgaccgcggcgatcctcctatccctgaggtcccttaagtccaacgttcggggcattcatgcaaatgtggcagccgcgctcggcgtcgccgagctcctattcctcttggggatccatcgaacccacaaccaactagtttgcactgcagtcgcaatcttgctgcactatttctttctttctacatttgcatggctgttcgtgcagggactgcatttataccgcatgcaggtggagccgaggaatgtcgatcgtggagcaatgagattctatcacgccctaggctggggcgtgcccgcagttctcctggggctggccgtgggactcgatcccgaaggatatgggaatccagatttttgttggatttctgtccatgagcccctgatatggagttttgctggtcccgttgttcttgttatcgtgatgaacggaaccatgtttcttctggcagcacggactagttgcagtacgggtcagagagaagcaaaaaagacaagcgccctaactctgcgcagtagctttctgctgctgctgttagtctcggccagctggctgttcggactgctggcagttaaccattccatcctggcgtttcactatctccatgccggtctctgcggcctccaggggctggctgtcctgctgttattctgcgtactaaatgccgacgcccgggcggcttggatgccggcgtgcctaggcagaaaggcagctccggaagaagcccgtccagctcccggtctagggccaggcgcgtacaataatacagcgctttttgaagaatccggattgatccggatcacactcggtgccagcactgtatctagcgtgagctccgcaaggagcggcagaacacaggaccaggactctcagcgtggaaggtcttatttaagagataatgtactagtccggcacggctccgccgctgaccacaccgaccacagcctgcaagctcacgccgggccaacagacctcgacgtggccatgtttcacagggacgctggagccgatagcgatagcgactcagacctcagcctggaagaggaacggagcctgtcaatcccatcatctgaatccgaagacaacggccgtacgagaggcaggttccagcgaccactatgtagggctgcgcagtcagagaggcttctgacccacccgaaggacgtagacgggaatgatctcctgtcatattggcctgcattaggtgagtgcgaggctgccccttgcgcactccagacatggggctccgaacggcgcctgggcctggacacctctaaagacgcagccaacaataatcaacccgatcccgccctgacaagtggggatgagaccagcctcggccgtgcccagcgtcagcgcaagggcatccttaagaatcggctgcaatatccactcgtgcctcagaccagaggcgctcctgagctctcctggtgtcgcgcagcgactctggggcatcgggccgtccctgccgcttcttacggaagaatctatgccgggggcggtaccggatctttgagccagccggcctctcggtacagctctcgtgagcagttagaccttctactgaggcgacaattgagtagagaacgcctggaagaggcccctgctcctgtactgcggcccctgagcaggcctgggagtcaggaatgtatggacgcagcccctgggaggttggagcccaaagatcgtggatccacactgcctaggcggcagccaccccgtgactatccgggtgcaatggctggtaggtttggctctcgagacgctctcgacctaggcgctccccgagaatggctctcaactctgccgccgcccagaagaacaagggacctcgatccacagcccccacctctgcctctcagcccccagcgtcagctgagcagggatccgctgctacccagcaggcccctcgattctctgtcaaggtctagtaatagtagggagcagcttgaccaggtgccttcacgccatccgtctagagaagcccttggaccgttacctcagttactgagggcgagggaagactcagtgtcagggccatctcacggaccgtccacagaacaactggatatccttagctctattcttgcttcctttaattcctcagcactgtcttcggtgcagagttccagcaccccattaggacctcacactactgctactccatctgccaccgctagtgtgctcggccctagtaccccccggagcgccacatcacattccatcagcgagctcagtccagattccgaggtacctagatctgagggacatagctag

SEQ ID NO: 117588 - DNA, 9939 bp, Artificial Sequence
  derived and/or modified sequence
atgatggcccgtagaccaccgtggcgaggtctgggaggccggagcacacccattctccttttactgctcttaagtctgttccccctgagccaagaagaattaggaggaggagggcatcagggttgggacccaggattagctgctaccaccggaccgagagcacacatcggagggggagccctggcgctgtgcccagaatcttctggagtgcgcgaagatggcggacctgggcttggggttagagagccaatcttcgtaggtttaagaggccgacggcagtcagctcgtaattcacgcgggccaccagaacagcccaatgaagaactaggaatcgaacatggtgtccaacccctcggctctcgggagcgcgaaacaggacaaggacccggaagcgtgctctactggcggccagaggtctcgtcttgtggcagaactggccctctacagcgaggaagcttaagccctggcgccctctcctctggcgtccccggctcaggtaatagttcccccctaccctcagatttcctgattcgccatcacggacccaagcctgtcagcagccagaggaatgctggaacgggatcacgcaagagagtcggaactgcccgatgctgtggcgagctctgggctaccggcagtaaaggtcaaggagagagggctacaaccagtggggctgaacggaccgcccccagacgaaactgcttaccaggcgcctctggatctggaccagagctggatagtgctccgcggacagcgaggaccgctcctgcctcaggctcggctcctagagagagcagaaccgcccctgaacccgcccccaagcgcatgcggagtcgcgggctgtttcggtgccgttttttaccacagcgaccagggccccgtcccccagggttgcctgctaggcccgaagccagaaaggtcacctcagccaacagagcccgctttcgacgagcagccaaccgacatccacagtttccccaatataactatcaaacactggtaccagagaatgaagccgccgggactgccgtccttagagtggtcgcacaggatcccgacgccggcgaggcaggaagactcgtctacagcttagctgctctgatgaattccagaagtctggaactcttctctattgacccacagtccggcctgatcaggaccgccgctgccctggatagagaaagcatggagaggcattaccttcgggtgaccgcacaagaccacgggtccccaagactgtctgccaccaccatggtcgctgttactgtcgcagatcgtaatgaccactcgcctgtctttgagcaggcacagtacagagaaacactgcgcgagaacgtcgaagaaggttaccccatccttcagcttagggctacggacggtgatgccccacctaatgcaaaccttcgctatcggtttgttgggcccccagctgctagagccgccgcagccgccgcctttgaaatcgaccctagatctgggcttatctcaacctcaggccgggtggatcgcgaacatatggagtcttacgaactggtagtggaggcctcggaccagggacaggagcccggcccaagaagcgccacggtcagagtacatattacagtattggatgaaaacgacaatgccccacaattcagcgaaaaaagatacgtagcacaagtcagagaggatgtgagaccccataccgttgtgttgcgcgtcaccgcgaccgacagggacaaggatgctaacgggttagtccactacaacattatctctgggaattctcgaggccacttcgccattgattccttgacgggagaaatccaagttgtggcccctctggatttcgaggcagaacgagaatacgcactcaggatccgcgcgcaagatgcaggtagaccccctctttctaacaacacgggtctcgccagcattcaggtcgtagatataaatgaccacatacccatctttgtttccacaccctttcaggtaagtgttctagaaaacgctccactggggcactcagtgatccacatccaagctgttgacgccgatcatggggaaaacgccaggctggagtactctttaaccggagtcgcgcctgacacaccctttgtcataaattctgccaccggctgggtgagtgtttcgggaccccttgatcgggaatcagtggagcattacttcttcggagtcgaggcccgcgaccatggatctcccccactctccgcaagtgcttctgtgaccgtgaccgtattggacgttaatgataatcggcctgaatttacaatgaaagagtaccatctcagattgaacgaggatgcggctgtgggcacaagcgttgtttccgtaacagcggtggatcgcgacgccaattctgcgatttcttatcagattacaggtggaaacacgcgcaaccgctttgctatcagtacacagggaggagtgggtctggttactctcgccctgccactagattacaaacaagagcgctacttcaaattggtacttacagcttccgatagagctctgcatgatcattgttacgtccacataaatattactgacgccaacacccatagaccggtgttccaatccgctcactattcagttagcgtaaatgaagatagaccaatggggtctacaatcgtagtgatcagcgccagcgacgatgatgtgggagaaaatgcacggataacctatctgctcgaggacaaccttccacaatttcgcatcgatgccgactccggcgctatcactctgcaggccccactggattacgaggaccaagttacctacactctcgcaatcaccgcccgtgacaacggaatcccacagaaagccgacaccacttatgtcgaggtcatggtaaacgacgtgaacgataacgcacctcagttcgtggcgagtcattatacaggactcgtgtccgaagacgctcccccttttacctccgtgctgcagatctccgcaacagatagggatgcacatgctaatgggcgagtccagtacacgtttcagaacggagaggatggagatggagactttactatcgagccaacatcaggcattgtcaggactgttagaaggcttgatagagaggccgtatcagtgtacgagctaacagcttacgcggtggatcgcggtgtcccccccctgagaacgcccgtcagcatacaggtaatggtccaggacgtcaacgataacgcacctgtgttcccagccgaagaattcgaggttagagtcaaggagaatagcatcgtcggctcagtagttgctcagatcaccgctgttgacccagacgagggcccaaatgcacatataatgtaccaaattgtggaaggcaacatcccggagctgtttcagatggacattttctcaggcgaactgacagctctcatagacttggactacgaagcgaggcaggaatatgttatagttgtgcaagcgacaagcgcacctctcgtctcccgcgccacagtacacgttagactggtggaccaaaatgacaactcccccgtgctcaataattttcagatactgttcaataattacgtcagtaaccgctccgatacgtttcccagtggcatcatcggcaggataccagcatatgatccagatgtctctgatcatctattttactccttcgagcgcggcaacgaactgcaactcttggtggtgaatcagacaagcggagaactccgacttagtcggaagctagacaacaacagacctttggtcgcatcaatgcttgtaaccgtcacggacggcctgcactccgtcaccgcacaatgcgtactgcgcgtggtcataataactgaagaacttctcgcaaacagcctcacagttcgccttgaaaatatgtggcaggagcggtttctgagcccgctgctgggtcggtttctcgagggtgttgctgcagttctggccacccccgccgaggatgtatttatatttaacattcaaaatgacacagatgtcggaggaacagtcttgaacgtgagtttttctgctctcgctccacggggagcaggagccggagccgccgggccatggttcagtagcgaagagcttcaggagcaactgtacgtgagacgcgccgcactggctgcacggagtctgctggacgtactgccttttgacgacaatgtatgcctcagggagccttgtgaaaactacatgaaatgcgtgtccgtgcttcgattcgacagtagcgcccctttcctcgccagcgcttcgaccctctttcgtcccatacagcccatagccggcttgcgatgtaggtgccctcctggattcaccggagacttttgtgagactgagttggatctttgttactctaatccgtgccggaatggcggggcctgcgcgagacgtgagggtgggtacacttgcgtatgtcggccaaggtttaccggagaagattgcgaactcgatactgaagcaggccgatgtgttcccggcgtttgcagaaatggaggtacttgtaccgacgctccaaatggcggtttccggtgccagtgtcctgcagggggtgcttttgaaggccctagatgtgaggttgctgctcgctcttttcctcctagttcgtttgtgatgtttagaggtctcaggcaacggtttcatttaaccctttctctctccttcgctaccgtgcagcagtccggtctactgttctacaatgggagactgaatgagaaacatgactttctggctctggaactcgttgctggtcaagtacgcctcacttacagtacaggagagtcgaacactgtggtgagtccaacggttcctgggggattgagtgacggccagtggcataccgtacatttgcgctactataacaaaccacgcaccgatgcactgggcggagctcagggacctagcaaggataaagtcgcggtgctgagcgtagacgattgtgatgtggccgtggcactgcagtttggggctgagattgggaattattcctgtgcagctgccggcgttcaaactagcagcaaaaaatcactcgacctgaccggccctctcctgctcggtggagttccaaacttgcccgagaattttcccgtatcccacaaggattttattggctgcatgagagacttgcatatcgacggcagacgcgtggacatggcggcattcgtcgctaacaatgggacaatggccggatgtcaggcaaaactccacttttgcgactcaggaccgtgcaagaacagcggattctgctccgaacgttggggctccttctcctgtgactgtccggtgggattcggcgggaaagattgtcagcttacaatggcacacccacatcatttcaggggaaacggtacactgagttggaacttcgggagcgatatggctgtctccgtcccatggtacttagggcttgcttttcgaacccgagcgactcaaggagtgttaatgcaagttcaggccggtcctcactccacactcctgtgccaactcgacagaggattgttaagcgtgactgtcacccgaggatctggacgagctagccacctgctcctggaccaagtaaccgtgagtgacgggcggtggcacgatctacggctggagcttcaagaagaacccggggggaggcgaggtcaccacgtactcatggtcagtctcgacttttctttattccaggacactatggccgtgggttcggaactccaaggacttaaagtcaaacaactgcacgtgggaggcttacctccaggctctgccgaagaggccccgcaaggtctggtcggctgcatccagggagtgtggcttggatccactccctcaggctctcccgccctgctacctccttcccatcgcgtgaatgcagaacccgggtgtgtcgtcactaatgcatgcgcctctggaccttgcccaccccacgctgactgtcgagatctctggcaaacattctcctgtacttgccagccagggtattacggccctggatgtgtagacgcctgccttctaaatccatgccagaatcagggttcatgcagacatctgccaggggctcctcatggttacacgtgcgattgtgtagggggttacttcgggcaccattgcgaacataggatggatcagcaatgtccccgtggctggtggggcagcccaacatgcggaccatgcaattgtgatgttcataagggctttgacccaaactgcaacaagaccaacggtcagtgtcattgcaaagaattccactatcgacctcggggctctgattcctgcctgccctgcgattgttatccagtaggctcaacatcccgcagctgcgctcctcactctggacagtgtccttgcagaccaggcgctcttgggcggcaatgtaatagctgtgactccccattcgcagaagtgacagcatccggatgtcgagttctttatgacgcttgtcccaaatcccttagatccggtgtatggtggcctcagacaaagttcggcgttctggctactgttccatgccctaggggagcgcttggggcggcagtgcgcctgtgtgatgaggcccagggatggcttgagccagatctctttaattgcacatctccagcattccgagaactaagtctgctcctggacggactggagcttaacaagacagccctcgacactatggaagccaagaaattagcacagagactccgtgaggtcaccggacacaccgatcattacttttcccaggacgtgagggtaacagcccggcttttagcccacctgcttgccttcgagtctcatcaacagggcttcggactgacggcaacacaagacgcacacttcaacgaaaacctactgtgggctggatccgcactactggcccctgagactggcgatctgtgggctgccttgggacaaagggcccccgggggcagtcccggcagcgcaggcctggttcgtcatctcgaggaatatgccgccactcttgctcgtaacatggaactcacctacctaaaccctatgggcttggtgaccccaaacatcatgctgtcaatcgaccgaatggaacacccctcttctcctcgtggagcccgaagatatccccgctaccattccaacctgttccgtggacaagatgcctgggaccctcacacccacgtgctgttacccagccagtcccctcgaccatctccatccgaagtgttacctacctcctcgtctatcgaaaatagcaccacctcctccgttgttccaccacctgcccctccagagccagaacccggtatatcaattattatactactcgtgtaccgcactttaggtggattgcttccagcacagtttcaggccgagcgccgaggggcacgacttccacagaaccccgtcatgaattcgccagtggttagtgtcgctgtgttccacggacgtaatttcttgagaggcatccttgaatcccccatctctctggaatttcggctgttgcagaccgcaaacagatccaaagcaatatgcgtgcaatgggaccctccagggctggccgagcagcacggcgtctggaccgccagagactgtgagctggtgcatcggaatggaagtcacgcacgatgcagatgtagtaggaccgggacattcggcgttttgatggatgcttcgcccagggagcgcctggaaggagacttggaattgcttgccgtctttactcacgttgtggtcgccgtgtccgtagctgcgctggtcctgaccgccgccattctacttagcctaagatcattgaaaagtaacgtgaggggcattcacgccaacgtcgcagctgctctcggtgtcgccgaactgctctttctcctgggtattcatagaacacacaatcagttggtatgcactgccgtggcgattctgctccactactttttcttgagcacttttgcctggctgtttgtgcaaggacttcacctctaccgaatgcaagttgaacctaggaatgtcgatcgcggtgccatgcgtttttatcacgctctggggtggggcgtgcccgcagtgttattaggcctggccgttggattagacccagagggctatggcaatcctgatttctgctggatttctgtgcatgaaccacttatctggagtttcgcaggcccagtcgtgcttgtcatcgttatgaacggaacaatgtttctgctggccgcacgcacatcatgctcaaccggccagcgtgaggctaagaaaacttccgctttgacactgcgatcctcttttcttcttctgctacttgtctctgcgtcatggctttttgggctgcttgccgtcaatcattcgattctggccttccactacctccacgccggtctgtgcggtctgcaaggcctagcagtgctgctcctcttctgtgtcctcaatgccgatgccagagccgcctggatgcccgcctgtctcggtcggaaagccgccccagaggaggctcgccccgctcctggattggggcctggagcttataacaacactgctttatttgaagagtcaggactgattcgaatcaccttaggcgcgtccactgtgtcatctgtctcgagcgcacgctccggtaggacgcaggatcaagacagtcagcggggtaggagttacttacgtgataatgttcttgtccgccacggatctgcggccgatcacaccgaccactcattgcaggctcacgctggaccaaccgacctggatgtggctatgttccatcgagatgcaggagccgatagtgattctgatagtgacctcagcctggaggaggagaggagtttgagtatcccatcttcggaatctgaagataatggtaggacgagaggcaggttccagcgccctctgtgccgtgccgctcagagtgagaggcttttaacgcatcctaaagacgtggatggcaacgatctcttaagctactggccagccctcggagaatgtgaagccgccccttgtgcacttcaaacctggggatctgagcgccgtttgggtctggacacttctaaagacgcagccaacaataaccagcctgatcccgcgctgacctccggcgacgaaacgagccttggccgggcacaaagacaaagaaaaggaattctcaaaaatcgccttcagtatccactagtaccacagaccagaggggcgccagagctgtcgtggtgccgggctgctactctggggcaccgggcagttccagctgcttcttacggacgcatctatgcagggggaggaaccgggtctctgtcccagcccgcgagtaggtacagttccagggagcagttagacctcctgctgaggcgccaattgtctcgggaacgcttagaggaggcccccgcccctgtgcttcgaccattgtccagaccaggatcccaagaatgtatggacgcagcacccggacgcctggagcctaaagaccggggaagcacactgccacggagacagccaccccgcgattatcctggcgcaatggctggacggtttggatctagagacgccctggaccttggcgcacctagagaatggttatccacgctgccacctccacgccgcactagagacctcgacccccaacccccgcccctgccattgagtccacagagacagctttctagggaccccctgctgccaagcagaccacttgattcactctctcggtcttccaactcacgtgagcagctggatcaggtcccgtcacggcatccatccagagaagctctgggccccctcccacagttgctgagggcccgcgaagatagtgtgtcaggtccatcccacggcccttctaccgaacagttggatatcctgagctccattctcgcgtctttcaattcctctgctctgagttctgtccagtcttcctcaacacccctcggcccgcatactaccgcaactccgtcagctaccgcatccgtcctcgggccctctacacctcgcagtgctacatcacattcaatatctgagctgtcacctgattcagaagtaccacgatccgagggccatagttag

SEQ ID NO: 117589 - DNA, 11956 bp, Artificial Sequence
  derived and/or modified sequence
agcgaaccatcggggcggccgggagccatgttggagcggcgggaggcggcagcagcgtcggggatgctgtggtgggggcggaaaaagccagggccgcacgccggaggggctccggccgcggagtagatggtgcccagagggcggcgggggtgcggagagacaggcggaggggcgggggcccggggcggcggcaggggcccgggagggggcccgagcggcggggccagcccaaggcccggaccggggcggggggcggtggaggccgtgcagggaggcgggggatgatggcgaggcggccgccgtggcggggcctcgggggacggtcgacccccatactcctgctccttctcctctctttgttccccctcagccaggaggagctggggggcggtgggcaccagggctgggacccaggcttagctgccactacggggccaagggcgcatatcggtggcggagccttagctctttgtccggagtcttccggggtccgggaggatggggggcctggcctgggggtcagggagcctatcttcgtggggctccgagggagaaggcaaagcgcccggaatagtcgagggccccctgagcagccgaatgaggagctggggattgaacacggcgtccagccattgggcagccgcgaacgagagacaggacagggaccagggtctgtgttatactggcgcccagaggtctcctcttgcgggcggacaggacctttgcaaagaggtagtctgtcaccaggggctctgtcctcaggggtcccgggctcggggaacagctcgcccctcccttcagactttttgattcggcaccacggtcccaagccggtgtcctcccagcggaacgctgggacaggctcccgcaaaagagtgggcaccgcgcgctgctgtggggaattatgggcaacagggagcaagggtcagggcgagagagccacgacatccggagcagaaaggacagccccccggcggaactgtcttccaggggcctcgggatctggccccgagctggattcagcaccacgcacggcgaggacagctcctgcatcaggttcagcaccccgcgagtctcggacagctcccgagccggcgcccaagcgcatgcgctcccggggtctcttccgctgccgcttcctcccgcagcgccccgggccgcgtcccccgggactcccggcccgtcctgaagccaggaaagtaacctcggcgaaccgggcacgctttcgtcgcgccgcaaaccgccacccgcagtttccgcagtacaactaccagacgctggtgccggagaatgaggcagcaggcaccgcggtgctacgcgtggttgctcaggacccggacgccggcgaggccgggcgcctagtctactcgctggcggcactcatgaacagccgctcgctggagctgttcagcatcgacccgcagagcggccttatccgtacggcggcagctctggaccgcgagagcatggagcgtcactacctgcgtgtgaccgcgcaggaccacgggtcgccgcgcctctcggccaccacgatggtggccgtgacagtagccgaccgcaacgaccactcgccggtttttgagcaagcgcagtaccgggagacccttcgcgagaatgtggaggagggctaccctatcctgcagctgcgtgccactgacggcgacgcgccccccaacgccaacctgcgctaccgcttcgtggggccgccagctgcgcgcgctgcagctgccgccgccttcgagattgatccacgctccggcctcatcagcaccagcggccgagtggaccgcgagcacatggaaagctatgagctggtggtggaagccagcgaccagggccaggaacccgggccgcgctcggccactgtgcgcgtacacataactgtgctagacgagaacgacaatgctcctcagttcagcgagaagcgctacgtggcgcaggtgcgcgaggatgtgcgcccccacacagtcgtgctgcgcgtcacggccactgaccgggacaaggacgccaacggattggtgcactacaacatcatcagtggcaatagccgtggacactttgccatcgacagcctcactggcgagatccaggtggtggcacctctggacttcgaggcagagagagagtatgccttgcgcatcagggcgcaggatgctggccggccaccgctgtccaacaacacgggcctggccagcatccaggtggtggacatcaatgaccacattcctatttttgtcagcacgcccttccaagtttctgtcttggaaaatgctcccttgggtcactcagtcatccacattcaggcagtcgatgcagaccatggggagaatgccagattggagtactccctaactggtgtggcacctgatactccttttgtgataaacagcgccactggctgggtctctgtgagtggtcccctggaccgtgagtctgtggagcattacttctttggtgtggaggctcgagaccatggctcacccccactctctgcctcagccagtgtcaccgtgactgtgctggacgttaatgacaatcggcctgagttcacaatgaaggagtaccacctacgactgaatgaggatgcagctgtgggcaccagtgtggtcagcgtgaccgcagtagaccgtgatgccaacagtgccatcagctaccagatcacaggcggcaacacccggaatcgctttgccatcagcacccaggggggtgtgggtctggtgactctggctctgccactggactacaagcaggaacgctacttcaagctggtactaactgcatctgaccgtgcccttcatgatcactgctatgtgcacatcaacatcacagatgccaacactcatcggccggtctttcaaagtgcccactactcagtgagtgtgaatgaagatcggccaatgggtagcaccatagtggtcatcagtgcctctgatgatgacgtgggtgagaatgctcgtatcacctatctcctggaggacaacctgccccagttccgcattgatgcagactcaggagccattacattacaggccccattagactatgaggaccaggtgacctacaccctggctatcacagctcgggacaatggcatcccacagaaggcagacactacttatgtggaggtgatggtcaatgacgtgaatgacaatgctccacaatttgtggcctcccactatacagggctggtctctgaggatgccccacctttcaccagtgtcctgcagatctcagccactgaccgggatgctcatgccaatggccgggtccagtacactttccagaatggtgaagatggggatggagattttaccattgagcccacctctggaattgtccgtacagtaaggcggctagaccgggaggcagtatcagtgtatgagttgactgcctacgcagtggacagaggtgtgcccccactccggactccagtcagtatccaggtgatggtgcaggatgtgaacgacaatgcacctgtcttcccagctgaggagtttgaggtgcgggtgaaagagaatagcattgtgggctcagtggtggcccagatcactgcagtggaccctgacgaaggccccaatgcccatataatgtaccagatcgtggaggggaacatccctgagctgttccaaatggacatcttctctggagaactgacggcactcattgacctagactatgaggctcgccaagaatatgtgattgtggtgcaggccacatctgctcctttggtcagccgggccactgtgcacgtccgcctggttgaccagaatgacaacagccctgtgctcaacaacttccagatcctcttcaacaactatgtatccaaccgttcagacaccttcccgtcgggcattattgggcgcatcccagcttatgaccccgatgtctccgaccacctcttctactcctttgagcgtggcaatgagctgcagctgctggtagtcaaccagaccagtggggagctgcgactcagccgaaagctagacaataaccgcccactggtggcctccatgttggtgactgtcacagatggcctgcacagcgtgacggcgcagtgtgtgctgcgcgtggtcatcatcacggaggagttgctggccaacagcctgaccgtgcgccttgagaacatgtggcaggagcgcttcctgtcaccgctgctgggccgcttcctcgagggcgtggctgcggtgctcgctacgcccgctgaggacgtcttcatcttcaacatccagaacgacacagacgtagggggcaccgtgctcaatgtgagtttctcggcgctagctccacgtggggccggggcgggcgctgcagggccctggttcagctccgaggagctgcaggagcagttgtacgtgcgccgggcggcgctggcggctcgctccctgctcgacgtactgcccttcgacgacaacgtgtgcctgcgagagccctgtgagaactacatgaaatgcgtgtccgtgctccgctttgactcgtccgcgcccttcctggcctcggcctccacgctgttccgacccatccagcccatcgctggcctgcgctgccgctgcccgcccggattcacgggagacttttgcgagaccgagctcgacctctgctactccaacccatgtcgcaacggcggagcctgcgcgcggcgcgagggaggctacacgtgcgtctgccgcccgcgcttcaccggagaggactgcgagctggacaccgaggccggccgctgcgtgccgggcgtctgccgcaacgggggcacctgcaccgacgcgcccaacggcggctttcgctgccagtgcccggcaggcggcgccttcgagggcccgcgctgcgaggtggctgcgcgctccttcccgcccagttcgttcgtcatgtttcgcggcctgcggcagcgattccaccttacgctgtccctctcgttcgcgacagtgcagcagagcgggctgctcttctacaacgggcgcctgaacgagaagcacgacttcctggccctggaactcgtggctggccaagtgcggctcacatattccacgggtgaatccaacaccgtggtcagccccacagttccagggggcttgagtgacgggcaatggcatacagtgcatctgagatactacaacaagccccggacagatgccctagggggtgcacagggcccctccaaggacaaggtggctgtgctaagcgtggatgattgtgatgtggccgtggctctgcagtttggtgctgagattggcaactactcatgcgcggctgctggtgtgcaaacaagctccaagaagtccctggacctgacgggccctcttcttctgggaggtgtccccaacctccccgagaacttccccgtatcccataaggacttcatcggctgtatgcgggacctgcacattgatggccgccgagtggacatggcggcttttgtcgcaaataatggcaccatggcaggctgccaagccaagctacacttttgtgactcaggcccctgcaagaacagtggcttctgctcggagcgctggggcagcttcagctgcgactgccctgtgggcttcggcggcaaagactgtcagcttactatggcccatccccaccatttccgtggcaacggcacactgagctggaactttggaagtgacatggctgtgtctgtgccatggtacctggggctggcatttcggacacgggcaacgcagggggtcctgatgcaagtgcaggctgggccacacagcacgctcctttgccagctagatcgggggttactgtctgtgacagtgaccaggggctcgggccgtgcttcccatctccttctggaccaggtgactgtcagtgatggccggtggcacgatctgcggctggagttgcaggaggaaccaggtggccggcggggccaccatgtccttatggtctcactggactttagcctcttccaggacaccatggcggtggggagtgagctgcagggcctgaaggtaaagcagctccacgtgggaggcctgccccccggcagtgcagaggaggctcctcagggtctggttggctgcatccagggggtgtggctcggctccacaccctctggctccccggccctgctaccccccagccaccgagtgaatgcggagcctggctgtgttgtgaccaacgcctgtgcctctgggccctgcccacctcacgcagactgccgggacctctggcagaccttttcttgcacctgccagccaggttactacggcccaggctgtgtggatgcctgcctcctgaacccctgtcagaaccagggatcatgccggcacctgccaggagccccccatggctatacctgtgactgtgtgggtggctatttcgggcaccactgtgagcacaggatggaccagcagtgcccacggggctggtgggggagcccaacctgtggcccctgcaactgtgatgttcacaaaggttttgatcccaactgcaacaagacaaatgggcagtgtcactgcaaggagttccactaccgaccgcggggcagtgactcttgcctcccatgtgactgctaccctgtgggctccacctcgcgctcatgtgcaccccacagcgggcagtgcccctgtcgcccaggagcccttggccgccagtgcaacagctgtgacagtcccttcgcagaggtgacagccagcggctgccgggtgctctatgatgcctgccctaagtccctgagatctggtgtgtggtggccccagacaaagtttggcgtcctggccacagtgccctgtccccggggggccctgggtgctgctgtgcggctgtgtgatgaggcccagggttggctggagcccgacctcttcaactgtacctcccctgcctttcgagagctcagtctgctgctggatggcctagagctgaacaagacggcactggataccatggaggccaagaagctggctcagcggctacgggaggtgactggccacactgaccactattttagccaagatgttcgagtcactgcccgcctgctggcccacctgctggccttcgagagccatcagcagggcttcgggctgacagccacacaggatgcccacttcaatgagaatctgctgtgggccggctctgcactgcttgccccagagacaggggacttgtgggcggcgctggggcagcgggcccctgggggctccccaggcagcgcgggactggtgaggcacctggaggagtatgcagccacactcgcaaggaatatggaactcacatacctgaatcccatggggctggtgacgcctaatatcatgctcagcattgaccgcatggagcaccccagttctccccggggggcccgtcgctaccctcgctaccatagcaacctctttcgaggccaggatgcctgggatcctcacacccatgtgctgctgccttcccagtccccacggccatccccatctgaagttctgcccacaagcagcagcatagaaaactccaccacctcaagtgtggtccccccaccagccccgccagagccagagcctgggatctccattatcattctcctcgtttaccgcaccttagggggactgctccctgcccagttccaggcagaacgccgaggtgccaggcttcctcagaaccccgtcatgaactccccggtggtcagcgtggctgtgttccacggacgcaacttcctaaggggaatcctggagtcccccatcagcctagagtttcgcctgctacagacagcgaatcggagcaaggcgatctgtgtgcagtgggacccacctggcctggcggagcagcatggtgtgtggacagcacgggactgcgagctggtgcacaggaatgggtcccacgcacggtgtcgctgcagccggacagggacctttggggtcctcatggatgcctctccccgtgagaggctggagggcgacctggagctgctggctgtgttcacccacgtggtcgtggctgtgtctgtggctgcgctggtgctgactgcagccatcctgctgagcctgcgcagcctcaagtccaatgtgcgtgggatccatgccaatgtggcagccgccctgggggtggcagagctcctcttcctgctggggattcacaggacccacaatcagctggtgtgcactgcagtcgccatcctcctgcactacttcttcctcagcaccttcgcgtggctcttcgtgcaggggctgcacctctaccgcatgcaggttgagccacgcaacgtggaccgcggcgccatgcgcttctaccatgccctgggctggggcgtccctgctgtgctgctgggccttgctgtgggcctggaccctgagggctatgggaaccctgacttctgctggatctcagtccacgagcccctcatctggagctttgctggccctgttgtcctggtcatagtgatgaacgggaccatgtttctcctcgctgcccgcacatcctgctccacagggcagagggaggccaagaagacctctgcactgacccttcgcagctccttcctgctgcttctgctggtcagtgcctcctggctctttgggctcctggcagtcaaccacagcatcctagccttccactacctccatgctggactctgcggcctccagggcctggcggtgctgctgctcttctgtgtcctaaatgcagatgctcgggctgcctggatgccagcctgtctgggcaggaaggcagcgcctgaggaggcaaggccagcacctgggctgggacctggggcctacaacaacacggctctctttgaggagagtggcctcatccgcatcactctgggcgcctccaccgtctcctctgtgagcagtgcccgctccggccggacccaggaccaggacagccagcggggccgcagctacctcagggacaatgtcctggttcgacatggctcagccgctgaccacactgaccacagcctccaggctcatgctggccccactgacctggacgtggccatgttccatcgagatgctggcgcagactccgactctgacagtgacctgtccttggaggaggagaggagtctctccattccatcttcagaaagcgaggacaatggccggacgcgggggcgcttccaacggccactctgccgagcagcccagagtgagaggctcctcacccaccccaaagatgtggatggcaatgacctcctgtcctactggccagccctgggggagtgcgaggcagccccctgtgctctgcagacttggggctctgaaaggcgcctggggctggacaccagcaaggatgcagctaacaacaaccagccagacccggccctgaccagtggggatgagacttctctgggccgggcccagcgccagaggaaaggcatcctgaagaaccggttgcaatacccactggtgccacagacccgaggtgcccctgagctgtcctggtgccgtgcagccaccttgggccaccgtgctgtgccagctgcctcttacggtcgcatctatgctggcgggggcacgggcagcctttcacagccagccagccgctactcttctagagaacagctggacctgctcctccggcggcaactgagccgtgagcgactagaggaagcccctgcccctgttctacgtcccctgagccggccagggtcccaggaatgcatggatgctgcaccaggccgactggagcccaaagatcggggcagcaccctgccacggaggcagccacctcgggactaccctggcgccatggctggccgcttcgggtcacgggatgcgctcgacttaggggcacctcgagagtggttgagcacgctgcctccgccccgccgcacccgggaccttgacccacagcccccacctctgcccctgtctccccagcggcaactctcaagggaccccctcttgccatcccggccgctggactctctgtctaggagctcgaactctcgggagcagctggaccaggtgcctagccggcacccctcacgagaagcccttgggccactcccgcagctgctcagagctagggaggactcggtcagtggccccagccatggcccctccacagaacagttggacattctttcctccatccttgcctctttcaactcctcggccctctcctctgtgcaatcttcaagcacacccttgggccctcacaccactgccacaccttctgccacagcctctgtgcttgggccctccacgccacgttctgccacgtctcacagcatctcggagctgtcgccagactcagaagttcccagaagtgagggtcactcctgaggggatgacggcgtggacgaggaacagctgagggcgacagaggatctaggctaacaggagagactccaggagtgggggcagatcccaaggcagcctcctgctccccagtggtgggtgccccagctctacctggtgtggcagggctgaggctccatgtgcatctgtgagcatgcgtgtgacaggtgcagagacgggggactggagggagacttttatacgttttgtacctttgtaaccagagagatgcttatgttatttttcagcttttctgtctcctggggggtttgaggctgggctgggagggggagggagatagagggagagatgcagtttgaccccatttgggtcctgagcaaaccctatgctcatctctctctccttcctggggtggactcagatgggtgggacacatgccttcctccccctattccacccccaagttgatctgagtatcgtcaggggcccaaagtacagaattgttctttgctttttattgaatgctccaaaggccaaacttctggggctgggggttggtcttggaaacaggggtcctctgacttcctcatgggggcttgctcataccgcccctcctggtggatgtgtgtgtttattatgtggagtccctgccacttactgccttatgacctaggactgatgctgtggggtgctggtggagcagctgatgtcgtgtttacagagcaaggcttccctgtctcccacggggaggggctcgggcctctagtcagacattcctgcagagggtcggtggaggggtcattcacctgcccctgcagcaagcaaaagttgtctgtggtgccatttgattccctgacactgccccctgcttgaattgattccgaagggtagggtgggaaggtgagcaaagggagcagaaacaagggaattcaagacccagaatgtaggtgccactgcctcctatgtttacaggatcctccgtggccctaggcacctgggctgcaggaagtgactccgttccactcctcctttattcccttaaaaagggaaaaatgactgttacgaccctgttcacaaaactcttacttttgctattttgtctgctgtccagaactgaagactttaaaattttgttactgtttacaagtccagattcaaaaaatgtttttactttgtttacaactcaaaactttgagttttacactttgtttacagtagataattttttttcctttgtttccaagtgaaaggtagggaaagtgggagagggacttggaggacccacctgtgaggaccctgacctggccatcttgaggggttttctaacccccaggtctcccaggccgaaggtcagccttgagtcccgtttaacagcagatccagaagaccttgagagtaggcgtcctctaaccacgggggagagtggctgtgcagggctggggggtggtctgtgcagacacctcctcacccaccaccccatgcatactcttgggaagcagcttcctgggagattagaaattctacttccctgactggagctaaatcccaccagccaggacccaaactctccttaccgagaaggaccccagctcttgaagggctgagtggcctgctgggggtgggagggtgtctttactatgtcctaggtttcgtagatgcccctctctggggttcccctcctccagcccagcggccctctttcctgtctgtgtaaattgttccgtgaagccgcgctctgttttgggaataaacttctatag

SEQ ID NO: 117590 - DNA, 11971 bp, Artificial Sequence
  derived and/or modified sequence
agcgaaccatcggggcggccgggagccatgttggagcggcgggaggcggcagcagcgtcggggatgctgtggtgggggcggaaaaagccagggccgcacgccggaggggctccggccgcggagtagatggtgcccagagggcggcgggggtgcggagagacaggcggaggggcgggggcccggggcggcggcaggggcccgggagggggcccgagcggcggggccagcccaaggcccggaccggggcggggggcggtggaggccgtgcagggaggcgggggatgatggcgaggcggccgccgtggcggggcctcgggggacggtcgacccccatactcctgctccttctcctctctttgttccccctcagccaggaggagctggggggcggtgggcaccagggctgggacccaggcttagctgccactacggggccaagggcgcatatcggtggcggagccttagctctttgtccggagtcttccggggtccgggaggatggggggcctggcctgggggtcagggagcctatcttcgtggggctccgagggagaaggcaaagcgcccggaatagtcgagggccccctgagcagccgaatgaggagctggggattgaacacggcgtccagccattgggcagccgcgaacgagagacaggacagggaccagggtctgtgttatactggcgcccagaggtctcctcttgcgggcggacaggacctttgcaaagaggtagtctgtcaccaggggctctgtcctcaggggtcccgggctcggggaacagctcgcccctcccttcagactttttgattcggcaccacggtcccaagccggtgtcctcccagcggaacgctgggacaggctcccgcaaaagagtgggcaccgcgcgctgctgtggggaattatgggcaacagggagcaagggtcagggcgagagagccacgacatccggagcagaaaggacagccccccggcggaactgtcttccaggggcctcgggatctggccccgagctggattcagcaccacgcacggcgaggacagctcctgcatcaggttcagcaccccgcgagtctcggacagctcccgagccggcgcccaagcgcatgcgctcccggggtctcttccgctgccgcttcctcccgcagcgccccgggccgcgtcccccgggactcccggcccgtcctgaagccaggaaagtaacctcggcgaaccgggcacgctttcgtcgcgccgcaaaccgccacccgcagtttccgcagtacaactaccagacgctggtgccggagaatgaggcagcaggcaccgcggtgctacgcgtggttgctcaggacccggacgccggcgaggccgggcgcctagtctactcgctggcggcactcatgaacagccgctcgctggagctgttcagcatcgacccgcagagcggccttatccgtacggcggcagctctggaccgcgagagcatggagcgtcactacctgcgtgtgaccgcgcaggaccacgggtcgccgcgcctctcggccaccacgatggtggccgtgacagtagccgaccgcaacgaccactcgccggtttttgagcaagcgcagtaccgggagacccttcgcgagaatgtggaggagggctaccctatcctgcagctgcgtgccactgacggcgacgcgccccccaacgccaacctgcgctaccgcttcgtggggccgccagctgcgcgcgctgcagctgccgccgccttcgagattgatccacgctccggcctcatcagcaccagcggccgagtggaccgcgagcacatggaaagctatgagctggtggtggaagccagcgaccagggccaggaacccgggccgcgctcggccactgtgcgcgtacacataactgtgctagacgagaacgacaatgctcctcagttcagcgagaagcgctacgtggcgcaggtgcgcgaggatgtgcgcccccacacagtcgtgctgcgcgtcacggccactgaccgggacaaggacgccaacggattggtgcactacaacatcatcagtggcaatagccgtggacactttgccatcgacagcctcactggcgagatccaggtggtggcacctctggacttcgaggcagagagagagtatgccttgcgcatcagggcgcaggatgctggccggccaccgctgtccaacaacacgggcctggccagcatccaggtggtggacatcaatgaccacattcctatttttgtcagcacgcccttccaagtttctgtcttggaaaatgctcccttgggtcactcagtcatccacattcaggcagtcgatgcagaccatggggagaatgccagattggagtactccctaactggtgtggcacctgatactccttttgtgataaacagcgccactggctgggtctctgtgagtggtcccctggaccgtgagtctgtggagcattacttctttggtgtggaggctcgagaccatggctcacccccactctctgcctcagccagtgtcaccgtgactgtgctggacgttaatgacaatcggcctgagttcacaatgaaggagtaccacctacgactgaatgaggatgcagctgtgggcaccagtgtggtcagcgtgaccgcagtagaccgtgatgccaacagtgccatcagctaccagatcacaggcggcaacacccggaatcgctttgccatcagcacccaggggggtgtgggtctggtgactctggctctgccactggactacaagcaggaacgctacttcaagctggtactaactgcatctgaccgtgcccttcatgatcactgctatgtgcacatcaacatcacagatgccaacactcatcggccggtctttcaaagtgcccactactcagtgagtgtgaatgaagatcggccaatgggtagcaccatagtggtcatcagtgcctctgatgatgacgtgggtgagaatgctcgtatcacctatctcctggaggacaacctgccccagttccgcattgatgcagactcaggagccattacattacaggccccattagactatgaggaccaggtgacctacaccctggctatcacagctcgggacaatggcatcccacagaaggcagacactacttatgtggaggtgatggtcaatgacgtgaatgacaatgctccacaatttgtggcctcccactatacagggctggtctctgaggatgccccacctttcaccagtgtcctgcagatctcagccactgaccgggatgctcatgccaatggccgggtccagtacactttccagaatggtgaagatggggatggagattttaccattgagcccacctctggaattgtccgtacagtaaggcggctagaccgggaggcagtatcagtgtatgagttgactgcctacgcagtggacagaggtgtgcccccactccggactccagtcagtatccaggtgatggtgcaggatgtgaacgacaatgcacctgtcttcccagctgaggagtttgaggtgcgggtgaaagagaatagcattgtgggctcagtggtggcccagatcactgcagtggaccctgacgaaggccccaatgcccatataatgtaccagatcgtggaggggaacatccctgagctgttccaaatggacatcttctctggagaactgacggcactcattgacctagactatgaggctcgccaagaatatgtgattgtggtgcaggccacatctgctcctttggtcagccgggccactgtgcacgtccgcctggttgaccagaatgacaacagccctgtgctcaacaacttccagatcctcttcaacaactatgtatccaaccgttcagacaccttcccgtcgggcattattgggcgcatcccagcttatgaccccgatgtctccgaccacctcttctactcctttgagcgtggcaatgagctgcagctgctggtagtcaaccagaccagtggggagctgcgactcagccgaaagctagacaataaccgcccactggtggcctccatgttggtgactgtcacagatggcctgcacagcgtgacggcgcagtgtgtgctgcgcgtggtcatcatcacggaggagttgctggccaacagcctgaccgtgcgccttgagaacatgtggcaggagcgcttcctgtcaccgctgctgggccgcttcctcgagggcgtggctgcggtgctcgctacgcccgctgaggacgtcttcatcttcaacatccagaacgacacagacgtagggggcaccgtgctcaatgtgagtttctcggcgctagctccacgtggggccggggcgggcgctgcagggccctggttcagctccgaggagctgcaggagcagttgtacgtgcgccgggcggcgctggcggctcgctccctgctcgacgtactgcccttcgacgacaacgtgtgcctgcgagagccctgtgagaactacatgaaatgcgtgtccgtgctccgctttgactcgtccgcgcccttcctggcctcggcctccacgctgttccgacccatccagcccatcgctggcctgcgctgccgctgcccgcccggattcacgggagacttttgcgagaccgagctcgacctctgctactccaacccatgtcgcaacggcggagcctgcgcgcggcgcgagggaggctacacgtgcgtctgccgcccgcgcttcaccggagaggactgcgagctggacaccgaggccggccgctgcgtgccgggcgtctgccgcaacgggggcacctgcaccgacgcgcccaacggcggctttcgctgccagtgcccggcaggcggcgccttcgagggcccgcgctgcgaggtggctgcgcgctccttcccgcccagttcgttcgtcatgtttcgcggcctgcggcagcgattccaccttacgctgtccctctcgttcgcgacagtgcagcagagcgggctgctcttctacaacgggcgcctgaacgagaagcacgacttcctggccctggaactcgtggctggccaagtgcggctcacatattccacgggtgaatccaacaccgtggtcagccccacagttccagggggcttgagtgacgggcaatggcatacagtgcatctgagatactacaacaagccccggacagatgccctagggggtgcacagggcccctccaaggacaaggtggctgtgctaagcgtggatgattgtgatgtggccgtggctctgcagtttggtgctgagattggcaactactcatgcgcggctgctggtgtgcaaacaagctccaagaagtccctggacctgacgggccctcttcttctgggaggtgtccccaacctccccgagaacttccccgtatcccataaggacttcatcggctgtatgcgggacctgcacattgatggccgccgagtggacatggcggcttttgtcgcaaataatggcaccatggcaggctgccaagccaagctacacttttgtgactcaggcccctgcaagaacagtggcttctgctcggagcgctggggcagcttcagctgcgactgccctgtgggcttcggcggcaaagactgtcagcttactatggcccatccccaccatttccgtggcaacggcacactgagctggaactttggaagtgacatggctgtgtctgtgccatggtacctggggctggcatttcggacacgggcaacgcagggggtcctgatgcaagtgcaggctgggccacacagcacgctcctttgccagctagatcgggggttactgtctgtgacagtgaccaggggctcgggccgtgcttcccatctccttctggaccaggtgactgtcagtgatggccggtggcacgatctgcggctggagttgcaggaggaaccaggtggccggcggggccaccatgtccttatggtctcactggactttagcctcttccaggacaccatggcggtggggagtgagctgcagggcctgaaggtaaagcagctccacgtgggaggcctgccccccggcagtgcagaggaggctcctcagggtctggttggctgcatccagggggtgtggctcggctccacaccctctggctccccggccctgctaccccccagccaccgagtgaatgcggagcctggctgtgttgtgaccaacgcctgtgcctctgggccctgcccacctcacgcagactgccgggacctctggcagaccttttcttgcacctgccagccaggttactacggcccaggctgtgtggatgcctgcctcctgaacccctgtcagaaccagggatcatgccggcacctgccaggagccccccatggctatacctgtgactgtgtgggtggctatttcgggcaccactgtgagcacaggatggaccagcagtgcccacggggctggtgggggagcccaacctgtggcccctgcaactgtgatgttcacaaaggttttgatcccaactgcaacaagacaaatgggcagtgtcactgcaaggagttccactaccgaccgcggggcagtgactcttgcctcccatgtgactgctaccctgtgggctccacctcgcgctcatgtgcaccccacagcgggcagtgcccctgtcgcccaggagcccttggccgccagtgcaacagctgtgacagtcccttcgcagaggtgacagccagcggctgccgggtgctctatgatgcctgccctaagtccctgagatctggtgtgtggtggccccagacaaagtttggcgtcctggccacagtgccctgtccccggggggccctgggattgcggggtgcaggtgctgctgtgcggctgtgtgatgaggcccagggttggctggagcccgacctcttcaactgtacctcccctgcctttcgagagctcagtctgctgctggatggcctagagctgaacaagacggcactggataccatggaggccaagaagctggctcagcggctacgggaggtgactggccacactgaccactattttagccaagatgttcgagtcactgcccgcctgctggcccacctgctggccttcgagagccatcagcagggcttcgggctgacagccacacaggatgcccacttcaatgagaatctgctgtgggccggctctgcactgcttgccccagagacaggggacttgtgggcggcgctggggcagcgggcccctgggggctccccaggcagcgcgggactggtgaggcacctggaggagtatgcagccacactcgcaaggaatatggaactcacatacctgaatcccatggggctggtgacgcctaatatcatgctcagcattgaccgcatggagcaccccagttctccccggggggcccgtcgctaccctcgctaccatagcaacctctttcgaggccaggatgcctgggatcctcacacccatgtgctgctgccttcccagtccccacggccatccccatctgaagttctgcccacaagcagcagcatagaaaactccaccacctcaagtgtggtccccccaccagccccgccagagccagagcctgggatctccattatcattctcctcgtttaccgcaccttagggggactgctccctgcccagttccaggcagaacgccgaggtgccaggcttcctcagaaccccgtcatgaactccccggtggtcagcgtggctgtgttccacggacgcaacttcctaaggggaatcctggagtcccccatcagcctagagtttcgcctgctacagacagcgaatcggagcaaggcgatctgtgtgcagtgggacccacctggcctggcggagcagcatggtgtgtggacagcacgggactgcgagctggtgcacaggaatgggtcccacgcacggtgtcgctgcagccggacagggacctttggggtcctcatggatgcctctccccgtgagaggctggagggcgacctggagctgctggctgtgttcacccacgtggtcgtggctgtgtctgtggctgcgctggtgctgactgcagccatcctgctgagcctgcgcagcctcaagtccaatgtgcgtgggatccatgccaatgtggcagccgccctgggggtggcagagctcctcttcctgctggggattcacaggacccacaatcagctggtgtgcactgcagtcgccatcctcctgcactacttcttcctcagcaccttcgcgtggctcttcgtgcaggggctgcacctctaccgcatgcaggttgagccacgcaacgtggaccgcggcgccatgcgcttctaccatgccctgggctggggcgtccctgctgtgctgctgggccttgctgtgggcctggaccctgagggctatgggaaccctgacttctgctggatctcagtccacgagcccctcatctggagctttgctggccctgttgtcctggtcatagtgatgaacgggaccatgtttctcctcgctgcccgcacatcctgctccacagggcagagggaggccaagaagacctctgcactgacccttcgcagctccttcctgctgcttctgctggtcagtgcctcctggctctttgggctcctggcagtcaaccacagcatcctagccttccactacctccatgctggactctgcggcctccagggcctggcggtgctgctgctcttctgtgtcctaaatgcagatgctcgggctgcctggatgccagcctgtctgggcaggaaggcagcgcctgaggaggcaaggccagcacctgggctgggacctggggcctacaacaacacggctctctttgaggagagtggcctcatccgcatcactctgggcgcctccaccgtctcctctgtgagcagtgcccgctccggccggacccaggaccaggacagccagcggggccgcagctacctcagggacaatgtcctggttcgacatggctcagccgctgaccacactgaccacagcctccaggctcatgctggccccactgacctggacgtggccatgttccatcgagatgctggcgcagactccgactctgacagtgacctgtccttggaggaggagaggagtctctccattccatcttcagaaagcgaggacaatggccggacgcgggggcgcttccaacggccactctgccgagcagcccagagtgagaggctcctcacccaccccaaagatgtggatggcaatgacctcctgtcctactggccagccctgggggagtgcgaggcagccccctgtgctctgcagacttggggctctgaaaggcgcctggggctggacaccagcaaggatgcagctaacaacaaccagccagacccggccctgaccagtggggatgagacttctctgggccgggcccagcgccagaggaaaggcatcctgaagaaccggttgcaatacccactggtgccacagacccgaggtgcccctgagctgtcctggtgccgtgcagccaccttgggccaccgtgctgtgccagctgcctcttacggtcgcatctatgctggcgggggcacgggcagcctttcacagccagccagccgctactcttctagagaacagctggacctgctcctccggcggcaactgagccgtgagcgactagaggaagcccctgcccctgttctacgtcccctgagccggccagggtcccaggaatgcatggatgctgcaccaggccgactggagcccaaagatcggggcagcaccctgccacggaggcagccacctcgggactaccctggcgccatggctggccgcttcgggtcacgggatgcgctcgacttaggggcacctcgagagtggttgagcacgctgcctccgccccgccgcacccgggaccttgacccacagcccccacctctgcccctgtctccccagcggcaactctcaagggaccccctcttgccatcccggccgctggactctctgtctaggagctcgaactctcgggagcagctggaccaggtgcctagccggcacccctcacgagaagcccttgggccactcccgcagctgctcagagctagggaggactcggtcagtggccccagccatggcccctccacagaacagttggacattctttcctccatccttgcctctttcaactcctcggccctctcctctgtgcaatcttcaagcacacccttgggccctcacaccactgccacaccttctgccacagcctctgtgcttgggccctccacgccacgttctgccacgtctcacagcatctcggagctgtcgccagactcagaagttcccagaagtgagggtcactcctgaggggatgacggcgtggacgaggaacagctgagggcgacagaggatctaggctaacaggagagactccaggagtgggggcagatcccaaggcagcctcctgctccccagtggtgggtgccccagctctacctggtgtggcagggctgaggctccatgtgcatctgtgagcatgcgtgtgacaggtgcagagacgggggactggagggagacttttatacgttttgtacctttgtaaccagagagatgcttatgttatttttcagcttttctgtctcctggggggtttgaggctgggctgggagggggagggagatagagggagagatgcagtttgaccccatttgggtcctgagcaaaccctatgctcatctctctctccttcctggggtggactcagatgggtgggacacatgccttcctccccctattccacccccaagttgatctgagtatcgtcaggggcccaaagtacagaattgttctttgctttttattgaatgctccaaaggccaaacttctggggctgggggttggtcttggaaacaggggtcctctgacttcctcatgggggcttgctcataccgcccctcctggtggatgtgtgtgtttattatgtggagtccctgccacttactgccttatgacctaggactgatgctgtggggtgctggtggagcagctgatgtcgtgtttacagagcaaggcttccctgtctcccacggggaggggctcgggcctctagtcagacattcctgcagagggtcggtggaggggtcattcacctgcccctgcagcaagcaaaagttgtctgtggtgccatttgattccctgacactgccccctgcttgaattgattccgaagggtagggtgggaaggtgagcaaagggagcagaaacaagggaattcaagacccagaatgtaggtgccactgcctcctatgtttacaggatcctccgtggccctaggcacctgggctgcaggaagtgactccgttccactcctcctttattcccttaaaaagggaaaaatgactgttacgaccctgttcacaaaactcttacttttgctattttgtctgctgtccagaactgaagactttaaaattttgttactgtttacaagtccagattcaaaaaatgtttttactttgtttacaactcaaaactttgagttttacactttgtttacagtagataattttttttcctttgtttccaagtgaaaggtagggaaagtgggagagggacttggaggacccacctgtgaggaccctgacctggccatcttgaggggttttctaacccccaggtctcccaggccgaaggtcagccttgagtcccgtttaacagcagatccagaagaccttgagagtaggcgtcctctaaccacgggggagagtggctgtgcagggctggggggtggtctgtgcagacacctcctcacccaccaccccatgcatactcttgggaagcagcttcctgggagattagaaattctacttccctgactggagctaaatcccaccagccaggacccaaactctccttaccgagaaggaccccagctcttgaagggctgagtggcctgctgggggtgggagggtgtctttactatgtcctaggtttcgtagatgcccctctctggggttcccctcctccagcccagcggccctctttcctgtctgtgtaaattgttccgtgaagccgcgctctgttttgggaataaacttctatag

SEQ ID NO: 117591 - DNA, 9939 bp, Artificial Sequence
  derived and/or modified sequence
atgatggccagaagacccccctggagaggcctgggcggcagaagcacccccatcctgctgctgctgctgctgagcctgttccccctgagccaggaggagctgggcggcggcggccaccagggctgggaccccggcctggccgccaccaccggccccagagcccacatcggcggcggcgccctggccctgtgccccgagagcagcggcgtgagagaggacggcggccccggcctgggcgtgagagagcccatcttcgtgggcctgagaggcagaagacagagcgccagaaacagcagaggcccccccgagcagcccaacgaggagctgggcatcgagcacggcgtgcagcccctgggcagcagagagagagagaccggccagggccccggcagcgtgctgtactggagacccgaggtgagcagctgcggcagaaccggccccctgcagagaggcagcctgagccccggcgccctgagcagcggcgtgcccggcagcggcaacagcagccccctgcccagcgacttcctgatcagacaccacggccccaagcccgtgagcagccagagaaacgccggcaccggcagcagaaagagagtgggcaccgccagatgctgcggcgagctgtgggccaccggcagcaagggccagggcgagagagccaccaccagcggcgccgagagaaccgcccccagaagaaactgcctgcccggcgccagcggcagcggccccgagctggacagcgcccccagaaccgccagaaccgcccccgccagcggcagcgcccccagagagagcagaaccgcccccgagcccgcccccaagagaatgagaagcagaggcctgttcagatgcagattcctgccccagagacccggccccagaccccccggcctgcccgccagacccgaggccagaaaggtgaccagcgccaacagagccagattcagaagagccgccaacagacacccccagttcccccagtacaactaccagaccctggtgcccgagaacgaggccgccggcaccgccgtgctgagagtggtggcccaggaccccgacgccggcgaggccggcagactggtgtacagcctggccgccctgatgaacagcagaagcctggagctgttcagcatcgacccccagagcggcctgatcagaaccgccgccgccctggacagagagagcatggagagacactacctgagagtgaccgcccaggaccacggcagccccagactgagcgccaccaccatggtggccgtgaccgtggccgacagaaacgaccacagccccgtgttcgagcaggcccagtacagagagaccctgagagagaacgtggaggagggctaccccatcctgcagctgagagccaccgacggcgacgccccccccaacgccaacctgagatacagattcgtgggcccccccgccgccagagccgccgccgccgccgccttcgagatcgaccccagaagcggcctgatcagcaccagcggcagagtggacagagagcacatggagagctacgagctggtggtggaggccagcgaccagggccaggagcccggccccagaagcgccaccgtgagagtgcacatcaccgtgctggacgagaacgacaacgccccccagttcagcgagaagagatacgtggcccaggtgagagaggacgtgagaccccacaccgtggtgctgagagtgaccgccaccgacagagacaaggacgccaacggcctggtgcactacaacatcatcagcggcaacagcagaggccacttcgccatcgacagcctgaccggcgagatccaggtggtggcccccctggacttcgaggccgagagagagtacgccctgagaatcagagcccaggacgccggcagaccccccctgagcaacaacaccggcctggccagcatccaggtggtggacatcaacgaccacatccccatcttcgtgagcacccccttccaggtgagcgtgctggagaacgcccccctgggccacagcgtgatccacatccaggccgtggacgccgaccacggcgagaacgccagactggagtacagcctgaccggcgtggcccccgacacccccttcgtgatcaacagcgccaccggctgggtgagcgtgagcggccccctggacagagagagcgtggagcactacttcttcggcgtggaggccagagaccacggcagcccccccctgagcgccagcgccagcgtgaccgtgaccgtgctggacgtgaacgacaacagacccgagttcaccatgaaggagtaccacctgagactgaacgaggacgccgccgtgggcaccagcgtggtgagcgtgaccgccgtggacagagacgccaacagcgccatcagctaccagatcaccggcggcaacaccagaaacagattcgccatcagcacccagggcggcgtgggcctggtgaccctggccctgcccctggactacaagcaggagagatacttcaagctggtgctgaccgccagcgacagagccctgcacgaccactgctacgtgcacatcaacatcaccgacgccaacacccacagacccgtgttccagagcgcccactacagcgtgagcgtgaacgaggacagacccatgggcagcaccatcgtggtgatcagcgccagcgacgacgacgtgggcgagaacgccagaatcacctacctgctggaggacaacctgccccagttcagaatcgacgccgacagcggcgccatcaccctgcaggcccccctggactacgaggaccaggtgacctacaccctggccatcaccgccagagacaacggcatcccccagaaggccgacaccacctacgtggaggtgatggtgaacgacgtgaacgacaacgccccccagttcgtggccagccactacaccggcctggtgagcgaggacgccccccccttcaccagcgtgctgcagatcagcgccaccgacagagacgcccacgccaacggcagagtgcagtacaccttccagaacggcgaggacggcgacggcgacttcaccatcgagcccaccagcggcatcgtgagaaccgtgagaagactggacagagaggccgtgagcgtgtacgagctgaccgcctacgccgtggacagaggcgtgccccccctgagaacccccgtgagcatccaggtgatggtgcaggacgtgaacgacaacgcccccgtgttccccgccgaggagttcgaggtgagagtgaaggagaacagcatcgtgggcagcgtggtggcccagatcaccgccgtggaccccgacgagggccccaacgcccacatcatgtaccagatcgtggagggcaacatccccgagctgttccagatggacatcttcagcggcgagctgaccgccctgatcgacctggactacgaggccagacaggagtacgtgatcgtggtgcaggccaccagcgcccccctggtgagcagagccaccgtgcacgtgagactggtggaccagaacgacaacagccccgtgctgaacaacttccagatcctgttcaacaactacgtgagcaacagaagcgacaccttccccagcggcatcatcggcagaatccccgcctacgaccccgacgtgagcgaccacctgttctacagcttcgagagaggcaacgagctgcagctgctggtggtgaaccagaccagcggcgagctgagactgagcagaaagctggacaacaacagacccctggtggccagcatgctggtgaccgtgaccgacggcctgcacagcgtgaccgcccagtgcgtgctgagagtggtgatcatcaccgaggagctgctggccaacagcctgaccgtgagactggagaacatgtggcaggagagattcctgagccccctgctgggcagattcctggagggcgtggccgccgtgctggccacccccgccgaggacgtgttcatcttcaacatccagaacgacaccgacgtgggcggcaccgtgctgaacgtgagcttcagcgccctggcccccagaggcgccggcgccggcgccgccggcccctggttcagcagcgaggagctgcaggagcagctgtacgtgagaagagccgccctggccgccagaagcctgctggacgtgctgcccttcgacgacaacgtgtgcctgagagagccctgcgagaactacatgaagtgcgtgagcgtgctgagattcgacagcagcgcccccttcctggccagcgccagcaccctgttcagacccatccagcccatcgccggcctgagatgcagatgcccccccggcttcaccggcgacttctgcgagaccgagctggacctgtgctacagcaacccctgcagaaacggcggcgcctgcgccagaagagagggcggctacacctgcgtgtgcagacccagattcaccggcgaggactgcgagctggacaccgaggccggcagatgcgtgcccggcgtgtgcagaaacggcggcacctgcaccgacgcccccaacggcggcttcagatgccagtgccccgccggcggcgccttcgagggccccagatgcgaggtggccgccagaagcttcccccccagcagcttcgtgatgttcagaggcctgagacagagattccacctgaccctgagcctgagcttcgccaccgtgcagcagagcggcctgctgttctacaacggcagactgaacgagaagcacgacttcctggccctggagctggtggccggccaggtgagactgacctacagcaccggcgagagcaacaccgtggtgagccccaccgtgcccggcggcctgagcgacggccagtggcacaccgtgcacctgagatactacaacaagcccagaaccgacgccctgggcggcgcccagggccccagcaaggacaaggtggccgtgctgagcgtggacgactgcgacgtggccgtggccctgcagttcggcgccgagatcggcaactacagctgcgccgccgccggcgtgcagaccagcagcaagaagagcctggacctgaccggccccctgctgctgggcggcgtgcccaacctgcccgagaacttccccgtgagccacaaggacttcatcggctgcatgagagacctgcacatcgacggcagaagagtggacatggccgccttcgtggccaacaacggcaccatggccggctgccaggccaagctgcacttctgcgacagcggcccctgcaagaacagcggcttctgcagcgagagatggggcagcttcagctgcgactgccccgtgggcttcggcggcaaggactgccagctgaccatggcccacccccaccacttcagaggcaacggcaccctgagctggaacttcggcagcgacatggccgtgagcgtgccctggtacctgggcctggccttcagaaccagagccacccagggcgtgctgatgcaggtgcaggccggcccccacagcaccctgctgtgccagctggacagaggcctgctgagcgtgaccgtgaccagaggcagcggcagagccagccacctgctgctggaccaggtgaccgtgagcgacggcagatggcacgacctgagactggagctgcaggaggagcccggcggcagaagaggccaccacgtgctgatggtgagcctggacttcagcctgttccaggacaccatggccgtgggcagcgagctgcagggcctgaaggtgaagcagctgcacgtgggcggcctgccccccggcagcgccgaggaggccccccagggcctggtgggctgcatccagggcgtgtggctgggcagcacccccagcggcagccccgccctgctgccccccagccacagagtgaacgccgagcccggctgcgtggtgaccaacgcctgcgccagcggcccctgccccccccacgccgactgcagagacctgtggcagaccttcagctgcacctgccagcccggctactacggccccggctgcgtggacgcctgcctgctgaacccctgccagaaccagggcagctgcagacacctgcccggcgccccccacggctacacctgcgactgcgtgggcggctacttcggccaccactgcgagcacagaatggaccagcagtgccccagaggctggtggggcagccccacctgcggcccctgcaactgcgacgtgcacaagggcttcgaccccaactgcaacaagaccaacggccagtgccactgcaaggagttccactacagacccagaggcagcgacagctgcctgccctgcgactgctaccccgtgggcagcaccagcagaagctgcgccccccacagcggccagtgcccctgcagacccggcgccctgggcagacagtgcaacagctgcgacagccccttcgccgaggtgaccgccagcggctgcagagtgctgtacgacgcctgccccaagagcctgagaagcggcgtgtggtggccccagaccaagttcggcgtgctggccaccgtgccctgccccagaggcgccctgggcgccgccgtgagactgtgcgacgaggcccagggctggctggagcccgacctgttcaactgcaccagccccgccttcagagagctgagcctgctgctggacggcctggagctgaacaagaccgccctggacaccatggaggccaagaagctggcccagagactgagagaggtgaccggccacaccgaccactacttcagccaggacgtgagagtgaccgccagactgctggcccacctgctggccttcgagagccaccagcagggcttcggcctgaccgccacccaggacgcccacttcaacgagaacctgctgtgggccggcagcgccctgctggcccccgagaccggcgacctgtgggccgccctgggccagagagcccccggcggcagccccggcagcgccggcctggtgagacacctggaggagtacgccgccaccctggccagaaacatggagctgacctacctgaaccccatgggcctggtgacccccaacatcatgctgagcatcgacagaatggagcaccccagcagccccagaggcgccagaagataccccagataccacagcaacctgttcagaggccaggacgcctgggacccccacacccacgtgctgctgcccagccagagccccagacccagccccagcgaggtgctgcccaccagcagcagcatcgagaacagcaccaccagcagcgtggtgcccccccccgccccccccgagcccgagcccggcatcagcatcatcatcctgctggtgtacagaaccctgggcggcctgctgcccgcccagttccaggccgagagaagaggcgccagactgccccagaaccccgtgatgaacagccccgtggtgagcgtggccgtgttccacggcagaaacttcctgagaggcatcctggagagccccatcagcctggagttcagactgctgcagaccgccaacagaagcaaggccatctgcgtgcagtgggacccccccggcctggccgagcagcacggcgtgtggaccgccagagactgcgagctggtgcacagaaacggcagccacgccagatgcagatgcagcagaaccggcaccttcggcgtgctgatggacgccagccccagagagagactggagggcgacctggagctgctggccgtgttcacccacgtggtggtggccgtgagcgtggccgccctggtgctgaccgccgccatcctgctgagcctgagaagcctgaagagcaacgtgagaggcatccacgccaacgtggccgccgccctgggcgtggccgagctgctgttcctgctgggcatccacagaacccacaaccagctggtgtgcaccgccgtggccatcctgctgcactacttcttcctgagcaccttcgcctggctgttcgtgcagggcctgcacctgtacagaatgcaggtggagcccagaaacgtggacagaggcgccatgagattctaccacgccctgggctggggcgtgcccgccgtgctgctgggcctggccgtgggcctggaccccgagggctacggcaaccccgacttctgctggatcagcgtgcacgagcccctgatctggagcttcgccggccccgtggtgctggtgatcgtgatgaacggcaccatgttcctgctggccgccagaaccagctgcagcaccggccagagagaggccaagaagaccagcgccctgaccctgagaagcagcttcctgctgctgctgctggtgagcgccagctggctgttcggcctgctggccgtgaaccacagcatcctggccttccactacctgcacgccggcctgtgcggcctgcagggcctggccgtgctgctgctgttctgcgtgctgaacgccgacgccagagccgcctggatgcccgcctgcctgggcagaaaggccgcccccgaggaggccagacccgcccccggcctgggccccggcgcctacaacaacaccgccctgttcgaggagagcggcctgatcagaatcaccctgggcgccagcaccgtgagcagcgtgagcagcgccagaagcggcagaacccaggaccaggacagccagagaggcagaagctacctgagagacaacgtgctggtgagacacggcagcgccgccgaccacaccgaccacagcctgcaggcccacgccggccccaccgacctggacgtggccatgttccacagagacgccggcgccgacagcgacagcgacagcgacctgagcctggaggaggagagaagcctgagcatccccagcagcgagagcgaggacaacggcagaaccagaggcagattccagagacccctgtgcagagccgcccagagcgagagactgctgacccaccccaaggacgtggacggcaacgacctgctgagctactggcccgccctgggcgagtgcgaggccgccccctgcgccctgcagacctggggcagcgagagaagactgggcctggacaccagcaaggacgccgccaacaacaaccagcccgaccccgccctgaccagcggcgacgagaccagcctgggcagagcccagagacagagaaagggcatcctgaagaacagactgcagtaccccctggtgccccagaccagaggcgcccccgagctgagctggtgcagagccgccaccctgggccacagagccgtgcccgccgccagctacggcagaatctacgccggcggcggcaccggcagcctgagccagcccgccagcagatacagcagcagagagcagctggacctgctgctgagaagacagctgagcagagagagactggaggaggcccccgcccccgtgctgagacccctgagcagacccggcagccaggagtgcatggacgccgcccccggcagactggagcccaaggacagaggcagcaccctgcccagaagacagccccccagagactaccccggcgccatggccggcagattcggcagcagagacgccctggacctgggcgcccccagagagtggctgagcaccctgcccccccccagaagaaccagagacctggacccccagcccccccccctgcccctgagcccccagagacagctgagcagagaccccctgctgcccagcagacccctggacagcctgagcagaagcagcaacagcagagagcagctggaccaggtgcccagcagacaccccagcagagaggccctgggccccctgccccagctgctgagagccagagaggacagcgtgagcggccccagccacggccccagcaccgagcagctggacatcctgagcagcatcctggccagcttcaacagcagcgccctgagcagcgtgcagagcagcagcacccccctgggcccccacaccaccgccacccccagcgccaccgccagcgtgctgggccccagcacccccagaagcgccaccagccacagcatcagcgagctgagccccgacagcgaggtgcccagaagcgagggccacagctag

SEQ ID NO: 117592 - DNA, 9954 bp, Artificial Sequence
  derived and/or modified sequence
atgatggccagaagacccccctggagaggcctgggcggcagaagcacccccatcctgctgctgctgctgctgagcctgttccccctgagccaggaggagctgggcggcggcggccaccagggctgggaccccggcctggccgccaccaccggccccagagcccacatcggcggcggcgccctggccctgtgccccgagagcagcggcgtgagagaggacggcggccccggcctgggcgtgagagagcccatcttcgtgggcctgagaggcagaagacagagcgccagaaacagcagaggcccccccgagcagcccaacgaggagctgggcatcgagcacggcgtgcagcccctgggcagcagagagagagagaccggccagggccccggcagcgtgctgtactggagacccgaggtgagcagctgcggcagaaccggccccctgcagagaggcagcctgagccccggcgccctgagcagcggcgtgcccggcagcggcaacagcagccccctgcccagcgacttcctgatcagacaccacggccccaagcccgtgagcagccagagaaacgccggcaccggcagcagaaagagagtgggcaccgccagatgctgcggcgagctgtgggccaccggcagcaagggccagggcgagagagccaccaccagcggcgccgagagaaccgcccccagaagaaactgcctgcccggcgccagcggcagcggccccgagctggacagcgcccccagaaccgccagaaccgcccccgccagcggcagcgcccccagagagagcagaaccgcccccgagcccgcccccaagagaatgagaagcagaggcctgttcagatgcagattcctgccccagagacccggccccagaccccccggcctgcccgccagacccgaggccagaaaggtgaccagcgccaacagagccagattcagaagagccgccaacagacacccccagttcccccagtacaactaccagaccctggtgcccgagaacgaggccgccggcaccgccgtgctgagagtggtggcccaggaccccgacgccggcgaggccggcagactggtgtacagcctggccgccctgatgaacagcagaagcctggagctgttcagcatcgacccccagagcggcctgatcagaaccgccgccgccctggacagagagagcatggagagacactacctgagagtgaccgcccaggaccacggcagccccagactgagcgccaccaccatggtggccgtgaccgtggccgacagaaacgaccacagccccgtgttcgagcaggcccagtacagagagaccctgagagagaacgtggaggagggctaccccatcctgcagctgagagccaccgacggcgacgccccccccaacgccaacctgagatacagattcgtgggcccccccgccgccagagccgccgccgccgccgccttcgagatcgaccccagaagcggcctgatcagcaccagcggcagagtggacagagagcacatggagagctacgagctggtggtggaggccagcgaccagggccaggagcccggccccagaagcgccaccgtgagagtgcacatcaccgtgctggacgagaacgacaacgccccccagttcagcgagaagagatacgtggcccaggtgagagaggacgtgagaccccacaccgtggtgctgagagtgaccgccaccgacagagacaaggacgccaacggcctggtgcactacaacatcatcagcggcaacagcagaggccacttcgccatcgacagcctgaccggcgagatccaggtggtggcccccctggacttcgaggccgagagagagtacgccctgagaatcagagcccaggacgccggcagaccccccctgagcaacaacaccggcctggccagcatccaggtggtggacatcaacgaccacatccccatcttcgtgagcacccccttccaggtgagcgtgctggagaacgcccccctgggccacagcgtgatccacatccaggccgtggacgccgaccacggcgagaacgccagactggagtacagcctgaccggcgtggcccccgacacccccttcgtgatcaacagcgccaccggctgggtgagcgtgagcggccccctggacagagagagcgtggagcactacttcttcggcgtggaggccagagaccacggcagcccccccctgagcgccagcgccagcgtgaccgtgaccgtgctggacgtgaacgacaacagacccgagttcaccatgaaggagtaccacctgagactgaacgaggacgccgccgtgggcaccagcgtggtgagcgtgaccgccgtggacagagacgccaacagcgccatcagctaccagatcaccggcggcaacaccagaaacagattcgccatcagcacccagggcggcgtgggcctggtgaccctggccctgcccctggactacaagcaggagagatacttcaagctggtgctgaccgccagcgacagagccctgcacgaccactgctacgtgcacatcaacatcaccgacgccaacacccacagacccgtgttccagagcgcccactacagcgtgagcgtgaacgaggacagacccatgggcagcaccatcgtggtgatcagcgccagcgacgacgacgtgggcgagaacgccagaatcacctacctgctggaggacaacctgccccagttcagaatcgacgccgacagcggcgccatcaccctgcaggcccccctggactacgaggaccaggtgacctacaccctggccatcaccgccagagacaacggcatcccccagaaggccgacaccacctacgtggaggtgatggtgaacgacgtgaacgacaacgccccccagttcgtggccagccactacaccggcctggtgagcgaggacgccccccccttcaccagcgtgctgcagatcagcgccaccgacagagacgcccacgccaacggcagagtgcagtacaccttccagaacggcgaggacggcgacggcgacttcaccatcgagcccaccagcggcatcgtgagaaccgtgagaagactggacagagaggccgtgagcgtgtacgagctgaccgcctacgccgtggacagaggcgtgccccccctgagaacccccgtgagcatccaggtgatggtgcaggacgtgaacgacaacgcccccgtgttccccgccgaggagttcgaggtgagagtgaaggagaacagcatcgtgggcagcgtggtggcccagatcaccgccgtggaccccgacgagggccccaacgcccacatcatgtaccagatcgtggagggcaacatccccgagctgttccagatggacatcttcagcggcgagctgaccgccctgatcgacctggactacgaggccagacaggagtacgtgatcgtggtgcaggccaccagcgcccccctggtgagcagagccaccgtgcacgtgagactggtggaccagaacgacaacagccccgtgctgaacaacttccagatcctgttcaacaactacgtgagcaacagaagcgacaccttccccagcggcatcatcggcagaatccccgcctacgaccccgacgtgagcgaccacctgttctacagcttcgagagaggcaacgagctgcagctgctggtggtgaaccagaccagcggcgagctgagactgagcagaaagctggacaacaacagacccctggtggccagcatgctggtgaccgtgaccgacggcctgcacagcgtgaccgcccagtgcgtgctgagagtggtgatcatcaccgaggagctgctggccaacagcctgaccgtgagactggagaacatgtggcaggagagattcctgagccccctgctgggcagattcctggagggcgtggccgccgtgctggccacccccgccgaggacgtgttcatcttcaacatccagaacgacaccgacgtgggcggcaccgtgctgaacgtgagcttcagcgccctggcccccagaggcgccggcgccggcgccgccggcccctggttcagcagcgaggagctgcaggagcagctgtacgtgagaagagccgccctggccgccagaagcctgctggacgtgctgcccttcgacgacaacgtgtgcctgagagagccctgcgagaactacatgaagtgcgtgagcgtgctgagattcgacagcagcgcccccttcctggccagcgccagcaccctgttcagacccatccagcccatcgccggcctgagatgcagatgcccccccggcttcaccggcgacttctgcgagaccgagctggacctgtgctacagcaacccctgcagaaacggcggcgcctgcgccagaagagagggcggctacacctgcgtgtgcagacccagattcaccggcgaggactgcgagctggacaccgaggccggcagatgcgtgcccggcgtgtgcagaaacggcggcacctgcaccgacgcccccaacggcggcttcagatgccagtgccccgccggcggcgccttcgagggccccagatgcgaggtggccgccagaagcttcccccccagcagcttcgtgatgttcagaggcctgagacagagattccacctgaccctgagcctgagcttcgccaccgtgcagcagagcggcctgctgttctacaacggcagactgaacgagaagcacgacttcctggccctggagctggtggccggccaggtgagactgacctacagcaccggcgagagcaacaccgtggtgagccccaccgtgcccggcggcctgagcgacggccagtggcacaccgtgcacctgagatactacaacaagcccagaaccgacgccctgggcggcgcccagggccccagcaaggacaaggtggccgtgctgagcgtggacgactgcgacgtggccgtggccctgcagttcggcgccgagatcggcaactacagctgcgccgccgccggcgtgcagaccagcagcaagaagagcctggacctgaccggccccctgctgctgggcggcgtgcccaacctgcccgagaacttccccgtgagccacaaggacttcatcggctgcatgagagacctgcacatcgacggcagaagagtggacatggccgccttcgtggccaacaacggcaccatggccggctgccaggccaagctgcacttctgcgacagcggcccctgcaagaacagcggcttctgcagcgagagatggggcagcttcagctgcgactgccccgtgggcttcggcggcaaggactgccagctgaccatggcccacccccaccacttcagaggcaacggcaccctgagctggaacttcggcagcgacatggccgtgagcgtgccctggtacctgggcctggccttcagaaccagagccacccagggcgtgctgatgcaggtgcaggccggcccccacagcaccctgctgtgccagctggacagaggcctgctgagcgtgaccgtgaccagaggcagcggcagagccagccacctgctgctggaccaggtgaccgtgagcgacggcagatggcacgacctgagactggagctgcaggaggagcccggcggcagaagaggccaccacgtgctgatggtgagcctggacttcagcctgttccaggacaccatggccgtgggcagcgagctgcagggcctgaaggtgaagcagctgcacgtgggcggcctgccccccggcagcgccgaggaggccccccagggcctggtgggctgcatccagggcgtgtggctgggcagcacccccagcggcagccccgccctgctgccccccagccacagagtgaacgccgagcccggctgcgtggtgaccaacgcctgcgccagcggcccctgccccccccacgccgactgcagagacctgtggcagaccttcagctgcacctgccagcccggctactacggccccggctgcgtggacgcctgcctgctgaacccctgccagaaccagggcagctgcagacacctgcccggcgccccccacggctacacctgcgactgcgtgggcggctacttcggccaccactgcgagcacagaatggaccagcagtgccccagaggctggtggggcagccccacctgcggcccctgcaactgcgacgtgcacaagggcttcgaccccaactgcaacaagaccaacggccagtgccactgcaaggagttccactacagacccagaggcagcgacagctgcctgccctgcgactgctaccccgtgggcagcaccagcagaagctgcgccccccacagcggccagtgcccctgcagacccggcgccctgggcagacagtgcaacagctgcgacagccccttcgccgaggtgaccgccagcggctgcagagtgctgtacgacgcctgccccaagagcctgagaagcggcgtgtggtggccccagaccaagttcggcgtgctggccaccgtgccctgccccagaggcgccctgggcctgagaggcgccggcgccgccgtgagactgtgcgacgaggcccagggctggctggagcccgacctgttcaactgcaccagccccgccttcagagagctgagcctgctgctggacggcctggagctgaacaagaccgccctggacaccatggaggccaagaagctggcccagagactgagagaggtgaccggccacaccgaccactacttcagccaggacgtgagagtgaccgccagactgctggcccacctgctggccttcgagagccaccagcagggcttcggcctgaccgccacccaggacgcccacttcaacgagaacctgctgtgggccggcagcgccctgctggcccccgagaccggcgacctgtgggccgccctgggccagagagcccccggcggcagccccggcagcgccggcctggtgagacacctggaggagtacgccgccaccctggccagaaacatggagctgacctacctgaaccccatgggcctggtgacccccaacatcatgctgagcatcgacagaatggagcaccccagcagccccagaggcgccagaagataccccagataccacagcaacctgttcagaggccaggacgcctgggacccccacacccacgtgctgctgcccagccagagccccagacccagccccagcgaggtgctgcccaccagcagcagcatcgagaacagcaccaccagcagcgtggtgcccccccccgccccccccgagcccgagcccggcatcagcatcatcatcctgctggtgtacagaaccctgggcggcctgctgcccgcccagttccaggccgagagaagaggcgccagactgccccagaaccccgtgatgaacagccccgtggtgagcgtggccgtgttccacggcagaaacttcctgagaggcatcctggagagccccatcagcctggagttcagactgctgcagaccgccaacagaagcaaggccatctgcgtgcagtgggacccccccggcctggccgagcagcacggcgtgtggaccgccagagactgcgagctggtgcacagaaacggcagccacgccagatgcagatgcagcagaaccggcaccttcggcgtgctgatggacgccagccccagagagagactggagggcgacctggagctgctggccgtgttcacccacgtggtggtggccgtgagcgtggccgccctggtgctgaccgccgccatcctgctgagcctgagaagcctgaagagcaacgtgagaggcatccacgccaacgtggccgccgccctgggcgtggccgagctgctgttcctgctgggcatccacagaacccacaaccagctggtgtgcaccgccgtggccatcctgctgcactacttcttcctgagcaccttcgcctggctgttcgtgcagggcctgcacctgtacagaatgcaggtggagcccagaaacgtggacagaggcgccatgagattctaccacgccctgggctggggcgtgcccgccgtgctgctgggcctggccgtgggcctggaccccgagggctacggcaaccccgacttctgctggatcagcgtgcacgagcccctgatctggagcttcgccggccccgtggtgctggtgatcgtgatgaacggcaccatgttcctgctggccgccagaaccagctgcagcaccggccagagagaggccaagaagaccagcgccctgaccctgagaagcagcttcctgctgctgctgctggtgagcgccagctggctgttcggcctgctggccgtgaaccacagcatcctggccttccactacctgcacgccggcctgtgcggcctgcagggcctggccgtgctgctgctgttctgcgtgctgaacgccgacgccagagccgcctggatgcccgcctgcctgggcagaaaggccgcccccgaggaggccagacccgcccccggcctgggccccggcgcctacaacaacaccgccctgttcgaggagagcggcctgatcagaatcaccctgggcgccagcaccgtgagcagcgtgagcagcgccagaagcggcagaacccaggaccaggacagccagagaggcagaagctacctgagagacaacgtgctggtgagacacggcagcgccgccgaccacaccgaccacagcctgcaggcccacgccggccccaccgacctggacgtggccatgttccacagagacgccggcgccgacagcgacagcgacagcgacctgagcctggaggaggagagaagcctgagcatccccagcagcgagagcgaggacaacggcagaaccagaggcagattccagagacccctgtgcagagccgcccagagcgagagactgctgacccaccccaaggacgtggacggcaacgacctgctgagctactggcccgccctgggcgagtgcgaggccgccccctgcgccctgcagacctggggcagcgagagaagactgggcctggacaccagcaaggacgccgccaacaacaaccagcccgaccccgccctgaccagcggcgacgagaccagcctgggcagagcccagagacagagaaagggcatcctgaagaacagactgcagtaccccctggtgccccagaccagaggcgcccccgagctgagctggtgcagagccgccaccctgggccacagagccgtgcccgccgccagctacggcagaatctacgccggcggcggcaccggcagcctgagccagcccgccagcagatacagcagcagagagcagctggacctgctgctgagaagacagctgagcagagagagactggaggaggcccccgcccccgtgctgagacccctgagcagacccggcagccaggagtgcatggacgccgcccccggcagactggagcccaaggacagaggcagcaccctgcccagaagacagccccccagagactaccccggcgccatggccggcagattcggcagcagagacgccctggacctgggcgcccccagagagtggctgagcaccctgcccccccccagaagaaccagagacctggacccccagcccccccccctgcccctgagcccccagagacagctgagcagagaccccctgctgcccagcagacccctggacagcctgagcagaagcagcaacagcagagagcagctggaccaggtgcccagcagacaccccagcagagaggccctgggccccctgccccagctgctgagagccagagaggacagcgtgagcggccccagccacggccccagcaccgagcagctggacatcctgagcagcatcctggccagcttcaacagcagcgccctgagcagcgtgcagagcagcagcacccccctgggcccccacaccaccgccacccccagcgccaccgccagcgtgctgggccccagcacccccagaagcgccaccagccacagcatcagcgagctgagccccgacagcgaggtgcccagaagcgagggccacagctag

SEQ ID NO: 117593 - protein, 2778 aa, Artificial Sequence
  derived and/or modified sequence
MALGKVLAMALVLALAVLGSLSPGARAGDCKGQRQVLREAPGFVTDGAGNYSVNGNCEWLIEAPSPQHRILLDFLFLDTECTYDYLFVYDGDSPRGPLLASLSGSTRPPPIEASSGKMLLHLFSDANYNLLGFNASFRFSLCPGGCQSHGQCQPPGVCACEPGWGGPDCGLQECSAYCGSHGTCASPLGPCRCEPGFLGRACDLHLWENQGAGWWHNVSARDPAFSARIGAAGAFLSPPGLLAVFGGQDLNNALGDLVLYNFSANTWESWDLSPAPAARHSHVAVAWAGSLVLMGGELADGSLTNDVWAFSPLGRGHWELLAPPASSSSGPPGLAGHAAALVDDVWLYVSGGRTPHDLFSSGLFRFRLDSTSGGYWEQVIPAGGRPPAATGHSMVFHAPSRALLVHGGHRPSTARFSVRVNSTELFHVDRHVWTTLKGRDGLQGPRERAFHTASVLGNYMVVYGGNVHTHYQEEKCYEDGIFFYHLGCHQWVSGAELAPPGTPEGRAAPPSGRYSHVAAVLGGSVLLVAGGYSGRPRGDLMAYKVPPFVFQAPAPDYHLDYCSMYTDHSVCSRDPECSWCQGACQAAPPPGTPLGACPAASCLGLGRLLGDCQACLAFSSPTAPPRGPGTLGWCVHNESCLPRPEQARCRGEQISGTVGWWGPAPVFVTSLEACVTQSFLPGLHLLTFQQPPNTSQPDKEEVGRWVAHQEKETRRLQRPGSARLFPLPGRDHKYAVEIQGQLNGSAGPGHSELTLLWDRTGVPGGSEISFFFLEPYRSSSCTSYSSCLGCLADQGCGWCLTSATCHLRQGGAHCGDDGAGGSLLVLVPTLCPLCEEHRDCHACTQDPFCEWHQSTSRKGDAACSRRGRGRGALKSPEECPPLCSQRLTCEDCLANSSQCAWCQSTHTCFLFAAYLARYPHGGCRGWDDSVHSEPRCRSCDGFLTCHECLQSHECGWCGNEDNPTLGRCLQGDFSGPLGGGNCSLWVGEGLGLPVALPARWAYARCPDVDECRLGLARCHPRATCLNTPLSYECHCQRGYQGDGISHCNRTCLEDCGHGVCSGPPDFTCVCDLGWTSDLPPPTPAPGPPAPRCSRDCGCSFHSHCRKRGPGFCDECQDWTWGEHCERCRPGSFGNATGSRGCRPCQCNGHGDPRRGHCDNLSGLCFCQDHTEGAHCQLCSPGYYGDPRAGGSCFRECGGRALLTNVSSVALGSRRVGGLLPPGGGAARAGPGLSYCVWVVSATEELQPCAPGTLCPPLTLTFSPDSSTPCTLSYVLAFDGFPRFLDTGVVQSDRSLIAAFCGQRRDRPLTVQALSGLLVLHWEANGSSSWGFNASVGSARCGSGGPGSCPVPQECVPQDGAAGAGLCRCPQGWAGPHCRMALCPENCNAHTGAGTCNQSLGVCICAEGFGGPDCATKLDGGQLVWETLMDSRLSADTASRFLHRLGHTMVDGPDATLWMFGGLGLPQGLLGNLYRYSVSERRWTQMLAGAEDGGPGPSPRSFHAAAYVPAGRGAMYLLGGLTAGGVTRDFWVLNLTTLQWRQEKAPQTVELPAVAGHTLTARRGLSLLLVGGYSPENGFNQQLLEYQLATGTWVSGAQSGTPPTGLYGHSAVYHEATDSLYVFGGFRFHVELAAPSPELYSLHCPDRTWSLLAPSQGAKRDRMRNVRGSSRGLGQVPGEQPGSWGFREVRKKMALWAALAGTGGFLEEISPHLKEPRPRLFHASALLGDTMVVLGGRSDPDEFSSDVLLYQVNCNAWLLPDLTRSASVGPPMEESVAHAVAAVGSRLYISGGFGGVALGRLLALTLPPDPCRLLSSPEACNQSGACTWCHGACLSGDQAHRLGCGGSPCSPMPRSPEECRRLRTCSECLARHPRTLQPGDGEASTPRCKWCTNCPEGACIGRNGSCTSENDCRINQREVFWAGNCSEAACGAADCEQCTREGKCMWTRQFKRTGETRRILSVQPTYDWTCFSHSLLNVSPMPVESSPPLPCPTPCHLLPNCTSCLDSKGADGGWQHCVWSSSLQQCLSPSYLPLRCMAGGCGRLLRGPESCSLGCAQATQCALCLRRPHCGWCAWGGQDGGGRCMEGGLSGPRDGLTCGRPGASWAFLSCPPEDECANGHHDCNETQNCHDQPHGYECSCKTGYTMDNMTGLCRPVCAQGCVNGSCVEPDHCRCHFGFVGRNCSTECRCNRHSECAGVGARDHCLLCRNHTKGSHCEQCLPLFVGSAVGGGTCRPCHAFCRGNSHICISRKELQMSKGEPKKYSLDPEEIENWVTEGPSEDEAVCVNCQNNSYGEKCESCLQGYFLLDGKCTKCQCNGHADTCNEQDGTGCPCQNNTETGTCQGSSPSDRRDCYKYQCAKCRESFHGSPLGGQQCYRLISVEQECCLDPTSQTNCFHEPKRRALGPGRTVLFGVQPKFTNVDIRLTLDVTFGAVDLYVSTSYDTFVVRVAPDTGVHTVHIQPPPAPPPPPPPADGGPRGAGDPGGAGASSGPGAPAEPRVREVWPRGLITYVTVTEPSAVLVVRGVRDRLVITYPHEHHALKSSRFYLLLLGVGDPSGPGANGSADSQGLLFFRQDQAHIDLFVFFSVFFSCFFLFLSLCVLLWKAKQALDQRQEQRRHLQEMTKMASRPFAKVTVCFPPDPTAPASAWKPAGLPPPAFRRSEPFLAPLLLTGAGGPWGPMGGGCCPPAIPATTAGLRAGPITLEPTEDGMAGVATLLLQLPGGPHAPNGACLGSALVTLRHRLHEYCGGGGGAGGSGHGTGAGRKGLLSQDNLTSMSL

SEQ ID NO: 117594 - protein, 439 aa, Artificial Sequence
  derived and/or modified sequence
MRELPAGLLPPGREVHQCAKCRESFHGSPLGGQQCYRLISVEQECCLDPTSQTNCFHEPKRRALGPGRTVLFGVQPKFTNVDIRLTLDVTFGAVDLYVSTSYDTFVVRVAPDTGVHTVHIQPPPAPPPPPPPADGGPRGAGDPGGAGASSGPGAPAEPRVREVWPRGLITYVTVTEPSAVLVVRGVRDRLVITYPHEHHALKSSRFYLLLLGVGDPSGPGANGSADSQGLLFFRQDQAHIDLFVFFSVFFSCFFLFLSLCVLLWKAKQALDQRQEQRRHLQEMTKMASRPFAKVTVCFPPDPTAPASAWKPAGLPPPAFRRSEPFLAPLLLTGAGGPWGPMGGGCCPPAIPATTAGLRAGPITLEPTEDGMAGVATLLLQLPGGPHAPNGACLGSALVTLRHRLHEYCGGGGGAGGSGHGTGAGRKGLLSQDNLTSMSL

SEQ ID NO: 117595 - DNA, 306 bp, Artificial Sequence
  derived and/or modified sequence
atgctcgtgggtaacagagcccgggagcgtgagctcaagcaggatcgcagggggctggagattgcctgggatctgatgaagcgccaggactgctttcgggaagctgcccacgggtccgcctctgagcaagtggcacttgagcctattctgtgctgtgacgaggtcgcctctcaggagcaccacgagggcggaaaagggtctcctcgccgggagtcaacagtccaggtccccgggggcgatcacggcaccctggaactgccctggtgtgtgtacttccagatcgtgtctggcatcaccctgcgttag

SEQ ID NO: 117596 - DNA, 414 bp, Artificial Sequence
  derived and/or modified sequence
atgaccagccccctggtgtttgccagcctgagcccagatgccatggccaagatgctggagatggccgccctgaatgtgggcaccatccgcatcagcctgaacacagagcccaggcctcctgtgatcacccagctggcccccagccctgagaccctgcccttctgcccagagtggggcgctgagaaccagagccgccacctgaagctgccccccttcttcatctgccgctgccggggccccctgtaccaggaggagagcctgtctgagatccactgccacagcggcctcttcctggaccagctgagcctgcccacccccttcagcagcctgtctgtgtccctcatccactggaccttcatcagcaccaagtatgtgcccggcatcatgctggccttcggcggcaccaacaagtag

SEQ ID NO: 117597 - DNA, 8337 bp, Artificial Sequence
  derived and/or modified sequence
atggcgctcgggaaagtgctcgccatggcccttgtgctagccctggccgtgctgggatccctcagccctggggctagagcgggtgactgtaagggtcagaggcaagttctgagagaggcccccggctttgtgaccgacggcgctggtaactactccgtcaacggcaactgcgaatggctgatagaagcccccagccctcagcatcgtatcctcctcgatttcctgttccttgacacggagtgcacatatgattatctctttgtatacgacggggacagtccacgggggcccctcctggcgtccctcagcggatcgacacgcccacctcctatagaggccagctcaggaaagatgctgctccacctgttctcggacgctaactacaatcttcttggatttaacgcatcattcagattcagtttgtgtcctggcggatgccagagtcacggtcagtgtcagccaccgggtgtgtgtgcctgcgaacccggatggggaggtcccgattgtggccttcaggagtgctcagcttattgtggctcccacggcacatgtgctagtccactaggtccgtgccgctgcgagcccgggttcttagggcgggcctgcgacttgcacttatgggaaaaccaaggcgccggttggtggcacaacgtgtccgctcgcgatcctgccttttctgctagaatcggcgccgctggcgcgtttctctcaccaccagggctgcttgcagtgtttggtggtcaagacctgaataatgctctgggcgaccttgtgctttacaacttctctgccaatacatgggagtcctgggatttgtccccagcacccgccgcacggcacagccacgtggcggtggcatgggcgggaagtctggtcctcatgggaggggagcttgccgatggaagccttactaacgatgtgtgggcctttagccccctaggcaggggccattgggaactgctggccccaccagcaagctcttcttccggtccaccaggcctcgcaggccatgctgctgccttggtagacgacgtctggctttatgtgagcggaggtcgaaccccacacgacctctttagctctgggttgtttcggttccgcctggattcgacaagtggcggatactgggaacaagttattccagccggggggcgcccccccgctgccacgggccactctatggtgtttcacgctccgtcccgggccctgttggtgcacggagggcacaggcccagtacagcccggttctccgtgagagtgaatagtaccgaactttttcacgtggatagacacgtttggacaactctgaaaggacgggatggacttcaggggccacgcgagcgagcctttcatacggcgtcagtgcttggcaactatatggtagtgtatggaggcaatgtgcatacccactatcaggaagagaagtgttatgaagacggaattttcttttaccacttggggtgccaccaatgggtatctggtgctgagttggccccccctggcacccccgagggaagagcggctcctccaagcggccgatacagccacgtggcagctgttttaggcggttcagtccttctagttgccgggggatattctggcagaccgcggggcgatctcatggcctacaaggtgcccccatttgtgttccaggcacccgcccccgattatcatctagattattgttctatgtatacggatcactccgtctgctctagggatcccgagtgttcatggtgccagggcgcttgccaggctgctcctccacccgggacacctttgggcgcctgccctgcagctagttgcctgggcttagggaggctcctcggtgactgtcaggcctgtctggctttttcctcgcccactgcccccccaagaggcccaggaaccctcgggtggtgtgtacacaacgaatcttgcttgcctagaccagagcaggccagatgtcgaggagaacagatatcaggcaccgtcgggtggtgggggcctgcaccggtgttcgtcactagcctcgaggcctgcgtgactcaatctttcctccctggcctgcatctgcttacctttcagcagcctcccaacacctctcaaccagacaaggaggaagtaggtagatgggtagcacaccaggagaaagagacccgcagactgcagcgccccgggagtgcaaggctcttcccactcccaggccgtgaccacaaatacgccgtggagatccagggccagctaaacgggtcagccggtccgggccatagtgagttgacgcttctgtgggacaggaccggcgtgcctggcggttctgagatttctttcttctttcttgaaccttatcgctcctctagctgtacctcgtactcgtcgtgtttaggatgtcttgctgaccagggttgtgggtggtgtttaacatctgccacatgccaccttcgacagggcggtgctcactgtggcgatgatggcgcaggaggctctcttctagtccttgtgcccacattgtgtcctctctgcgaggaacatagagactgccatgcctgtacgcaggatcctttctgcgagtggcatcaatccaccagtagaaaaggagatgctgcttgctccagacgaggccggggacggggagctctcaagagtccagaagagtgcccccccctctgcagtcaacggctgacatgcgaggattgtctggccaattctagtcagtgcgcatggtgccaatctactcatacctgcttcttattcgcagcatatctagctcgatatccacacggcggatgccgcggctgggatgattctgtgcattctgaaccacggtgtagatcctgcgatggtttccttacttgtcacgaatgtttgcagagtcacgagtgtggctggtgtggcaacgaagacaatccaacattagggcgatgtctgcaaggggactttagtggacctctgggaggtgggaattgtagtctgtgggttggagaaggcctcgggttgcctgtggccttgccggcgaggtgggcctacgctcggtgtcctgatgtggacgagtgtagactgggcctcgcgcgctgtcatccccgcgccacttgtctgaacactcctctctcttacgagtgtcactgccagcgtggatatcagggggatggcattagccactgtaatagaacatgcctagaagactgcgggcacggggtttgtagcggtcctcccgacttcacatgcgtctgcgatttgggctggactagcgatctccccccaccaaccccagctccaggaccccccgctccgcgatgctcacgggattgtggatgctccttccactcgcactgccgcaaacggggacccggtttctgtgatgaatgtcaagattggacatggggcgaacactgcgagagatgcagacctggttcgtttggaaacgcgaccggatcacgggggtgtagaccgtgtcagtgtaatggccacggcgatccccgcagagggcattgtgacaacctcagcggcctctgtttctgccaagaccacacagagggcgcccattgtcagttatgtagccccggttactatggagacccccgcgccggcggcagttgcttccgggaatgtggtggtagagctctgttgaccaacgtgtcatccgtggcactggggagtagacgcgtgggcggactcctgccccccgggggtggcgcagcacgcgcagggcccggcttatcctactgtgtctgggtcgtctctgcaaccgaagagctccagccttgcgcgccaggcacgttatgtccaccactgacgttgactttcagccccgattcttccacaccatgtaccctgagctatgtgcttgcctttgacggatttccgcggttccttgataccggcgttgtgcaatcggacagaagtttgatcgccgccttctgtgggcaacgccgggaccgtcctctgaccgtgcaggccctctctggcctgctggtactacactgggaggccaatgggtccagttcctggggatttaacgcatcagtcgggtcagcccggtgcggaagtgggggtcctggcagttgtccagtccctcaggagtgtgtccctcaggatggggccgcaggtgcggggctgtgtcggtgcccccagggttgggcaggcccccactgccggatggctctgtgtcctgagaactgcaatgctcacacaggggctggcacctgcaaccagagtcttggcgtatgtatttgtgcggaagggttcggcgggccagactgtgcaacgaagctggatggaggacagctggtgtgggagaccctgatggactcacgcttgtctgctgatactgcaagtcggttcctccaccggttgggacatacaatggttgacggtccggatgccaccctatggatgtttggcggactaggactcccacaggggctgctaggcaatctttacaggtactccgtgagtgaaaggaggtggacacagatgctggccggagctgaggatggcggaccaggaccatcaccgcgctctttccacgctgccgcctatgttcccgcaggacgcggcgctatgtacctgttgggcgggctgactgcagggggcgttacaagagatttttgggttctgaacttaacgaccctccagtggcgacaggagaaagccccgcaaaccgtggagcttccagcagtcgctggacacacccttaccgcccgaagaggactctcactgctattggtgggagggtacagcccagagaatgggtttaaccagcagttgcttgagtatcaattagccaccgggacctgggtgtctggtgctcagagcggtacacctcccacgggcctctatggtcattctgccgtctatcacgaagccacggattccctgtacgtgttcggtggatttcggttccacgtggagttagccgcccctagcccagaactctacagccttcattgtccagaccgcacatggtctctgcttgcgccctcgcagggggctaaacgagatagaatgcggaacgtgaggggcagctccagaggactcgggcaggtgccaggagaacagcctggttcttggggttttagggaagtacggaaaaaaatggcattgtgggctgcactggcaggcaccggcggattcctagaagaaatttcaccccacctcaaggagcctcgccctcgtctattccacgcgagcgccctgctcggagataccatggtcgtgctgggaggtagaagcgatcctgacgagttcagctcagacgtgttgctttaccaggtgaactgcaatgcctggttgctgcccgatttaacccgcagcgcaagtgtgggcccccctatggaggaaagtgtggcacacgctgtggcagccgtgggctccagactgtacatctccggcgggttcggaggagtggctctgggaaggctcctggctctcacgctacccccagacccctgtcgattgctgagttcccctgaagcatgtaatcagagtggtgcttgcacatggtgccatggcgcctgtctgagcggagaccaggcacacaggctgggttgcgggggcagtccctgttctcctatgccgcggagccctgaggagtgtagaaggcttcggacttgctccgagtgtttagctcggcatcccagaactttacaacctggtgatggcgaggcatcaactccaagatgtaagtggtgtacgaactgcccagagggcgcttgtattggacggaacggttcttgcacatcggaaaacgactgccgcattaatcaacgtgaagtgttctgggcaggaaattgctccgaggctgcctgtggggctgctgattgcgaacagtgcaccagagaggggaaatgtatgtggactagacaattcaagcggaccggcgaaaccaggaggatactgagtgtccagcccacctacgactggacctgcttcagtcattctctgctgaacgtctcacctatgcccgtcgagagcagcccaccattgccgtgtccgacaccttgccatttactgccaaattgtacatcatgtttggatagtaaaggagcagacgggggatggcagcactgtgtgtggtcctcatcactgcagcagtgcttaagtccgagttacttaccactacgatgcatggccggaggttgtggccgtcttcttcgcggcccagagagttgctctctgggctgtgcacaggctacccaatgtgctctgtgtttgcgcaggccacactgcggatggtgtgcctgggggggacaggacggcggaggcagatgcatggaaggtggtctctcgggaccacgcgatggactgacctgtgggagacccggcgccagctgggctttcctcagctgcccacctgaggatgagtgtgccaacggccaccatgactgtaacgaaactcaaaattgtcacgaccagcctcacggttatgaatgtagctgcaaaactggatatacaatggataacatgactggcctctgtaggcctgtgtgtgcacaaggttgtgttaacggctcctgcgtggaaccggaccattgtcggtgtcactttgggtttgtagggcgcaattgctctacggagtgcagatgtaaccgccatagtgagtgcgccggcgtgggggccagggatcactgtcttctgtgccgtaatcatacaaagggctcgcattgtgagcagtgcttacccctcttcgtcggaagcgcagttggtggcggaacatgcaggccctgtcacgccttctgtaggggaaacagccatatatgcatcagccggaaagagctgcaaatgtccaagggggaaccgaaaaaatacagtttggacccagaagaaattgagaattgggtcacagaaggaccatccgaggacgaggcggtgtgtgtgaactgtcagaataatagttacggggaaaaatgtgagagctgcctgcaggggtatttcctcctagacggaaagtgcaccaagtgccaatgcaacggccacgcggacacttgcaatgagcaagacggaacggggtgcccatgtcaaaacaatacggaaactggtacttgccaagggtcatccccttccgaccgtagggactgctacaaataccaatgcgctaagtgtagggagtccttccacggaagtccgttggggggccagcagtgctacagactaattagcgtcgaacaggaatgttgcctggatcccacctctcaaactaactgctttcacgagcccaaaaggagggcccttgggcctgggaggacagtgttattcggggtgcagcccaaatttacaaacgttgatatcagactgacactggacgtcacctttggagctgtggatctctacgtcagcacatcctatgacacatttgtggtgcgagtcgccccagatactggggttcatacagtgcacatacaaccccccccagctccccctccgccacctcctcccgctgacggcggccccaggggagctggggatcccgggggtgccggagctagttctggtccgggagcccccgccgagccgcgggtccgggaggtgtggccgagaggtctcattacctatgtcactgttactgagccctccgccgtcctggttgtgcgtggggttagagaccgtctggtcatcacttacccgcatgagcatcacgccctcaaaagcagcagattttaccttttgctactgggagtgggcgatccatcgggtcccggcgctaatggctcagctgacagtcagggactcctgttcttccgccaagatcaggcccacattgatctgttcgtgtttttctccgttttttttagctgtttttttctctttttgagtctctgcgtcttactatggaaagcaaaacaggctctggaccagagacaggaacagagacggcacctgcaagaaatgaccaagatggcttctagacctttcgccaaggtgacagtttgtttcccacccgatcccactgcgccagcctcggcctggaagcccgcaggactaccgcccccggcttttagacgatccgagccatttctggctccccttcttctgacaggcgctggcggaccctggggcccaatgggcggcgggtgctgtcccccagccattcctgccactacagccggcctacgggccgggcctattacactggaaccaaccgaagacggcatggccggtgtggcaaccctgctactgcagctaccaggaggtcctcacgcccctaatggcgcttgccttggatccgcattggtgacccttaggcaccgcctgcacgagtattgtggggggggtggtggtgctggtggctcaggccatggtaccggagccggacgcaaggggctcttatctcaggacaatcttaccagcatgtccctgtag

SEQ ID NO: 117598 - DNA, 1320 bp, Artificial Sequence
  derived and/or modified sequence
atgagagaactcccagctggcctgttgccacccgggagagaagtgcaccagtgcgcgaagtgccgagagtcttttcatgggtcacccttgggcgggcagcagtgttatcggctcattagcgtggaacaggaatgctgtctggacccaacgagccagacaaattgttttcacgaaccaaaaaggagggccctgggccctggtcgcacggtcttatttggcgtgcagcctaagttcaccaacgtggatatcagactgaccctggacgtaaccttcggggccgtcgacctctatgtgagcacctcgtatgacaccttcgtggtccgggtagcacctgacacaggcgtccacacagttcatatccaacccccgccagcgccccccccaccccccccccctgcggatggagggcctagaggcgctggagaccctgggggagctggtgcctccagtggccccggcgcccccgcggagccaagagtgcgcgaagtctggcccagaggacttatcacctatgtcaccgttaccgaacctagcgccgtgctggtcgtacggggagtgagagaccgccttgtgatcacgtatccacatgaacatcatgccctgaagtccagcaggttctatttactcctgctgggggttggcgatccttccggaccaggcgctaacgggagcgccgactcccagggactgctgttttttaggcaagatcaggcccacatcgacttgttcgtgttcttcagtgtatttttctcctgtttttttttgtttctcagcctatgtgttctgctctggaaagccaagcaggccttggaccagagacaggagcaacgccggcaccttcaggagatgaccaaaatggcatctcgcccttttgctaaagtgaccgtgtgttttccccccgacccgaccgcccctgcctcagcttggaagcccgccggcctcccaccacccgcattccggcgttctgagcctttcttagcgcctctgttactcacgggagccggaggcccttggggccccatgggcgggggctgttgccctcccgcaattccggccacgaccgccggtttgcgcgccgggcccatcaccctcgagccgaccgaggatgggatggcgggcgtggccacccttctcttgcagctcccaggtggcccgcacgccccaaatggagcatgcctcggcagtgcactcgtaacactgcgacaccggttgcatgaatactgtggaggcggcggaggtgctggcgggtccggccatggcactggcgcaggtcggaagggacttctttcccaggacaatcttacatccatgtctctttag

SEQ ID NO: 117599 - DNA, 8337 bp, Artificial Sequence
  derived and/or modified sequence
atggccctgggcaaggtgctggccatggccctggtgctggccctggccgtgctgggcagcctgagccctggggcccgggccggggactgcaagggccagaggcaggtgctgcgggaggcccctggctttgtgacagatggagctggcaactacagcgtgaatggaaactgtgagtggctgattgaggcccccagcccccagcaccgcatcctgctggacttcctgttcctggacacagagtgcacctatgactacctgtttgtgtatgatggagacagcccccggggccccctgctggccagcctgagcggcagcacccggcccccacccatcgaggccagcagcggcaagatgctgctgcacctgttcagtgatgccaactacaacctgctgggcttcaatgccagcttccgcttcagcctgtgccctgggggctgccagagccacggccagtgccagcccccaggagtgtgtgcctgtgagcccggctggggcggccctgactgtggcctgcaggagtgcagcgcctactgcggcagccacggcacctgtgccagccccctgggcccctgccgctgtgagcccggcttcctgggccgggcctgtgacctgcacctgtgggagaaccagggcgccggctggtggcacaacgtgtctgcccgggaccctgccttcagcgccagaattggagctgctggggccttcctgagccccccaggcctgctggccgtgtttggaggccaggacctgaacaatgccctgggggacctggtgctgtacaacttcagcgccaacacctgggagagctgggacctgagccctgccccagctgcccggcacagccacgtggccgtggcctgggccggcagcctggtgctgatgggcggggagctggctgatggcagcctgaccaatgatgtgtgggccttcagccccctgggccggggccactgggagctgctggcccccccagccagcagcagcagcggccccccaggcctggccggccacgccgccgccctggtggatgatgtgtggctgtatgtgtctgggggccgcacccctcatgacctcttcagcagcggcctcttccgcttccggctggacagcaccagcggcggctactgggagcaggtgatcccagctgggggccggcccccagctgccaccggccacagcatggtgttccacgcccccagccgggccctgctggtgcacggcggccaccggcccagcacagcccgcttctctgtgcgggtgaacagcacagagctgttccacgtggacagacatgtgtggaccaccctgaagggcagagatggcctgcagggcccccgggagcgggccttccacacagcctctgtgctgggcaactacatggtggtgtatggaggaaatgtgcacacccactaccaggaggagaagtgctatgaagatggcatcttcttctaccacctgggctgccaccagtgggtgtctggagctgagctggcccctcctggcaccccagagggccgggccgcccctccttctggccgctacagccacgtggccgctgtgctgggcggctctgtgctgctggtggccggcggctacagcggccggcccaggggggacctgatggcctacaaggtgcccccatttgtgttccaggccccagccccagactaccacctggactactgcagcatgtacacagaccacagcgtgtgcagccgggaccctgagtgctcctggtgccagggcgcctgccaggccgcccctcctcctggcacccccctgggcgcctgcccagctgccagctgcctgggcctgggccgcctgctgggggactgccaggcctgcctggccttcagcagccccacagccccaccccggggccctggcaccctgggctggtgtgtgcacaatgaaagctgcctgcccaggcctgagcaggcccgctgccgcggggagcagatctctggaacagtgggctggtggggccctgcccctgtgtttgtgaccagcctggaggcctgtgtgacccagagcttcctgcccggcctgcacctgctgaccttccagcagccccccaacaccagccagcctgacaaggaggaggtgggccgctgggtggcccaccaggagaaggagacccggcggctgcagaggcctggcagcgcccggctcttccccctgcccggccgggaccacaagtatgctgtggagatccagggccagctgaatggatctgctggccctggccacagcgagctgaccctgctgtgggacagaactggagtgcctgggggcagcgagatctccttcttcttcctggagccctaccgcagcagcagctgcaccagctacagcagctgcctgggctgcctggccgaccagggctgcggctggtgcctgaccagcgccacctgccacctgcggcagggcggggcccactgtggagatgatggagctgggggcagcctgctggtgctggtgcccaccctgtgccccctgtgtgaggagcaccgggactgccacgcctgcacccaggaccccttctgtgagtggcaccagagcaccagcaggaaaggagatgctgcctgcagcagaagaggccggggccgcggggccctgaagagccctgaggagtgcccccccctgtgcagccagaggctgacctgtgaggactgcctggccaacagcagccagtgtgcctggtgccagagcacccacacctgcttcctgtttgctgcctacctggcccgctacccccacggcggctgccggggctgggatgattctgtgcacagcgagccccgctgccgcagctgtgatggcttcctgacctgccatgaatgtctgcagagccatgaatgtggctggtgtggaaatgaagacaaccccaccctgggccgctgcctgcagggcgacttcagcggccccctgggcggcggcaactgcagcctgtgggtgggggagggcctgggcctgcctgtggccctgcctgcccgctgggcctatgcccgctgcccagatgtggatgagtgccgcctgggcctggcccgctgccacccccgggccacctgcctgaacacccccctgtcctatgagtgccactgccagaggggctaccagggagatggcatcagccactgcaacagaacctgcctggaggactgtggccatggagtgtgcagcggccccccagacttcacctgtgtgtgtgacctgggctggaccagtgacctgcccccacccaccccagcccctggccccccagccccccgctgcagccgggactgtggctgcagcttccacagccactgcaggaagaggggccctggcttctgtgatgagtgccaggactggacctggggcgagcactgtgagcgctgcaggcctggcagctttggaaatgccaccggcagccggggctgccggccctgccagtgcaatggacatggagacccccggcggggccactgtgacaacctgagcggcctgtgcttctgccaggaccacacagagggcgcccactgccagctgtgcagccctggctactatggagacccccgggccggcggcagctgcttcagagaatgtggcggccgggccctgctgaccaacgtgtcctctgtggccctgggcagcagaagagtgggcggcctgctgcccccaggcggcggggccgcccgggccggccctggcctgagctactgtgtgtgggtggtgtctgccacagaggagctgcagccctgtgcccctggcaccctgtgcccccccctgaccctgaccttctccccagacagcagcaccccctgcaccctgtcctatgtgctggcctttgatggcttcccccgcttcctggacaccggggtggtgcagagcgacaggagcctgattgctgccttctgtggccagaggcgggaccggcccctgactgtgcaggccctgagcggcctgctggtgctgcactgggaggccaacggcagcagctcctggggcttcaatgcctctgtgggcagcgcccgctgtggcagcggcggccctggcagctgccctgtgccccaggagtgtgtgccccaggatggagctgctggagctggcctgtgccgctgcccccagggctgggccggcccccactgcaggatggccctgtgcccagagaactgcaatgcccacactggagctggcacctgcaaccagagcctgggcgtgtgcatctgtgccgagggctttggaggccctgactgtgccaccaagctggatggcggccagctggtgtgggagaccctgatggacagccggctgtctgctgacacagccagccgcttcctgcaccggctgggccacaccatggtggatggcccagatgccaccctgtggatgtttggaggcctgggcctgccccagggcctgctgggcaacctgtaccgctacagcgtgtctgagcggcgctggacccagatgctggccggggctgaagatggcggccctggccccagccccaggagcttccacgccgccgcctacgtgcctgctggccgcggggccatgtacctgctgggcggcctgacagctgggggcgtgacccgggacttctgggtgctgaacctgaccaccctgcagtggaggcaggagaaggccccccagacagtggagctgcctgctgtggccggccacaccctgacagcccggcggggcctgagcctgctgctggtgggcggctacagcccagaaaatggcttcaaccagcagctgctggagtaccagctggccaccggcacctgggtgtctggggcccagagcggcaccccacccaccggcctgtatggccacagcgctgtgtaccacgaggccacagacagcctgtatgtgtttggaggcttccgcttccacgtggagctggccgcccccagccctgagctgtacagcctgcactgcccagacaggacctggagcctgctggcccccagccagggcgccaagagggacaggatgagaaatgtgcggggcagcagccggggcctgggccaggtgcctggagagcagcccggctcctggggcttccgggaggtgaggaagaagatggccctgtgggccgccctggccggcactggaggcttcctggaggagatcagcccccacctgaaggagccccggcccaggctcttccacgccagcgccctgctgggggacaccatggtggtgctgggcggccgcagtgaccctgatgagttcagcagtgatgtgctgctgtaccaggtgaactgcaatgcctggctgctgcctgacctgaccaggtctgcctctgtgggcccccccatggaggagagcgtggcccatgctgtggccgctgtgggcagccggctgtacatcagcggcggctttggaggagtggccctgggccgcctgctggccctgaccctgcccccagacccctgccgcctgctgagcagccctgaggcctgcaaccagagcggggcctgcacctggtgccacggggcctgcctgagcggggaccaggcccaccggctgggctgcggcggcagcccctgcagccccatgcccaggagcccagaagaatgtagaaggctgcggacctgcagcgagtgcctggcccggcaccccaggaccctgcagcctggagatggagaggccagcaccccccgctgcaagtggtgcaccaactgcccagagggcgcctgcattggaagaaatggcagctgcaccagtgaaaatgactgccgcatcaaccagcgggaggtgttctgggccggcaactgcagcgaggccgcctgtggggctgctgactgtgagcagtgcacccgggagggcaagtgcatgtggacccggcagttcaagaggactggagagacccggcgcatcctgtctgtgcagcccacctatgactggacctgcttcagccacagcctgctgaatgtgagccccatgcctgtggagagcagcccccccctgccctgccccaccccctgccacctgctgcccaactgcaccagctgcctggacagcaaaggagcagatggcggctggcagcactgtgtgtggagcagcagcctgcagcagtgcctgagccccagctacctgcccctgcgctgcatggccggcggctgcggccgcctgctgcggggccctgagagctgcagcctgggctgtgcccaggccacccagtgtgccctgtgcctgcggcggccccactgcggctggtgtgcctggggcggccaggacggcggcggccgctgcatggagggcggcctgagcggccccagagatggcctgacctgtggccggcctggggcctcctgggccttcctgagctgccccccagaagatgaatgtgccaacggccaccacgactgcaatgagacccagaactgccacgaccagccccacggctatgagtgcagctgcaagacaggctacaccatggacaacatgacaggcctgtgcaggcctgtgtgtgcccagggctgtgtgaatggcagctgtgtggagccagaccactgccgctgccactttggatttgtgggcaggaactgcagcacagaatgtcgctgcaacagacacagtgaatgtgccggcgtgggcgcccgggaccactgcctgctgtgcaggaaccacaccaagggcagccactgtgagcagtgcctgcccctgtttgtgggcagcgctgtgggcggcggcacctgccggccctgccacgccttctgccggggcaacagccacatctgcatcagcaggaaggagctgcagatgagcaagggggagcccaagaagtacagcctggaccctgaggagattgagaactgggtgacagagggccccagtgaagatgaggccgtgtgtgtgaactgccagaacaacagctatggagagaagtgtgagagctgcctgcagggctacttcctgctggatggcaagtgcaccaagtgccagtgcaatggacatgctgacacctgcaatgagcaggacggcaccggctgcccctgccagaacaacacagagaccggcacctgccagggcagcagccccagcgacagaagagactgctacaagtaccagtgtgccaagtgccgggagagcttccacggcagccccctgggcggccagcagtgctaccgcctcatctctgtggagcaggagtgctgcctggaccccaccagccagaccaactgcttccacgagcccaagaggcgggccctgggccctggccgcacagtgctgtttggagtgcagcccaagttcaccaacgtggacatccggctgaccctggatgtgaccttcggggctgtggacctgtatgtgtccaccagctatgacacctttgtggtgcgggtggccccagacaccggggtgcacacagtgcacatccagcccccaccagcccctcctcctcctcctcctccagcagatggcggccccagaggagctggggaccccggcggggccggggccagcagcggccctggggccccagctgagccccgggtgcgggaggtgtggccccggggcctcatcacctacgtgacagtgacagagcccagcgctgtgctggtggtgcggggcgtgcgggaccggctggtgatcacctacccccatgagcaccacgccctgaagagcagccgcttctacctgctgctgctgggcgtgggggaccccagcggccctggggccaatggatctgctgacagccagggcctgctcttcttccggcaggaccaggcccacatcgacctgtttgtgttcttcagcgtcttcttcagctgcttcttcctgttcctgagcctgtgtgtgctgctgtggaaggccaagcaggccctggaccagaggcaggagcagaggaggcacctgcaggagatgaccaagatggccagccggccctttgccaaggtgacagtgtgcttccccccagaccccacagccccagccagcgcctggaagccagctggcctgcccccaccagccttcagaagaagtgagcccttcctggcccccctgctgctgactggagctgggggcccctggggccccatgggcggcggctgctgccccccagccatcccagccaccacagctggcctgcgggccggccccatcaccctggagcccacagaagatggcatggccggcgtggccaccctgctgctgcagctgcccggcggcccccacgcccccaacggggcctgcctgggcagcgccctggtgaccctgcggcaccggctgcacgagtactgcggcggcggcggcggggccggcggcagcggccacggcaccggggccggcaggaagggcctgctgagccaggacaacctgacctccatgagcctgtag

SEQ ID NO: 117600 - DNA, 1320 bp, Artificial Sequence
  derived and/or modified sequence
atgagggagctgcctgctggcctgctgcccccaggccgggaggtgcaccagtgtgccaagtgccgggagagcttccacggcagccccctgggcggccagcagtgctaccgcctcatctctgtggagcaggagtgctgcctggaccccaccagccagaccaactgcttccacgagcccaagagaagagccctgggccctggccgcacagtgctgtttggagtgcagcccaagttcaccaacgtggacatccggctgaccctggatgtgacctttggagctgtggacctgtatgtgtccaccagctatgacacctttgtggtgcgggtggccccagacacaggagtgcacacagtgcacatccagcccccaccagcccctcctcctcctcctcctccagcagatggcggccccaggggggccggggaccctggaggagctggggccagcagcggccctggggccccagctgagccccgggtgcgggaggtgtggccccggggcctcatcacctacgtgacagtgacagagcccagcgctgtgctggtggtgcggggcgtgcgggaccggctggtgatcacctacccccatgagcaccacgccctgaagagcagccgcttctacctgctgctgctgggcgtgggggaccccagcggccctggggccaacggcagcgctgacagccagggcctgctcttcttccggcaggaccaggcccacatcgacctgtttgtgttcttctctgtgttcttcagctgcttcttcctgttcctgagcctgtgtgtgctgctgtggaaggccaagcaggccctggaccagaggcaggagcagaggaggcacctgcaggagatgaccaagatggccagccggccctttgccaaggtgacagtgtgcttccccccagaccccacagccccagccagcgcctggaagccagctggcctgcccccaccagccttccgccgctctgagcccttcctggcccccctgctgctgaccggggccggcggcccctggggccccatgggcggcggctgctgccccccagccatcccagccaccacagctggcctgcgggccggccccatcaccctggagcccacagaagatggcatggccggcgtggccaccctgctgctgcagctgcccggcggcccccacgccccaaatggagcctgcctgggcagcgccctggtgaccctgcggcaccggctgcacgagtactgcggcggcggcggcggggccggcggcagcggccatggaactggagctggcaggaagggcctgctgagccaggacaacctgacctccatgagcctgtag

SEQ ID NO: 117601 - DNA, 10966 bp, Artificial Sequence
  derived and/or modified sequence
ggccgctctggcccaagcgtcccctcgtctctctgatctggcccatccggcttcggagggaggcgagggtgggtgagcaaagggattgggtctgtggggtccaggcccgaacccctgaagacgggctccgcccccggcacccgctcgcgccccgcccccggctggaggagtctctcctggaccatccgaacctagcctgtcccggcccgcagcctctatggaggctcctgccgggccgtagagcccttcgccccctggggacccacccgtctataaggtccgtttggcctgcagcagcctgagtccgtaatgctgggcactgttcatgggatcggccccctatggagccctgtgtctataggggactcctacggtccctagggttcggccccgtccataatgactccatatacagggccttccatcgctctatagggctcagccctcggcttccagagcctgtcagcagtggccgtacccttcgccgggactgccgggtctccgggacctcttcgatctacaaggtcatgttatgcctatagaggtcgcatttgcagggcctcaccccgggtagagggtcctctccaggtttttacggcctgtccccgctctaagggtcagtgcaggaggcggcgatggccctgggcaaggttctggccatggcactggttttggccttggccgtgctggggtcgctgtcccctggggcccgggcgggggactgcaaggggcagcggcaggtgctgcgggaggcgccaggcttcgtgacggatggtgcgggcaactacagcgtcaatggcaactgcgagtggctcatcgaggccccaagcccccagcaccggatcctgctggacttccttttcctggacacagagtgcacgtatgactacctgttcgtgtatgacggtgactccccgcgagggccgctgcttgccagtctaagtgggagcacccgacctccgcccatcgaagcttcctcaggcaagatgctgctgcacctcttcagtgatgccaactacaacctgctgggctttaacgcctcattccgcttctccctgtgcccgggtggctgccagagccacgggcagtgccagccaccgggtgtgtgtgcctgcgagccgggctgggggggtcctgactgtggcctgcaggagtgctcagcctactgtggcagccacggcacctgcgcctcgcccctgggaccatgccgctgtgagcctggcttcttgggacgtgcctgtgacctgcacctgtgggagaaccagggggctgggtggtggcacaacgtgagtgccagggaccctgccttctctgcccgtattggggcagctggcgccttcctgtccccaccagggctgctggcagttttcggaggccaggacctcaacaatgccctgggtgacctcgtcctatacaacttctccgccaacacctgggagtcttgggacctgagtcctgccccggctgcccgtcactcccatgtggccgtggcctgggccggctccctggtactgatgggtggtgagctggctgacggctcgctcaccaacgacgtgtgggccttcagtccactgggcaggggccactgggagctcctggcaccacctgcctccagctcctcggggcccccaggcctggcaggtcacgcggctgccctggtggatgatgtctggctatatgtgtctggaggccgcaccccgcacgacctcttctcctctggcctcttccgtttccgccttgacagcaccagcgggggctattgggagcaggtgattccggcaggcggacggccccctgctgccactggccactccatggtgttccatgccccctcccgtgccctgctggtccatggtggacaccggccctccactgcccggttctctgtgcgagtgaactccactgagcttttccacgtggatcggcatgtgtggacgacgctgaaggggcgggatgggcttcagggcccaagggagcgagccttccacacagccagtgttctgggcaattacatggtggtctatgggggcaatgtgcacacccattaccaggaggaaaagtgctacgaagatggcatcttcttctaccaccttggctgccatcaatgggtgtcaggagctgagcttgccccgccaggaacccctgagggccgagcagcgcctcccagtggtcggtactcacatgtagctgcggtgcttggtggcagcgtcctgttggtggctggggggtacagcggccggccccgtggggacttgatggcgtacaaggtgcccccctttgtgttccaggcacctgcccctgactaccacttggactactgctccatgtacacagaccacagcgtctgctcccgggacccggaatgcagttggtgccaaggagcctgccaagctgcaccccctcctgggacccccttgggggcttgtccagccgccagctgcctgggcctgggccgcctcctgggtgactgccaggcctgcctggccttcagcagccccacagcccctccacggggacctggcaccctgggctggtgcgtgcacaatgagagctgcctccctaggcctgagcaggcccgctgccgaggggagcagatctcaggcactgtgggctggtgggggcctgcgcctgtcttcgtcacgtccctggaggcctgcgtcacccagagcttcctgcctggcctgcacttgctcacctttcagcagccgcccaatacctcccagcctgacaaggaggaggtggggcgctgggtggctcatcaggagaaggagacgcggcggctgcagcgccctgggtctgctcgcctcttccctctgcctgggcgggaccacaagtatgcagtagagatccagggccagctcaatggctcggcaggccctgggcacagcgagctaactctgctgtgggatcggactggtgtgccaggaggcagcgagatctccttcttcttcctggagccctaccgctcgtcgtcctgcacctcctattcttcctgcctgggctgcttggcagaccagggctgtggctggtgcctgaccagtgccacctgccacctgcgccagggcggagcccattgcggggatgacggggctggtgggtccctgctggtgctggtgcctaccctctgcccactctgcgaggagcatcgggactgccacgcctgcacccaggaccccttctgtgagtggcatcagagcaccagccgcaaaggggacgcggcatgcagccggcggggccggggtcggggtgccctgaagagtccagaggagtgtcccccgctctgcagccagcgactgacctgtgaggactgcctggccaactctagccagtgcgcctggtgccagtccacccacacctgcttcctgtttgctgcctacttggcccggtacccacacgggggctgtcgaggctgggacgacagtgtacactcggagccacggtgccggagctgcgatggcttcctgacctgccatgagtgtctgcagagccacgagtgtggctggtgtggcaatgaggacaaccccacactgggacggtgcctacagggggacttctcagggcccctcggtgggggtaactgctccctgtgggtgggggagggcctggggcttcccgtggccctccctgcccgctgggcatacgcccgctgtcctgacgtggatgagtgtcgcctgggcctggcccggtgccacccgcgggcgacctgcctgaacacgcccctcagctacgagtgtcactgccagcggggctaccagggtgatggcatctcacactgcaaccgcacgtgcttggaggactgtggccatggtgtgtgcagtggccccccggactttacctgcgtgtgtgacctaggctggacatcagacctgccccctcccacacccgccccgggtccgccagccccccgctgctcccgggactgtggctgcagcttccacagccactgccgcaagcggggccctggcttctgcgacgagtgccaggactggacatggggggagcactgcgaacgatgccggcccggcagcttcggcaacgccacaggctctaggggctgccggccctgccagtgcaacgggcacggggacccacgccgtggccactgcgacaacctcagtgggctctgcttctgccaggaccacaccgagggtgcccactgccagctctgctccccaggctattatggggatccccgggccggtggttcctgctttcgggagtgtgggggtcgcgccctcctcaccaacgtgtcctcagtggcactgggctcacgccgggtcggggggctgctgcctccaggtggcggggctgcaagagccgggcctggcctgtcctactgtgtgtgggttgtctcggccactgaggagctacagccctgtgctcccgggaccctctgtcccccactcaccctcaccttctcccccgacagcagcaccccctgcacgctgagctacgtcctggcgtttgatggattcccacgcttcctggacactggtgttgtccagtcggaccgcagcctcatagctgccttctgcggccagcgacgggacaggcccctcactgttcaggccctgtctgggctgctcgtgctgcactgggaggccaatggctcctcatcctggggcttcaatgcttcggtgggctctgcccgctgtgggtcagggggccccgggagctgtcccgtcccccaggaatgcgtgccccaggacggtgctgcaggtgcggggctctgccgatgtcctcagggctgggctggcccacactgccgcatggctctgtgtcctgagaactgcaatgcccacactggggcaggaacttgtaaccagagcctgggtgtgtgcatctgtgccgagggcttcgggggccccgactgcgccaccaagctggatggcgggcagctggtctgggagaccctcatggacagccgcctctcagccgacactgccagccgcttcctgcaccgcctgggccacaccatggtggatggacccgatgccaccttgtggatgtttgggggcctgggcctgccccaggggctgctgggaaacctgtacaggtactcagtgagtgagcggcggtggacacagatgctggcgggagccgaggacgggggcccaggcccatcgccccgctccttccatgcagccgcatatgtgcccgctggccgtggtgccatgtatctgctggggggacttaccgctggaggcgtcacccgtgatttctgggtcctcaacctcaccaccctgcaatggcggcaggagaaggccccccagaccgtggagctgccagccgttgctggtcacacccttactgcccgccgaggcctgtctctgctcctggtgggcggttactccccggaaaatggcttcaaccagcagctgctggagtaccagctggcaaccggcacctgggtgtcaggagcccagagtgggacaccccccacaggtctctatggtcactctgctgtctaccacgaggccaccgactccctctacgtgtttggggggttccgattccatgtggagctggcggccccatcccccgagctctactccctgcactgtcctgaccgcacctggagtctgctggccccttctcagggggcaaagcgagatcgtatgaggaatgtgcgtggctcatctcggggtctgggccaagttcctggggagcagcctgggtcatgggggttccgggaagtcaggaagaagatggctctgtgggctgctcttgctggtacaggaggtttcctggaggaaatctcacctcacctgaaggagccccgcccccggcttttccacgcctcagccctgttaggggacaccatggtggttcttggggggcgctcggaccctgacgagttcagcagcgacgttctgctctaccaggtcaactgcaatgcctggcttctgcccgacctcacccgctcggcctctgtggggcccccaatggaggagtctgtggcccatgctgtggcagcagtcgggagccgcctgtatatctctgggggtttcgggggagtggccctgggccgcctgctggcactgaccctgccccctgacccctgccgcctgctgtcctcacctgaagcttgtaaccagtctggggcctgcacctggtgccatggggcctgcttgtccggggatcaggcccacaggctgggctgcgggggctccccctgctccccaatgcctcgctccccggaggaatgtcgacgtctccggacctgcagtgagtgcctggcccgccatcctcggaccctgcaacctggagatggagaggcgtccaccccccgctgtaagtggtgtaccaactgccccgaaggtgcttgcattggacgcaatgggtcctgcacctctgagaatgactgtcggatcaaccagcgagaggtcttctgggcagggaactgctccgaggctgcgtgcggggctgctgactgcgagcagtgcacgcgggagggcaagtgcatgtggacgcggcagttcaagaggacaggggagacccgccgcatcctctccgtgcagcccacctatgactggacgtgcttcagccactctctgctgaatgtgtcccccatgccggtggaatcatcacccccactgccctgccccaccccttgtcacctcctacccaactgtacctcctgcctggactctaagggagcagatgggggctggcagcactgtgtttggagcagcagcctgcagcagtgtctgagcccttcctacctgcccctgcgatgtatggccggaggctgtgggcggctgctccggggacctgagagctgctccctgggctgtgctcaggcaactcagtgcgccttgtgcctgcggcgcccccattgcggctggtgtgcctgggggggccaggatgggggtggccgctgcatggagggtggactcagcggcccccgtgatgggctgacatgtgggcgtccgggggcctcctgggccttcctgtcctgcccccctgaggacgagtgtgcaaacgggcaccacgactgcaacgagacgcagaattgccacgaccagccccacggctatgagtgcagctgcaagaccggctataccatggacaacatgacagggctgtgccgccctgtgtgcgcccagggctgcgtgaacggctcatgtgtggagcccgaccactgccgctgccactttggctttgtgggccgcaactgctccacggaatgccgctgcaaccgccacagtgaatgcgctggtgttggggcgcgtgaccactgcttgctctgccgcaaccacaccaagggcagccactgtgagcagtgcctcccgctgtttgtgggttcagctgtcggaggcgggacctgccggccctgccacgccttttgtcgtggaaatagccacatctgcatctccaggaaggagttacaaatgtccaagggagagccaaagaagtactcactggacccagaggagattgaaaactgggtgacagagggtcctagtgaagacgaggccgtgtgcgtgaactgccagaataacagctatggggagaaatgcgagagctgcctgcagggctacttcctcctggacgggaagtgcaccaaatgccagtgtaatggccacgcggacacatgtaacgagcaggatgggacgggctgtccatgtcagaataacacagagacgggcacatgccagggcagctcccccagtgaccgtcgagactgctacaagtaccagtgcgccaagtgccgggaatcatttcacgggagtccgctgggcggccagcagtgctaccgcctcatctcggtggagcaggagtgctgcctggaccccacgtcccagaccaactgcttccatgagcccaaacgccgggcgctaggccccggccgcactgtcctctttggcgtgcagcccaaattcaccaacgtggacatccgcctgacgctggacgtgaccttcggggccgtggacctctatgtctccacctcctatgacaccttcgtggtccgtgtggcccctgacactggcgtccatactgtacacatccagccacccccagccccaccacctccaccaccccctgcagatggtgggccccggggggctggggatccaggaggagcaggggccagcagtgggccgggcgccccagcagagccacgggtacgggaggtatggccgcggggcctgattacctacgtgacggtgacggagccgtcggcagtgctggtggtccgcggcgtgcgggaccggctggtcatcacctacccacacgagcaccatgccctcaagtcgagccgcttctacctgctgctgctgggcgtgggagacccaagtgggcccggcgccaacggctcagccgactcgcagggcctgctcttcttccggcaggaccaggcccacattgacctgtttgtcttcttctccgtcttcttctcctgcttcttcctcttcctctcactctgtgtgctcctctggaaggccaagcaggctctggaccagcggcaggagcagcgccggcacttgcaggagatgaccaagatggccagccgccccttcgccaaggtcaccgtctgcttcccacctgaccctactgccccggcctccgcctggaagccggctgggctcccacctcccgccttccgccgctctgagcccttcctggcacccctgctgctgacaggggccggtgggccctggggacccatgggagggggctgctgcccaccagccatccccgccaccactgctgggctgcgagctgggcccatcactctcgagcccacagaagatggcatggctggcgtggccacactgctgctccagctgcctggcgggccccatgcacccaacggcgcctgcctggggtcagccctcgtcacactgcggcacaggctgcacgagtactgtgggggtggtgggggtgctgggggcagtgggcatgggactggtgcgggccggaagggactgttgagccaggacaacctcaccagcatgtccctctgacatgcccagggttctcatccacagcagctgggtcacctgatagggccgccctggacttggggtccctccacctgggggcccctggacactgtctacttggagaccactggcccccttcccccagggttgcccagatggggcctcctttgttctgcattcagcagctatttatcgagtacctactctgtcaggcactgtcataggcgtggggcaaagcaggaaccaagagacgaggttccctgatctcatgggacttaggttctggtgaagggagacaatcagtgcacatgcacacaccccacacgcatacacacatgaacacatgcacatgtgcacacacaagtaagatggcttcagagagggagaagcactgtgaggcctccagaggatgtggcagtgagggacgatggggtgaagtcagctgggcattcaaagaagctagactgagaacgcctgagaagaaccagctacgggaagagctttgggaagcaaaggcagaggccctggggtgggagcaggcttgttttattggaaggaccagaaaactggtaagtgtgacccagatcaagtgtgaggagatgaggctggggatagtcaggggctggatcacccagggccttgtgggccccacatagggttttgggttttattctcagggcaatgggaagctgttggatggtttgatgaaggggagtgacaggatccgatgtacctatttaagaatttaagagggtcgggtgcggtggctcatgcctataatcctagcactttgagaggccaaggtgggctgatcacaaggtcaagagttcgtgaccagcctggccaatatggtgaaaccccatgtctactaaaaatacaaaaattagctgggcatggtggcacacacttgtagtccgagctactcgggaggctgaggcagaagaatcgcttgaacccaggaggcggaggttgcagtgagctcagattgcgtcactgcactccaacctgggtgacagagcgagactccacctcaaaaaaaaaaaaaaaatttaagaggtcactcagttgtgctgtggagaatggaccggagggacaagaggggcagcagggatggtgggctggagtagggtgctggcaatgagggagtctggctcagatgtgggatgtgtatggaagaatataaatgatggtgtggatgtcagggtgagggaggagacaaaaccacgatgacccctagctttgtggcctgaactgtgggtggctgaggggatcgttaattgaatggggcagactgaggcttgtgaggaagatcagagtctggttcttgacatgagatgcccttcagacatctcttcactcaggtccaactagggatacagaaacactgaatatttcaacagcagaaattgaatggggggattgatagcgctggcgagggaagcagctggaaagagacagatggcaccctgagacagcccagaggtgaataggacccccaggctgcagggataaagctcagtggtggtgttacctcaccggggaccagggtcacacagcaaagctggaacaacagaggcgtgttgtgggggagcctcagaggggacaaaacctctgcctgagatcccaccccaggtgggcatgggggccactgaggttggggatgaaaatgccggtaccgtcagtgcacagccctgttccagacagtgctgcctggaagatttctgggctctcctgaggcgccaccccgcacctgagccacctccttggactcctgtcctctaccccttgaggacctccctcccttctaccctagctgtcttcttgaacttgggactctcctttcccaagacttccatcactagctcctggagggactggactttgcatcttcccttcgcgtggagcctcagtgtgagaggccctagccaatgcgtgcatgtcagaggtggtggggaccacatcagaagaagaggggggtgatgaaattaacaaataaaaagtatggggaaaaccca

SEQ ID NO: 117602 - DNA, 8337 bp, Artificial Sequence
  derived and/or modified sequence
atggccctgggcaaggtgctggccatggccctggtgctggccctggccgtcttgggctcccttagcccgggcgcccgggcaggggactgcaagggccaaaggcaggtattgcgtgaagcccctggctttgtgactgatggcgctgggaattactccgtgaacggaaactgtgagtggttgatagaagcgccctcaccccagcacaggatcttattggatttcctgtttttagacaccgagtgcacctatgattacctgttcgtctacgatggagacagcccccgcggcccactgctcgcaagtctaagtgggtccacacggccccccccgatcgaggcatcatccggcaagatgcttcttcatctgttttccgacgccaactataaccttctgggcttcaacgctagcttcagattttcgttgtgcccaggaggatgccaatctcacgggcagtgccagccgcccggcgtttgcgcctgcgagcctggctggggcgggcctgattgcgggttgcaagagtgcagcgcctactgtggttcacatggcacttgcgcctccccgcttggcccttgccggtgcgagcccgggttcttgggcagagcatgtgatctgcacctgtgggagaatcagggtgcggggtggtggcataacgtgtccgccagggatccggctttcagcgcaagaatcggtgcagccggcgccttcctgtccccccccggcttgctggcagtttttggcggtcaagacttgaacaacgctctgggggaccttgtcctttacaattttagcgccaatacatgggagagctgggacctgagcccagcacctgcagcccgtcatagtcacgtggctgtggcctgggctggcagccttgtccttatgggaggggaactggccgacggctccctaacaaacgacgtgtgggctttctccccgttgggtagggggcactgggaattgctggcaccacctgcatcatcaagctccggcccccctggcctggccgggcacgccgccgctctggtcgacgacgtgtggctgtatgtatctggcggccgaactccacatgacctattcagtagtggactgttccgctttcgcctggacagtacctccggagggtactgggaacaggtaatcccggccggcggacggcctccggctgccacgggacattctatggtgttccatgcaccatcacgggccctgctcgtgcacggcggccataggccttcaacggcacggttttccgtgagagtgaattccacggaactgtttcatgttgataggcacgtatggactactctgaaaggccgcgacgggctgcagggcccccgagagagagcctttcacactgcatcagtactcggtaattatatggtggtctacggcggaaacgtccatacgcactaccaggaagaaaagtgttacgaggatgggattttcttctaccatctgggatgtcaccagtgggtgtcgggggccgagctggctccacccggaactcccgagggacgggccgcacccccgagtggtcgttactcccacgtagcagcagtgcttggcggatcggtgctgctcgtggccggagggtacagtggaagaccccgcggagacttaatggcctataaagttccccctttcgtgttccaagctcctgctcccgattatcacttagactactgcagcatgtacactgaccactcagtatgctcccgcgatcccgagtgcagctggtgccaaggcgcctgtcaggccgctcctcccccgggtacgcccctcggggcctgtccagcggcgagttgcctgggactcggaagactgctgggtgactgccaggcgtgcttagcattctcctctcccactgccccacccagaggtcctggaacactgggatggtgcgtccataatgagagctgcttgcctagacccgagcaggccaggtgtcgtggagagcagatatccggcacagtaggctggtgggggccagcacccgtgttcgtaaccagtctcgaggcatgcgtgacacaatccttcttacccggactgcatctgctgacatttcaacagccccccaacaccagccagcccgataaggaggaggtagggcgctgggtagcacaccaggaaaaggagactcgccggctgcagagaccaggctcggcacgattgttccccttacctggtcgggatcataagtacgctgtagaaattcagggtcagctgaatgggtcggcgggccccggacactctgaactcaccctgttgtgggacagaactggagtaccaggaggtagcgaaatcagctttttttttctggaaccctatcggtctagtagctgcacatcatacagcagttgcttggggtgcctggctgaccaaggttgcgggtggtgcttgacgagcgccacctgtcatctccgacaaggcggtgctcactgcggggacgacggggccggtggctcactcctggtgctcgtccctactctgtgtcccctttgtgaggaacaccgagattgtcacgcttgcacccaagatccattctgcgaatggcaccagagcacttcacgaaaaggggatgccgcctgcagccgacgcggccgcgggcgaggagccctcaagtcacccgaagagtgcccccccttatgctcacagcggctcacctgtgaagattgcctggccaattcctcgcagtgtgcctggtgtcagagtacacacacatgctttctgttcgccgcttacctcgcccggtacccacacggaggatgccggggatgggatgactcagtgcactctgaacccagatgtaggtcgtgcgatggtttcttgacctgtcacgaatgccttcagagccatgagtgcgggtggtgtgggaacgaagataatcccactttaggaaggtgtcttcaaggggacttcagcggccctcttggcggaggtaactgcagcctttgggtgggcgaaggcctgggcctgcctgtggctctaccagccagatgggcctacgccagatgccctgacgtcgacgaatgcagactgggactggcacggtgtcatcctagagcaacgtgtctgaacacacccctctcttacgagtgtcattgccagaggggataccagggagatggtatttctcattgtaacagaacatgcttggaagattgcggccacggggtgtgctctggaccacctgatttcacctgcgtgtgtgacttaggctggaccagtgacctgccaccgcccacgcctgcacctgggcctcccgcacctaggtgctctcgcgactgtgggtgttcctttcattctcactgcaggaagcgggggccaggcttctgcgacgagtgtcaggactggacctggggcgaacattgtgaacggtgtagaccaggtagcttcggaaacgccactgggagtcggggatgccggccctgccagtgtaacggccacggggatcctcgccggggacattgtgataacttaagtggcctgtgcttctgccaggaccatactgaaggagcccactgtcagctgtgtagcccagggtactacggggatcctcgggcgggaggctcttgttttagggagtgtgggggcagggccctgcttacaaatgttagctccgtcgcactcggatcccgtcgggtgggcggattgctgccacctggcgggggggccgctcgggctggtccgggcctcagctattgtgtctgggtagtgagcgcgaccgaggagcttcagccgtgcgctcctggcacactttgtccccccctgaccctcacattctcccccgacagtagcacgccatgtaccttgtcctatgttctggcattcgacgggttcccgaggttcctggatactggtgtggtacagtcagaccgctccttgattgctgccttctgcgggcaacgtagggatcgtcctctgacagtgcaagccctgagcggtctgctggtcttacattgggaggccaatggtagctccagttggggctttaatgcaagcgttggctcagctaggtgcggctccgggggaccagggtcttgtcctgtgcctcaggagtgcgtgccacaggacggagccgccggcgccggactctgcaggtgtcctcaagggtgggccggaccccactgccgcatggccctttgccctgagaactgcaatgctcacaccggtgccggcacctgcaatcagtctttgggggtctgtatctgtgcggaggggttcggaggaccagattgtgcaacaaagctcgacggtggacaattagtatgggagaccctgatggattcgcgcctgtcagcagacacagcgagtcggtttctgcacagacttgggcacacgatggttgacggcccagacgctacgttatggatgtttgggggcctgggattgcctcagggcttgctcggcaatctttatagatatagtgtgtccgaaaggcgttggactcagatgttggctggagccgaagacggagggccaggtccctcaccccgatccttccacgctgcagcctatgtgccagctggacgcggcgccatgtacctgctcggcggacttacagccgggggagtgacccgcgacttttgggtcctaaacctgaccaccttgcaatggagacaagaaaaggcccctcagactgtggagttgccagccgtcgccggtcataccctgactgcccgccggggtctttctcttctgttagtgggagggtattcccctgagaatggttttaaccagcagctgctggagtaccagctggcaaccggaacttgggtgtccggagcccaaagtggaacaccccctactgggctgtacggacattctgctgtataccatgaggcaaccgattcactttacgtcttcgggggatttcgcttccacgtcgagctggccgcaccttctcctgaactctactccctccattgtccggatcgcacctggtcactactcgcccctagtcagggggcaaaacgagatcgaatgcggaatgtaaggggaagctcccgcgggctcgggcaggttcccggtgaacaacccggcagttggggattccgagaggtccgtaagaaaatggcgctctgggctgccctggctggaacaggtggctttcttgaggaaatatcgcctcacttaaaagagccccggcctagactgttccatgctagcgccttgctgggcgataccatggttgtgctcggcggccggtccgacccagatgagttttcaagtgatgtcctgctctaccaggtgaattgcaacgcctggttgctgcctgatctcacacgttctgccagtgtcggcccccctatggaggagtctgtggcgcacgccgtagccgcagttggatcacgcctatacatcagcgggggtttcgggggggtggccctcggccggctgctcgccctgactttacctccggatccctgtagactactctcaagccctgaggcttgcaaccagagcggtgcttgtacttggtgccacggtgcctgcctgtcaggagatcaggcccaccgcctggggtgcgggggttcaccatgcagcccaatgccgcggagccccgaagagtgtcggcggcttaggacctgcagcgagtgtctcgcccgccaccctcgcacattgcagccaggcgacggagaagcctccacgcctagatgcaagtggtgtacgaattgcccagagggggcttgtattgggcgcaacgggagttgtaccagtgagaatgactgtcgtattaatcaacgtgaagtgttctgggccggcaactgctctgaggctgcctgtggagccgcagattgcgagcagtgcacccgagaagggaaatgcatgtggactcggcagttcaagcggactggagaaacacgtcgtatcttgagcgtacagcccacatatgactggacttgcttctcccattccttgcttaacgtcagccctatgccggttgaaagctcaccccccctcccttgcccaacaccgtgtcaccttctccctaattgcacaagttgcctcgattctaaaggagcggatggaggatggcagcactgcgtttggagttccagtctccagcagtgcctatcaccatcttacctccctctaagatgcatggcgggcggatgcggtcgcctgcttcgcggccctgagtcatgtagcctgggttgtgctcaggctacacaatgcgctctgtgcttaaggcgtcctcactgtggatggtgcgcctggggcggacaggacgggggggggcgctgtatggaaggcggtctttccgggccaagagacggtctgacgtgcgggcggcctggggcttcttgggccttcctttcatgtccacccgaagatgaatgcgcgaatggacaccacgactgcaacgagacgcagaattgtcatgaccagccccacggctatgaatgctcctgcaaaaccggatacacgatggataacatgactggtttgtgcagacccgtgtgcgcccaagggtgtgtcaacggcagctgtgtagagcctgaccactgccgatgccattttggcttcgtcggaaggaactgctccactgaatgtcgatgtaataggcactctgagtgtgccggggtgggcgcccgcgaccactgcttgctttgccggaatcacactaaggggtcccactgcgagcagtgtctcccactatttgtgggctcggctgtagggggcggaacctgtcgtccttgccatgcattctgccggggtaatagtcacatttgtatctcgcgcaaggagctgcagatgtcgaaaggcgaacctaagaagtactctctcgatcctgaagagattgaaaactgggtgacagagggtccatccgaggatgaagctgtttgcgttaactgccagaataattcctacggtgagaagtgcgagtcatgcctccagggttattttctgttggatgggaaatgcacaaagtgtcagtgtaacgggcacgcggatacgtgtaatgaacaagacggaacaggttgtccatgccagaataacactgaaactggcacctgccagggctcatcccccagtgacaggcgcgactgctacaagtatcagtgtgccaagtgcagagaatctttccacgggagccctctcggcgggcagcaatgttaccgcttaatcagtgtcgagcaggagtgttgcctcgacccaacatctcagacaaactgttttcacgagccaaagcgccgagctctgggacctggtaggaccgtcctgtttggtgtccaaccaaagtttactaacgtcgacatacgcctgactctcgatgtgacctttggagccgtcgacctttacgtgagtacaagttatgacacgtttgtcgtacgggtggcccccgacaccggggtccacaccgtgcacatacaacccccacccgctccgccgcccccaccaccccccgctgatggaggccccagaggggccggtgacccaggcggggctggggcttctagcggacccggcgctcccgcagaaccaagggtgcgcgaagtgtggccgaggggcctgatcacttatgtgactgtgactgaaccatctgcagtgctcgtcgtcagaggtgtgagagacagactggtcataacctatccacatgaacatcacgccctcaaatcttcacgattttacttgctgctgctgggggtaggcgaccctagcggaccgggcgcaaacggcagtgctgactcacaaggactgctgttctttaggcaggatcaggctcacattgatctgttcgtctttttcagtgtgttcttctcttgcttcttcctctttctcagcttgtgcgtcctgctttggaaggctaagcaggccttggaccagagacaggagcaaaggagacacctccaggaaatgacaaagatggctagcaggcctttcgcaaaagtgacagtgtgttttcctcctgatcctacggcaccggccagcgcctggaaaccagcaggtttgcccccccccgcttttaggcgctctgaacccttcctcgcacccctgctcctgacaggcgccggtggaccgtgggggccaatgggaggcggctgctgccctcccgcaatacctgcaaccaccgccggactcagagccgggccaatcaccctcgaaccaaccgaagatgggatggccggggtagccacacttcttctgcaacttccaggcggcccacatgcccccaatggagcatgcctcgggagcgcactggtcacactgagacaccgccttcacgaatattgtgggggaggaggtggcgcaggcggatccgggcacggcactggcgcaggccgtaaaggattactgtctcaggacaacctcacatctatgtccctgtag

SEQ ID NO: 117603 - DNA, 1320 bp, Artificial Sequence
  derived and/or modified sequence
atgcgggagctgcccgccggcctgctgccccccggccgggaggtgcatcagtgcgctaagtgtcgagagtcgtttcatggttcaccactgggcggacagcaatgttacaggttgatttcagtagagcaagagtgctgcttggatcctacctctcaaaccaactgctttcacgaaccgaagaggagagccttgggccctggcagaacagtcctgttcggcgtccagccgaagtttaccaacgtagatattagactgactctggacgttacattcggggcagttgatctgtatgtaagtacatcatatgatacatttgtggttcgggtagccccagatacaggcgtccacaccgtgcacatccaaccacctccggcccctcccccccccccccccccagccgacggaggccccagaggcgccggagatcctggcggggctggagcctcgagtgggccaggggccccggccgagcccagggtgagggaggtctggccccgtggcctaattacatacgtcaccgtgaccgaaccctctgcggttttagtcgtccggggagttagggatagactggtgatcacatatccacacgagcaccacgcccttaaaagctccagattctacttacttcttctgggtgtcggcgatcctagcggtcctggcgccaatggttctgccgatagtcaggggctcctgttctttcggcaagatcaagcccatatcgacctgtttgtttttttcagcgtattcttcagctgcttttttctgtttctgtcactgtgcgttctcctgtggaaggccaaacaagcactggaccagagacaggaacagcgccggcatctgcaggaaatgacaaagatggcttcccgcccattcgccaaggtgaccgtctgtttccctcctgatcccaccgcacctgctagtgcttggaaaccagccgggcttccccccccagcgtttcgcagaagcgaacctttccttgctccactgctcctgaccggcgctggtggcccctggggcccgatgggagggggttgttgcccacctgctattcccgcgactacagccggtcttagggcaggaccaataacactggaaccgactgaggatggcatggccggagttgccaccctcctcttgcagttacctggcggccctcacgcccccaacggagcatgcctcggctccgcgcttgttaccctgagacatagactgcatgaatactgtggcgggggaggtggtgccggaggcagtggccatgggactggcgctggtcgaaagggcttgctgtctcaggacaatctgacctcaatgtccctttag

SEQ ID NO: 117604 - DNA, 8336 bp, Artificial Sequence
  derived and/or modified sequence
atggcccttggcaaggtcctggctatggcactcgtcttggcgctggccgtactggggtctctgagccctggggcaagagccggagattgcaaaggccaaaggcaagtcctgagggaggcccctggcttcgtaactgatggagcaggcaactacagtgttaatggaaattgcgaatggctgatcgaggccccttccccccagcacaggattcttctagacttcctctttcttgacacagagtgcacgtatgactatctattcgtatatgatggggactcaccgcgaggccctttgctggctagcctgagtggatcaacccggccaccgccaattgaagctagctcagggaagatgctattgcacctgttttctgacgctaactataacctgctgggattcaacgcgtccttcaggttttccttgtgtccgggaggctgtcagagtcacgggcaatgtcagcccccaggcgtctgcgcatgcgaacctgggtggggcggtcctgactgcggcctccaagagtgctcagcatattgcggcagccacggcacctgcgcttcacccctgggtccatgtagatgcgagccaggctttttgggaagagcctgcgatctccacctatgggaaaatcaaggggcaggttggtggcataacgtgtccgcgagggacccagcattttcagccagaatcggagccgcaggcgcatttctttcacccccaggccttcttgccgtatttggcggacaggacttgaacaatgccctgggtgatctggtcctgtacaatttttcagctaacacttgggaatcttgggatctgtcacccgcaccggctgccaggcactcccacgtggccgtggcctgggcaggatctctggtattgatgggcggagagctggcagatggatctctgacgaatgatgtttgggcattcagcccactgggtaggggacactgggagctacttgcccctcccgcatctagctcctctggacctcctgggctcgcgggtcacgcagctgcccttgtcgacgacgtctggctctatgttagtgggggaagaacacctcatgatttatttagtagcgggttattcaggttccgacttgatagtaccagcggcggatattgggagcaagtgatcccagccggaggcaggccccctgccgcaaccggtcactccatggtatttcatgccccatctcgggctctgcttgtgcatgggggacacagaccttcgaccgcccgtttctctgtccgggtgaattcgactgaattgtttcacgtggataggcatgtgtggacaacattaaagggccgagacggcttacagggaccacgagagcgagctttccataccgcctcagtgctcgggaactatatggtcgtctatggagggaacgtccatacacattaccaggaggaaaagtgctatgaagacgggatcttcttttatcaccttgggtgtcatcagtgggtatctggagccgagcttgctccccctgggacccccgaggggagagccgctccccctagcgggaggtattcccatgtcgccgcagttttgggtggatcagtgctgcttgttgcgggtgggtatagcggaagacctcgcggagacctcatggcttataaggtgccacccttcgtgttccaggcaccagctcctgactaccatcttgactactgttcaatgtatactgatcactctgtctgctctcgagatcccgagtgtagctggtgccaaggagcttgccaggctgccccaccccctggaacccctctaggtgcatgccctgccgctagctgtttgggcctgggacgattgcttggcgactgccaggcctgtctggctttttcatcccccaccgctcccccaaggggacctggaacactgggctggtgtgtgcataacgaatcctgcctgccccgtccggagcaggccagatgccgcggagagcagatctccggaaccgtgggctggtggggccctgctcccgtttttgtaaccagcctagaagcttgcgtgactcagagtttcctgcccggtctgcaccttctaactttccagcagcctcccaacacgagccagccagacaaagaggaagtgggaaggtgggttgctcatcaggagaaggaaacacggaggttgcagcgcccaggtagcgcccgtctattccctctgcccggaagggaccataagtacgctgttgaaattcaggggcagctcaacgggagtgccggaccaggtcacagtgagctgaccttgctgtgggatcgaaccggtgttccgggaggatctgagatttccttcttcttcctagaaccttataggagcagctcttgcacatcatactcttcttgtctgggatgtctcgcagaccaggggtgtggttggtgcctcacctccgcgacatgccacttgcgccaggggggagcacactgcggtgatgatggtgcagggggaagtctcctcgtgttagtcccgacactatgccccctgtgcgaggagcaccgtgattgccacgcttgtacacaagaccccttttgcgaatggcatcaaagtacctcccgcaaaggcgacgctgcctgtagtaggcggggtcgcggacggggagctctcaagtctcctgaagagtgccctccgctgtgttctcaaagactcacctgcgaggactgtctagccaactcctcacaatgtgcttggtgccagagcacccatacctgcttcctgtttgccgcttatcttgccagatatccacacggtggttgtcgaggatgggacgactctgtgcactccgagccgaggtgcaggtcatgcgacggatttctgacttgtcacgagtgcctgcagtcacacgaatgtgggtggtgtggtaacgaggacaatccgactctcggtagatgcctacagggtgatttcagtgggcctcttggaggcggtaattgctctttatgggtcggggagggtctgggcctgccggtggcgctgcccgctcgttgggcatatgcgcgttgccctgacgtggatgagtgtagactgggattggcacggtgccacccgcgagccacctgtctcaacacaccccttagctacgagtgtcactgtcagcgtggatatcagggcgatggtatctctcattgcaataggacctgcctggaggactgtgggcacggcgtttgcagcgggccacccgacttcacttgcgtgtgtgatcttggatggacctcagacctccctcccccaactccagcacccggaccacctgctcctcgttgtagcagagattgcggctgcagcttccatagtcactgtaggaagagagggcctggcttctgcgacgagtgtcaggactggacctggggggagcactgcgagcgctgcagaccaggctctttcggtaatgctactggctctcggggatgccggccatgtcagtgcaatggccacggagatcctagacgcggacattgtgataacttgtccggactctgcttctgtcaggaccacaccgagggggctcactgccagctctgcagtccaggctattacggcgatccacgggctggaggctcttgctttagagagtgcggaggcagagcccttctgaccaacgtttcatccgtggcacttgggtcaagaagggtgggcggattacttccacctggagggggtgccgctcgcgctgggccaggtctcagctactgcgtttgggtagtctcggccaccgaagagctgcagccatgcgcccctggcacgctgtgcccaccactcacccttacattttccccagatagcagtaccccgtgtacactgtcctacgtcctcgcctttgacggattcccaagattcctggacaccggcgtggtgcaatctgaccgcagcttaatcgctgccttttgcggccagaggagagaccgccctctaacagtgcaggcccttagtggactgttggtcctccactgggaggccaatgggtcctctagctggggctttaacgcaagcgtgggaagcgcacggtgtggtagcggcggacctgggagctgccccgtgccacaagaatgcgtgcctcaggacggagccgctggggctggcctgtgccgctgtcctcaagggtgggcaggaccacactgtaggatggctctctgtcctgaaaactgtaacgcacacaccggggcaggaacctgtaaccagagcttgggcgtatgcatctgtgcagagggtttcgggggtccagattgcgcaacgaagttagacggtggccagctcgtgtgggaaacactgatggatagcagactcagcgccgacacggcttcgcggtttctgcaccgcctggggcatacaatggtggacggacctgatgctacactttggatgttcgggggactgggcttgccgcagggcctgctggggaatctgtatcgatactcagtgtcagagaggagatggacccaaatgctcgcaggagccgaggacggcggtccgggacctagcccccgatctttccatgcagccgcttatgtgccggctgggaggggagctatgtacttgttgggcggattaaccgctggcggtgtcacaagagacttctgggtgctcaatctgaccacactacagtggcggcaagagaaagcaccccagactgttgagctgcccgctgttgcaggacatactttgaccgcccgaagaggactttcgcttctacttgttggtggttattcacctgagaacggattcaatcagcagctgctcgagtaccagttagctactggcacatgggtgagtggcgctcagtcaggaactcctccaaccgggctgtacggccactccgccgtctatcacgaggctactgatagcctttatgtgttcgggggattccgctttcacgtcgaactcgctgcacccagtcccgaactgtactcccttcattgccccgaccgaacttggagtctgttggcaccgtcgcagggggctaaacgagacagaatgaggaatgtgcggggatcctccagaggcctgggccaggtaccaggggagcagcccggaagttgggggttccgggaagttaggaagaaaatggccctatgggctgcactagccggaactggcggatttttggaggagatatcgccgcatctgaaggaacctcgccctcgcctgttccatgcttctgcactattaggagacacaatggtcgttcttggaggtcgaagcgacccagacgagttctcgtctgatgtcttgctttatcaggtcaattgtaacgcttggctgttgcctgacctgaccaggagcgcatccgtcggacctcctatggaggaatccgtggcccacgccgtcgctgccgtcggcagcaggctctatatctctgggggttttggtggagtggctctcggccgtctgttggccttgacacttcccccagacccgtgccggctcctgtcttcccccgaagcttgtaaccagtctggtgcctgcacctggtgccacggagcctgccttagcggcgaccaagcacacagacttggttgcggtgggagcccatgttccccaatgcctcgctcacccgaagagtgtaggcggctaaggacctgtagtgaatgcctggcacggcaccctcgaaccctgcaacccggagacggcgaggcgtctacgccgcgatgcaagtggtgtactaactgtcccgagggagcgtgtataggcaggaacggctcttgcactagcgaaaacgactgcagaatcaatcagcgggaagtattttgggcgggtaattgcagcgaggctgcttgcggtgccgctgattgcgaacagtgtaccagagaagggaaatgtatgtggacccgtcaattcaagcgcaccggagagacgcgtaggattctaagcgtgcaacccacatatgactggacatgcttttctcattcactactcaatgtgtctcccatgcccgttgagagttccccccctctaccttgcccaaccccatgccatctgctacctaactgtacatcgtgtttggacagcaagggggctgacggcggatggcagcattgcgtgtggagctcctccctgcagcagtgtctcagtccatcttatttgcccttgcgatgtatggccggaggatgtggccgactgctgcgcggacctgagagttgctcccttggatgcgcccaggctactcagtgcgcgctgtgcttgcgtcgaccacattgcgggtggtgtgcttggggtggacaggacggtggcggtagatgcatggaggggggactctccggcccacgggatggacttacatgcgggagacccggagcgagctgggcttttctgagttgccctcctgaggacgaatgcgccaatggccaccacgattgtaatgagacgcagaattgccatgaccagccacacggatacgagtgttcttgtaaaactggctataccatggataacatgactggtttgtgcagacccgtgtgcgcccagggctgtgttaacggcagctgtgtcgagccagaccattgcagatgtcacttcggctttgtgggcaggaactgttccaccgagtgcaggtgtaatcgacacagcgagtgtgccggagttggggcaagggatcattgtctgctgtgccggaaccataccaaaggaagtcattgcgagcagtgtctccccctgtttgttggatcagccgtgggcggtggtacttgcaggccctgccacgccttctgccggggaaatagccatatctgtatcagccgaaaagaactgcagatgagtaaaggcgaacccaaaaagtacagcctcgaccctgaggaaatagagaactgggtgactgaaggaccgtctgaagatgaagcagtgtgcgtcaattgccagaacaacagttacggagagaaatgcgaatcatgcttacaaggttactttctgcttgacggaaagtgcaccaaatgtcagtgtaatggacacgctgacacgtgtaatgaacaggatggtactggttgtccctgccaaaataacacagagactggcacctgccagggctccagtccctcagacagacgcgactgttacaagtaccaatgtgcgaagtgcagagagagcttccacggctcaccactgggaggccagcagtgttaccggctgataagcgtcgagcaggaatgttgcctggaccccacaagccaaaccaactgttttcatgaacccaaacgcagggcactcggtccaggacggactgtgctgttcggtgtccaacccaaattcaccaatgtggatatcagacttaccctcgatgtgacgtttggggcagtagacctgtatgtatcgacgtcctacgacactttcgtcgtccgcgtggccccagacaccggcgttcacaccgtccacatccagccgcctccagccccacctccccctcctcccccagcagacggagggccaagaggtgctggggatccagggggtgcaggggcatcttctggcccaggggcacccgctgagcccagagtgagagaggtgtggccacggggactgatcacctatgtgacagtcacagaaccatctgccgtgttggttgtgaggggtgtccgggataggctggtcatcacctacccgcacgagcaccacgcgctcaagagttcccgattctatcttctactgctgggagtcggagaccctagtggacccggtgccaacggttccgccgactctcagggactacttttcttccgccaggatcaggctcacatcgatctctttgtcttttttagtgtgttcttttcctgcttctttctcttcctgtccttatgcgtccttctatggaaagccaagcaggccctggaccagcggcaagaacagcgaagacacctgcaggagatgaccaagatggcctcccgtccctttgccaaggtgactgtgtgttttccacccgacccaaccgcgccagcatccgcctggaagccagccggtctcccaccaccagctttccgcagatccgaaccatttctagcacccctccttttaaccggggctggcggaccgtggggccctatgggtggcggttgctgtcctcccgcaatccccgctaccactgccggactgcgggcagggcctattacattggagcccacagaggacgggatggcaggagtggccacattgctactgcagctccccggtggcccacatgcccctaatggtgcctgcctcggcagtgcgttagtcacgctccgacacaggttacacgagtactgcggcggtggcggtggggctggaggaagcggtcatgggacaggcgctggccgaaagggcttgcttagccaggacaatctgacatctatgtccctcta

SEQ ID NO: 117605 - DNA, 1320 bp, Artificial Sequence
  derived and/or modified sequence
atgagggagctgccagctggtctcctccccccaggaagggaggtgcatcagtgcgcaaaatgcagggagagtttccacggatcacccctgggcggtcagcagtgctaccgattaatatcagtcgagcaggaatgttgtctggacccaacatcgcaaaccaactgcttccatgagcccaaacgtagggccctcggccctgggaggacagtgctgttcggggtccagcccaaatttacgaatgtggatatcagactgacgctggatgtcacctttggtgctgtggacctgtacgtgtcaacctcctacgacaccttcgtggtaagagtcgcgccagataccggcgtccacacggtgcatattcaacctcctcccgctccaccacccccaccccctcctgcagacggaggcccacgcggagccggagatccagggggagctggcgctagcagcggtccgggtgctcccgctgaaccaagggtgcgcgaggtgtggcccagaggcctgatcacatatgtgaccgtcaccgagccatcggcagtcttagtggtcaggggagtacgtgaccggctcgtcattacctacccacatgaacatcacgcccttaaaagctctaggttctatctccttctcctgggcgtcggggacccctccgggccaggagccaatggcagcgctgactcccaaggattgctgttctttcgccaggaccaagcccacattgacctgttcgtgttttttagtgtattcttcagttgctttttcttgttcctgagtctgtgtgtgctcctctggaaagccaaacaggccttggaccagagacaggagcagcggagacatctgcaagagatgacgaagatggcgtctcgtccgttcgccaaggtgactgtctgctttcccccagatcctaccgccccagcatccgcctggaaacccgcaggattgccccctcccgcttttcgtcggagcgaacctttccttgcacccctgctccttacgggcgctggcggtccctgggggcctatgggcggaggctgttgtccccctgcaatccctgcaactactgcaggtctgcgagccggaccaatcacccttgagccgaccgaggacgggatggcaggtgttgcgaccctgctgctacagctgccagggggaccccatgccccaaatggggcttgccttggcagcgctctcgtgacactccggcaccgcctgcacgagtactgtggcggaggtggaggggctggaggatcagggcatggtacaggcgctggacgcaagggattgctgagtcaagataatctgacaagtatgtcgctctag

SEQ ID NO: 117606 - DNA, 8337 bp, Artificial Sequence
  derived and/or modified sequence
atggccctgggcaaggtgctggccatggccctggtgctggccctggccgtgctgggcagcctgagccccggcgccagagccggcgactgcaagggccagagacaggtgctgagagaggcccccggcttcgtgaccgacggcgccggcaactacagcgtgaacggcaactgcgagtggctgatcgaggcccccagcccccagcacagaatcctgctggacttcctgttcctggacaccgagtgcacctacgactacctgttcgtgtacgacggcgacagccccagaggccccctgctggccagcctgagcggcagcaccagacccccccccatcgaggccagcagcggcaagatgctgctgcacctgttcagcgacgccaactacaacctgctgggcttcaacgccagcttcagattcagcctgtgccccggcggctgccagagccacggccagtgccagccccccggcgtgtgcgcctgcgagcccggctggggcggccccgactgcggcctgcaggagtgcagcgcctactgcggcagccacggcacctgcgccagccccctgggcccctgcagatgcgagcccggcttcctgggcagagcctgcgacctgcacctgtgggagaaccagggcgccggctggtggcacaacgtgagcgccagagaccccgccttcagcgccagaatcggcgccgccggcgccttcctgagcccccccggcctgctggccgtgttcggcggccaggacctgaacaacgccctgggcgacctggtgctgtacaacttcagcgccaacacctgggagagctgggacctgagccccgcccccgccgccagacacagccacgtggccgtggcctgggccggcagcctggtgctgatgggcggcgagctggccgacggcagcctgaccaacgacgtgtgggccttcagccccctgggcagaggccactgggagctgctggccccccccgccagcagcagcagcggcccccccggcctggccggccacgccgccgccctggtggacgacgtgtggctgtacgtgagcggcggcagaaccccccacgacctgttcagcagcggcctgttcagattcagactggacagcaccagcggcggctactgggagcaggtgatccccgccggcggcagaccccccgccgccaccggccacagcatggtgttccacgcccccagcagagccctgctggtgcacggcggccacagacccagcaccgccagattcagcgtgagagtgaacagcaccgagctgttccacgtggacagacacgtgtggaccaccctgaagggcagagacggcctgcagggccccagagagagagccttccacaccgccagcgtgctgggcaactacatggtggtgtacggcggcaacgtgcacacccactaccaggaggagaagtgctacgaggacggcatcttcttctaccacctgggctgccaccagtgggtgagcggcgccgagctggccccccccggcacccccgagggcagagccgccccccccagcggcagatacagccacgtggccgccgtgctgggcggcagcgtgctgctggtggccggcggctacagcggcagacccagaggcgacctgatggcctacaaggtgccccccttcgtgttccaggcccccgcccccgactaccacctggactactgcagcatgtacaccgaccacagcgtgtgcagcagagaccccgagtgcagctggtgccagggcgcctgccaggccgcccccccccccggcacccccctgggcgcctgccccgccgccagctgcctgggcctgggcagactgctgggcgactgccaggcctgcctggccttcagcagccccaccgccccccccagaggccccggcaccctgggctggtgcgtgcacaacgagagctgcctgcccagacccgagcaggccagatgcagaggcgagcagatcagcggcaccgtgggctggtggggccccgcccccgtgttcgtgaccagcctggaggcctgcgtgacccagagcttcctgcccggcctgcacctgctgaccttccagcagccccccaacaccagccagcccgacaaggaggaggtgggcagatgggtggcccaccaggagaaggagaccagaagactgcagagacccggcagcgccagactgttccccctgcccggcagagaccacaagtacgccgtggagatccagggccagctgaacggcagcgccggccccggccacagcgagctgaccctgctgtgggacagaaccggcgtgcccggcggcagcgagatcagcttcttcttcctggagccctacagaagcagcagctgcaccagctacagcagctgcctgggctgcctggccgaccagggctgcggctggtgcctgaccagcgccacctgccacctgagacagggcggcgcccactgcggcgacgacggcgccggcggcagcctgctggtgctggtgcccaccctgtgccccctgtgcgaggagcacagagactgccacgcctgcacccaggaccccttctgcgagtggcaccagagcaccagcagaaagggcgacgccgcctgcagcagaagaggcagaggcagaggcgccctgaagagccccgaggagtgcccccccctgtgcagccagagactgacctgcgaggactgcctggccaacagcagccagtgcgcctggtgccagagcacccacacctgcttcctgttcgccgcctacctggccagatacccccacggcggctgcagaggctgggacgacagcgtgcacagcgagcccagatgcagaagctgcgacggcttcctgacctgccacgagtgcctgcagagccacgagtgcggctggtgcggcaacgaggacaaccccaccctgggcagatgcctgcagggcgacttcagcggccccctgggcggcggcaactgcagcctgtgggtgggcgagggcctgggcctgcccgtggccctgcccgccagatgggcctacgccagatgccccgacgtggacgagtgcagactgggcctggccagatgccaccccagagccacctgcctgaacacccccctgagctacgagtgccactgccagagaggctaccagggcgacggcatcagccactgcaacagaacctgcctggaggactgcggccacggcgtgtgcagcggcccccccgacttcacctgcgtgtgcgacctgggctggaccagcgacctgcccccccccacccccgcccccggcccccccgcccccagatgcagcagagactgcggctgcagcttccacagccactgcagaaagagaggccccggcttctgcgacgagtgccaggactggacctggggcgagcactgcgagagatgcagacccggcagcttcggcaacgccaccggcagcagaggctgcagaccctgccagtgcaacggccacggcgaccccagaagaggccactgcgacaacctgagcggcctgtgcttctgccaggaccacaccgagggcgcccactgccagctgtgcagccccggctactacggcgaccccagagccggcggcagctgcttcagagagtgcggcggcagagccctgctgaccaacgtgagcagcgtggccctgggcagcagaagagtgggcggcctgctgccccccggcggcggcgccgccagagccggccccggcctgagctactgcgtgtgggtggtgagcgccaccgaggagctgcagccctgcgcccccggcaccctgtgcccccccctgaccctgaccttcagccccgacagcagcaccccctgcaccctgagctacgtgctggccttcgacggcttccccagattcctggacaccggcgtggtgcagagcgacagaagcctgatcgccgccttctgcggccagagaagagacagacccctgaccgtgcaggccctgagcggcctgctggtgctgcactgggaggccaacggcagcagcagctggggcttcaacgccagcgtgggcagcgccagatgcggcagcggcggccccggcagctgccccgtgccccaggagtgcgtgccccaggacggcgccgccggcgccggcctgtgcagatgcccccagggctgggccggcccccactgcagaatggccctgtgccccgagaactgcaacgcccacaccggcgccggcacctgcaaccagagcctgggcgtgtgcatctgcgccgagggcttcggcggccccgactgcgccaccaagctggacggcggccagctggtgtgggagaccctgatggacagcagactgagcgccgacaccgccagcagattcctgcacagactgggccacaccatggtggacggccccgacgccaccctgtggatgttcggcggcctgggcctgccccagggcctgctgggcaacctgtacagatacagcgtgagcgagagaagatggacccagatgctggccggcgccgaggacggcggccccggccccagccccagaagcttccacgccgccgcctacgtgcccgccggcagaggcgccatgtacctgctgggcggcctgaccgccggcggcgtgaccagagacttctgggtgctgaacctgaccaccctgcagtggagacaggagaaggccccccagaccgtggagctgcccgccgtggccggccacaccctgaccgccagaagaggcctgagcctgctgctggtgggcggctacagccccgagaacggcttcaaccagcagctgctggagtaccagctggccaccggcacctgggtgagcggcgcccagagcggcaccccccccaccggcctgtacggccacagcgccgtgtaccacgaggccaccgacagcctgtacgtgttcggcggcttcagattccacgtggagctggccgcccccagccccgagctgtacagcctgcactgccccgacagaacctggagcctgctggcccccagccagggcgccaagagagacagaatgagaaacgtgagaggcagcagcagaggcctgggccaggtgcccggcgagcagcccggcagctggggcttcagagaggtgagaaagaagatggccctgtgggccgccctggccggcaccggcggcttcctggaggagatcagcccccacctgaaggagcccagacccagactgttccacgccagcgccctgctgggcgacaccatggtggtgctgggcggcagaagcgaccccgacgagttcagcagcgacgtgctgctgtaccaggtgaactgcaacgcctggctgctgcccgacctgaccagaagcgccagcgtgggcccccccatggaggagagcgtggcccacgccgtggccgccgtgggcagcagactgtacatcagcggcggcttcggcggcgtggccctgggcagactgctggccctgaccctgccccccgacccctgcagactgctgagcagccccgaggcctgcaaccagagcggcgcctgcacctggtgccacggcgcctgcctgagcggcgaccaggcccacagactgggctgcggcggcagcccctgcagccccatgcccagaagccccgaggagtgcagaagactgagaacctgcagcgagtgcctggccagacaccccagaaccctgcagcccggcgacggcgaggccagcacccccagatgcaagtggtgcaccaactgccccgagggcgcctgcatcggcagaaacggcagctgcaccagcgagaacgactgcagaatcaaccagagagaggtgttctgggccggcaactgcagcgaggccgcctgcggcgccgccgactgcgagcagtgcaccagagagggcaagtgcatgtggaccagacagttcaagagaaccggcgagaccagaagaatcctgagcgtgcagcccacctacgactggacctgcttcagccacagcctgctgaacgtgagccccatgcccgtggagagcagcccccccctgccctgccccaccccctgccacctgctgcccaactgcaccagctgcctggacagcaagggcgccgacggcggctggcagcactgcgtgtggagcagcagcctgcagcagtgcctgagccccagctacctgcccctgagatgcatggccggcggctgcggcagactgctgagaggccccgagagctgcagcctgggctgcgcccaggccacccagtgcgccctgtgcctgagaagaccccactgcggctggtgcgcctggggcggccaggacggcggcggcagatgcatggagggcggcctgagcggccccagagacggcctgacctgcggcagacccggcgccagctgggccttcctgagctgcccccccgaggacgagtgcgccaacggccaccacgactgcaacgagacccagaactgccacgaccagccccacggctacgagtgcagctgcaagaccggctacaccatggacaacatgaccggcctgtgcagacccgtgtgcgcccagggctgcgtgaacggcagctgcgtggagcccgaccactgcagatgccacttcggcttcgtgggcagaaactgcagcaccgagtgcagatgcaacagacacagcgagtgcgccggcgtgggcgccagagaccactgcctgctgtgcagaaaccacaccaagggcagccactgcgagcagtgcctgcccctgttcgtgggcagcgccgtgggcggcggcacctgcagaccctgccacgccttctgcagaggcaacagccacatctgcatcagcagaaaggagctgcagatgagcaagggcgagcccaagaagtacagcctggaccccgaggagatcgagaactgggtgaccgagggccccagcgaggacgaggccgtgtgcgtgaactgccagaacaacagctacggcgagaagtgcgagagctgcctgcagggctacttcctgctggacggcaagtgcaccaagtgccagtgcaacggccacgccgacacctgcaacgagcaggacggcaccggctgcccctgccagaacaacaccgagaccggcacctgccagggcagcagccccagcgacagaagagactgctacaagtaccagtgcgccaagtgcagagagagcttccacggcagccccctgggcggccagcagtgctacagactgatcagcgtggagcaggagtgctgcctggaccccaccagccagaccaactgcttccacgagcccaagagaagagccctgggccccggcagaaccgtgctgttcggcgtgcagcccaagttcaccaacgtggacatcagactgaccctggacgtgaccttcggcgccgtggacctgtacgtgagcaccagctacgacaccttcgtggtgagagtggcccccgacaccggcgtgcacaccgtgcacatccagcccccccccgcccccccccccccccccccccccgccgacggcggccccagaggcgccggcgaccccggcggcgccggcgccagcagcggccccggcgcccccgccgagcccagagtgagagaggtgtggcccagaggcctgatcacctacgtgaccgtgaccgagcccagcgccgtgctggtggtgagaggcgtgagagacagactggtgatcacctacccccacgagcaccacgccctgaagagcagcagattctacctgctgctgctgggcgtgggcgaccccagcggccccggcgccaacggcagcgccgacagccagggcctgctgttcttcagacaggaccaggcccacatcgacctgttcgtgttcttcagcgtgttcttcagctgcttcttcctgttcctgagcctgtgcgtgctgctgtggaaggccaagcaggccctggaccagagacaggagcagagaagacacctgcaggagatgaccaagatggccagcagacccttcgccaaggtgaccgtgtgcttcccccccgaccccaccgcccccgccagcgcctggaagcccgccggcctgcccccccccgccttcagaagaagcgagcccttcctggcccccctgctgctgaccggcgccggcggcccctggggccccatgggcggcggctgctgcccccccgccatccccgccaccaccgccggcctgagagccggccccatcaccctggagcccaccgaggacggcatggccggcgtggccaccctgctgctgcagctgcccggcggcccccacgcccccaacggcgcctgcctgggcagcgccctggtgaccctgagacacagactgcacgagtactgcggcggcggcggcggcgccggcggcagcggccacggcaccggcgccggcagaaagggcctgctgagccaggacaacctgaccagcatgagcctgtag

SEQ ID NO: 117607 - DNA, 1320 bp, Artificial Sequence
  derived and/or modified sequence
atgagagagctgcccgccggcctgctgccccccggcagagaggtgcaccagtgcgccaagtgcagagagagcttccacggcagccccctgggcggccagcagtgctacagactgatcagcgtggagcaggagtgctgcctggaccccaccagccagaccaactgcttccacgagcccaagagaagagccctgggccccggcagaaccgtgctgttcggcgtgcagcccaagttcaccaacgtggacatcagactgaccctggacgtgaccttcggcgccgtggacctgtacgtgagcaccagctacgacaccttcgtggtgagagtggcccccgacaccggcgtgcacaccgtgcacatccagcccccccccgcccccccccccccccccccccccgccgacggcggccccagaggcgccggcgaccccggcggcgccggcgccagcagcggccccggcgcccccgccgagcccagagtgagagaggtgtggcccagaggcctgatcacctacgtgaccgtgaccgagcccagcgccgtgctggtggtgagaggcgtgagagacagactggtgatcacctacccccacgagcaccacgccctgaagagcagcagattctacctgctgctgctgggcgtgggcgaccccagcggccccggcgccaacggcagcgccgacagccagggcctgctgttcttcagacaggaccaggcccacatcgacctgttcgtgttcttcagcgtgttcttcagctgcttcttcctgttcctgagcctgtgcgtgctgctgtggaaggccaagcaggccctggaccagagacaggagcagagaagacacctgcaggagatgaccaagatggccagcagacccttcgccaaggtgaccgtgtgcttcccccccgaccccaccgcccccgccagcgcctggaagcccgccggcctgcccccccccgccttcagaagaagcgagcccttcctggcccccctgctgctgaccggcgccggcggcccctggggccccatgggcggcggctgctgcccccccgccatccccgccaccaccgccggcctgagagccggccccatcaccctggagcccaccgaggacggcatggccggcgtggccaccctgctgctgcagctgcccggcggcccccacgcccccaacggcgcctgcctgggcagcgccctggtgaccctgagacacagactgcacgagtactgcggcggcggcggcggcgccggcggcagcggccacggcaccggcgccggcagaaagggcctgctgagccaggacaacctgaccagcatgagcctgtag

SEQ ID NO: 117608 - protein, 116 aa, Artificial Sequence
  derived and/or modified sequence
MPKNKEYAQVIKMLGNGRLEAMCFDGVKRLCHIRGKLRKKVWINTSDIILVGLRDYQDNKADVILKYNADEARSLKAYGELPEHAKINETDTFGPGDDDEIQFDDIGDDDEDIDDI

SEQ ID NO: 117609 - protein, 144 aa, Artificial Sequence
  derived and/or modified sequence
MPKNKGKGGKNRRRGKNENESEKRELVFKEDGQEYAQVIKMLGNGRLEAMCFDGVKRLCHIRGKLRKKVWINTSDIILVGLRDYQDNKADVILKYNADEARSLKAYGELPEHAKINETDTFGPGDDDEIQFDDIGDDDEDIDDI

SEQ ID NO: 117610 - DNA, 765 bp, Artificial Sequence
  derived and/or modified sequence
cgccgagcgtggacgcaggcggatctctgaagagctgggtcgccagcctctcccgcgcacgttgcctggcctccagcacctacttggtcccgcgcgctccctcgtgtcgcccctcggagcagcagccgccgcggtcgccgctacccggaaagaagtcagagacgccgcgaggtcgccgccaccgccatgcccaagaataaagagtatgctcaggtaatcaaaatgttgggaaatggacggctagaagcaatgtgtttcgatggtgtaaagaggttatgtcacatcagaggaaaattgagaaaaaaggtttggataaatacctcggacattattttggttggtctccgagactaccaggataacaaagctgatgtaattttaaaatacaatgcagacgaagctagaagtctgaaggcatacggcgagcttccagagcatgctaaaatcaatgaaactgatacatttggtcctggagatgatgatgaaattcagtttgatgacattggagatgatgatgaagatattgatgacatctaaattgaactcaacattttacattccatcttttctgaagattgtcctacaatttggattttgatcatgacaaagaagattaaaatttcattagcatgaatgcaatttgttaaagcagactgatttgtttctaagatatttttggtttttttaaaactgataataatgctgaattatcttaagtgagatgttaagcccactttgttcttttaatgtaatggagcttatggg

SEQ ID NO: 117611 - DNA, 4427 bp, Artificial Sequence
  derived and/or modified sequence
cgcggcgccatttgctgccgccgagcgtggacgcaggcggatctctgaagagctgggtcgccagcctctcccgcgcacgttgcctggcctccagcacctacttggtcccgcgcgctccctcgtgtcgcccctcggagcagcagccgccgcggtcgccgctacccggaaagaagtcagagacgccgcgaggtcgccgccaccgccatgcccaagaataaaggtaaaggaggtaaaaacagacgcaggggtaagaatgagaatgaatctgaaaaaagagaactggtattcaaagaggatggtcaggagtatgctcaggtaatcaaaatgttgggaaatggacggctagaagcaatgtgtttcgatggtgtaaagaggttatgtcacatcagaggaaaattgagaaaaaaggtttggataaatacctcggacattattttggttggtctccgagactaccaggataacaaagctgatgtaattttaaaatacaatgcagacgaagctagaagtctgaaggcatacggcgagcttccagagcatgctaaaatcaatgaaactgatacatttggtcctggagatgatgatgaaattcagtttgatgacattggagatgatgatgaagatattgatgacatctaaattgaactcaacattttacattccatcttttctgaagattgtcctacaatttggattttgatcatgacaaagaagattaaaatttcattagcatgaatgcaatttgttaaagcagactgatttgtttctaagatatttttggtttttttaaaactgataataatgctgaattatcttaagtgagatgttaagcccactttgttcttttaatgtaatggagcttatgggtagaagaccatgtctactaattacaaaaaaaaaaaaaaaccatgcattgctgcttttcctaccacttccagtaagaaaatgggtgttttgaagaaatcatttgccttgtcctcacggaatctgattaagccctggcctcttgattgtatagagtcattgtgtatattccagttacctagatattcccttgagattttgatacaatttgagggaggcagaagtctgcagttgaagaaaaaaaataagtctgtttgtcatatttaagtagcctgtggctatttttatactgattttgatatcatgttcttttcatagtcgtattttgccaccgtaaacataaaaaaaaaaaaaaagatttccaaaatgccgttttcagaacctgggttttaatagcagtattgaatttgtaagcttagtagttgcagaaattgaacactaggtggcactcagttatcttaacaggggaagtactgatacaattgttgacttttcttttactatgtgtaagaaataccccaaacatgaaaagattgttttgatcatatgcatgtatgtagaatatttttgcagagcagaaagattatgttagaagtgtgatttttattttcagaagtcatatacatgtaagctacaattttgagtgctttataaacacttaagatatatatataaattttaatttcatagcaacttgtaaaaaataaaatacttgttgaaaagcctttttcaacatatccctaagctaagggaagaggaaggaataacaactcagtgaaaagatggtctccagtttctgaatgaaaaagctacagctgagaaataaaataaaatgtcatgctgcagaatatgttatacccttattttgtgttaaggatatattttattatgtgaatggttttgtttttgttttttgtttttgttttttgcttgtattgggaattagctttactggtaacttccttatttagtttttagtggtcaactctaataaaatgaaactagggctgagctagttagccctcactagccaaactgaaactctatgcaacattaaaagaagagatccatcatgtagcttgtgacacttttattttattagtcaccggggaacttttcagtgatgaaaatacacagggtaataaaccttcacatggcttcaaaaggaaaacaagcaaatcttctctaatctactcttactataatttcctaagtgtacaccaaactctggatttaaaaatctgaagtactatagaacattaagttgaagaatggaaattaagagtacgtattcatggtttatatttcttattctatggagttcgtgaacacatctaggtggaatgcatctgagactaagggctggtttttaatcctcataagaaaccagccttgaagaattaacaattctcttcattggtattctaaacctcctaagatatttaggcttctgtacataaaagtgtttttgctaaatttacagtatatatagatcctttcatattattttactaagaatgtttgaactttgcatatttgatatagttcctggtaggaatagcacagctcaaacattagtttttctacttacctcctctaacacgtggtttgtctggagagtttctaaaaattcagctataaccccagttcatgtatttactggtgattgttcttgctgaggtagtaacagcccaatcttgggctgttaaatcctaggaaatctcgaatcatagtgattaaaatagttggggtaaagttgtagcttatatgcaatactacttggaggaattcttctactaatttgtatttaatgtggaaattgtatagtttcattgatttaatcataaataatggaaatggtctccaagaagttttatttttcatttttttgcttatacactctgattcctataatacagtgctataagctatgcacagaaaataaaatgtttgaaatccaagaataatggttcttactgctaagagggagtaatagttattactaatgattttgattgggttgcatttttgttgcaatgtttattccacttgcagttagaatatgaatatgttttatcactagtgtggctaaataaccaaacatttgtgtaaaaaaaaaaaaaagccaagatttcattgtttgttgaatatttcttaagcatctggcccctaaagagaccgcttcttaccaagcctgtaaactatgcatgatggaaattcttgtattttatttaggaatggctgttggtttactcaccacatctgtggaatcatggctataaatgtttgcttacaaactctttgtgacttgtaatttaacttaatctcatctaatgtaaatattagattatgatgttcagtaacatcttccataggtataaactgctgtcattattgatttcagagtaactctgagtaatcaaataggtaaaagcatgttttgagtaaaatagctagatttatactttacttgtatacagacttaacaacaaccggtattgactggattgacagctaaagtatcagaatgaaagcaaggtttttttgatgttacctgactgtcataaagatgaaaatgatttgtattggtatgaaatgcttatctttattctacttcgtaagggtaagttttatttatactctttggactcccatgaacttttgcacactgctttgtgtttttggtttaccctaaactaccatcctttttatctttgctttttttcttcctattcagaaaagagcaaaatgtgaaaagacacaagactctcaggtatagaatgaactgagcaatttggagaatgtattggactttgtcctctcttattcccccctcctagccctgcaagttgctaggtacttgtgaggcagtgtactggagaggggagagcatggatcctggggtcaaagggcctttgcccccacccttacttggccctctacctgcaggtgaccactggcacattctcctgcttgtctcagcttcaggttcttcacctctaagatggggatgatgaaaacagtacctgtcatgcagaattgttgggaggattgataatttagatgtttatacatgtaatgtacttagatcagtgtctgctcttttcacttgatatccagtactatgtaagatagaaggtgcatgtcttctgtattctgtatttcccatttcttttgcgtgcagtctttgattcgtacaatagaaggaacacgtagaatgtatatttgtacattcatgtcaacatagtatttgaaattgctaccaaactcatttaatttggcataagactaacagatgaagtctctcatttgcttgaagatattttacaaaataccaactgttctatatttctttagaaaaagattatagttattaatattgatacctctgataatattttattcttaaatcttcagtgattccttttactatagattcatgacagctaattagtactaactgatttagaggtttcctttcccatcatatggaatgatgtaaagaaatcagatacaaactactgcaattagaaaataaaatatgaacaactttcaacaatgta

SEQ ID NO: 117612 - DNA, 351 bp, Artificial Sequence
  derived and/or modified sequence
atgcccaaaaacaaagagtacgcgcaggttatcaaaatgctgggcaacggacgactggaggctatgtgctttgacggcgtgaaacggctatgccacatacgaggcaaactacgcaaaaaggtgtggatcaacacttcagacatcatcctggttggtttgcgagactatcaggataacaaagctgatgtgattctgaagtacaacgctgacgaagccaggagtctgaaggcctatggtgaattgccagagcatgccaagattaacgaaaccgacaccttcggccccggggacgatgacgaaatccaatttgatgatattggtgatgatgatgaggatatcgatgatatttag

SEQ ID NO: 117613 - DNA, 435 bp, Artificial Sequence
  derived and/or modified sequence
atgcctaagaacaaaggaaaagggggaaaaaaccgccggcgtggaaaaaatgaaaacgagagtgagaaaagagaattggtcttcaaagaagatgggcaagagtacgcccaagtgattaagatgcttgggaacggtaggctggaagcgatgtgtttcgatggggtcaaacggctttgtcacattcgcggcaaattacggaagaaggtgtggattaatacatctgatatcattcttgtaggactgagggattaccaggacaacaaggccgacgtgatcctgaagtacaatgctgacgaagcgcgttctcttaaagcatatggcgagctgccagagcacgccaaaatcaatgagaccgacacctttggccctggagacgacgacgaaatccagttcgacgacatcggcgatgacgacgaagatatcgatgatatctag

SEQ ID NO: 117614 - DNA, 351 bp, Artificial Sequence
  derived and/or modified sequence
atgcccaagaacaaggagtatgcccaggtgatcaagatgctgggcaatggccgcctggaggccatgtgctttgatggagtgaagaggctgtgccacatccggggcaagctgaggaagaaggtgtggatcaacaccagtgacatcatcctggtgggcctgcgggactaccaggacaacaaggcagatgtgatcctgaagtacaatgctgatgaggcccggagcctgaaggcctacggggagctgcctgagcacgccaagatcaatgaaacagacacctttggacctggagatgatgatgagatccagtttgatgacattggagatgatgatgaagatattgatgacatctag

SEQ ID NO: 117615 - DNA, 435 bp, Artificial Sequence
  derived and/or modified sequence
atgcccaagaacaagggcaaaggaggcaagaacagaagaagaggcaagaatgaaaatgaaagtgagaagcgggagctggtgttcaaggaggatggccaggagtatgcccaggtgatcaagatgctgggcaatggccgcctggaggccatgtgctttgatggagtgaagaggctgtgccacatccggggcaagctgaggaagaaggtgtggatcaacaccagtgacatcatcctggtgggcctgcgggactaccaggacaacaaggcagatgtgatcctgaagtacaatgctgatgaggcccggagcctgaaggcctacggggagctgcctgagcacgccaagatcaatgaaacagacacctttggacctggagatgatgatgagatccagtttgatgacattggagatgatgatgaagatattgatgacatctag

SEQ ID NO: 117616 - DNA, 351 bp, Artificial Sequence
  derived and/or modified sequence
atgcccaagaacaaggagtacgcccaggtgatcaagatgctgggcaacggcaggctcgaagccatgtgctttgatggcgtcaaaaggttatgtcatatacgcgggaagttgcgcaagaaggtgtggatcaacacttctgatatcatccttgttggtttgcgggattatcaggacaataaagccgacgtaattcttaagtacaatgccgacgaggctcggtctctaaaggcttacggcgagctgccagaacacgccaagatcaacgaaaccgacacctttgggcctggggacgacgatgaaatccagttcgatgatattggggatgacgatgaggatatcgatgatatctag

SEQ ID NO: 117617 - DNA, 435 bp, Artificial Sequence
  derived and/or modified sequence
atgcccaagaacaagggcaagggcggcaagaaccggcggcggggcaagaacgagaatgaatctgagaagcgggagctcgtatttaaagaggatggacaggagtatgcccaagtaatcaagatgctcggcaacggacgccttgaagctatgtgttttgatggcgttaagaggttatgtcacatacggggcaaattgcgcaagaaggtgtggatcaatacctctgatatcattctcgtgggtcttcgagactaccaagataacaaagcagatgtcatcttaaagtataatgcggacgaggcgcggagcctgaaagcttacggtgaactccctgagcatgccaaaatcaacgaaactgatacgtttggacctggcgacgatgatgagattcagtttgacgatatcggagatgatgacgaggatatcgacgatatttag

SEQ ID NO: 117618 - DNA, 351 bp, Artificial Sequence
  derived and/or modified sequence
atgcccaagaataaagagtatgctcaggtgattaaaatgttagggaatggaaggctcgaagcgatgtgctttgacggtgtgaaacggttatgccacattcgcggaaaattgagaaagaaagtctggatcaacacatccgacattattctggtcggcctacgggattaccaagacaataaggcagacgtcattctcaaatataatgcggacgaagcacggtcccttaaggcatatggggaactgcctgagcacgcaaaaatcaatgaaacggacactttcggcccaggggatgacgatgaaatccagttcgacgacataggcgacgacgatgaagatatagacgacatctag

SEQ ID NO: 117619 - DNA, 435 bp, Artificial Sequence
  derived and/or modified sequence
atgcccaagaacaaagggaaaggtggaaaaaaccgcaggaggggtaagaacgaaaatgagagtgagaaacgtgaactggtgttcaaggaagacggacaggaatacgcacaggtcattaagatgctgggaaatgggcgactggaggctatgtgcttcgatggggtcaaaagactctgccacataagagggaaattacggaaaaaagtctggattaatacaagcgatattattttagtcgggcttcgcgactatcaggacaacaaggcggacgtgattctgaagtataatgccgatgaagcaaggtcactaaaagcatacggagagctgcccgagcacgctaaaattaatgagactgacaccttcggacctggcgatgatgatgagatccagtttgacgatataggcgacgacgacgaggatatcgatgacatttag

SEQ ID NO: 117620 - DNA, 351 bp, Artificial Sequence
  derived and/or modified sequence
atgcccaagaacaaggagtacgcccaggtgatcaagatgctgggcaacggcagactggaggccatgtgcttcgacggcgtgaagagactgtgccacatcagaggcaagctgagaaagaaggtgtggatcaacaccagcgacatcatcctggtgggcctgagagactaccaggacaacaaggccgacgtgatcctgaagtacaacgccgacgaggccagaagcctgaaggcctacggcgagctgcccgagcacgccaagatcaacgagaccgacaccttcggccccggcgacgacgacgagatccagttcgacgacatcggcgacgacgacgaggacatcgacgacatctag

SEQ ID NO: 117621 - DNA, 435 bp, Artificial Sequence
  derived and/or modified sequence
atgcccaagaacaagggcaagggcggcaagaacagaagaagaggcaagaacgagaacgagagcgagaagagagagctggtgttcaaggaggacggccaggagtacgcccaggtgatcaagatgctgggcaacggcagactggaggccatgtgcttcgacggcgtgaagagactgtgccacatcagaggcaagctgagaaagaaggtgtggatcaacaccagcgacatcatcctggtgggcctgagagactaccaggacaacaaggccgacgtgatcctgaagtacaacgccgacgaggccagaagcctgaaggcctacggcgagctgcccgagcacgccaagatcaacgagaccgacaccttcggccccggcgacgacgacgagatccagttcgacgacatcggcgacgacgacgaggacatcgacgacatctag

SEQ ID NO: 117622 - protein, 305 aa, Artificial Sequence
  derived and/or modified sequence
MDDKELIEYFKSQMKEDPDMASAVAAIRTLLEFLKRDKGETIQGLRANLTSAIETLCGVDSSVAVSSGGELFLRFISLASLEYSDYSKCKKIMIERGELFLRRISLSRNKIADLCHTFIKDGATILTHAYSRVVLRVLEAAVAAKKRFSVYVTESQPDLSGKKMAKALCHLNVPVTVVLDAAVGYIMEKADLVIVGAEGVVENGGIINKIGTNQMAVCAKAQNKPFYVVAESFKFVRLFPLNQQDVPDKFKYKADTLKVAQTGQDLKEEHPWVDYTAPSLITLLFTDLGVLTPSAVSDELIKLYL

SEQ ID NO: 117623 - DNA, 2477 bp, Artificial Sequence
  derived and/or modified sequence
cgaggtgctgtgactcgtgccagccccctaatctgcggaagtggagtgcggggagtgcgccggaagaggggtacggaagtgcgccggaagtggggtgcggaggtgtgcagcgcgctgtcagactggctcgcaggcggcgcggccggcggacccgttcgagacagcgcgggcggctcgggtcccctggggctccgcagcaggaggacgccatggacgacaaggagttaattgaatactttaagtctcagatgaaagaagatcctgacatggcctcagcagtggctgccatccggacgttgctggagttcttgaagagagataaaggggagacaatccagggtctgagggcgaatctcaccagtgccatagaaaccctgtgtggtgtggactcctctgtggcagtgtcctctggcggggagctcttcctccgcttcatcagtcttgcctccctggaatactccgattactccaaatgtaaaaagatcatgattgagcggggagaactttttctcaggagaatatcactgtcaagaaacaaaattgcagatctgtgccatactttcatcaaagatggagcgacaatattgactcacgcctactccagagtggtcctgagagtcctggaagcagccgtggcggccaagaagcgatttagtgtatacgtcacagagtcacagcctgatttgtcaggtaagaaaatggccaaagccctctgccacctcaacgtccctgtcactgtggtgctagatgctgctgtcggctacatcatggagaaagcagatcttgtcatagttggtgctgaaggagttgttgaaaacggaggaattattaacaagattggaaccaaccagatggctgtgtgtgccaaagcacagaacaaacctttctatgtggttgcagaaagtttcaagtttgtccggctctttccactaaaccagcaagacgtcccagataagtttaagtataaggcagacactctcaaggtcgcgcagactggacaagacctcaaagaggagcatccgtgggtcgactacactgccccttccttaatcactctgctgtttacagacctgggcgtgctgacaccctcagcagtcagcgatgagctcatcaagctctatctgtaacctgtgagccctttcctgccaaggtgcagcttacgtagttgaggcagggtgagtagctgcttgacaccccagtgagtcaggccaaaactgagatgtgtttaatgaagatttatggagtaaggacttaaaatcatacatcttggagaacctttcttactcatttcagtcccatctaaaaatgtgtcagctattctaaatcccaacttaaattgttcttacggtttctagaaactttccttttcagtttccagaaatacaagttagataattggctacttaactgatgaaagatgagcccaagtccacctgtcttcatcctcccctgcactccagactgatctgcctaaagcacgcgagatgcaggcgaaaagcagccacacccctctgccacaaatgaccaacagctggtcaggacgttacacgcggtgccttgtaagaggcaagaaacacttgctgaatctgcatctggcttccagtggtaagcacattcctcagcaggatcaagccaaacagtaaaaactaccaagagaacacgaggaaggcagaaacgatgtttagcaacagtattctgcatggttcactgcttaagaaaatgccttctggaatatttgtaaactgaaattctgtatgtgtaagagatgtttaaatatgtttgggtcctaaacagctttttaaaattatacttgggaataaattcagcatcttttcaaataaactctatgaaagacgctgatgtggtgttgcatcaatactgcaagctgaccaggccatctaggggaaaacactgtccagctacatttacacacttaagacccaggcaatcaggacaccatttattcaacaggaggcataaaaactataattctctttcccggaatatgacttaatccctctgtttttcagctattcaccaataaaacaatactgtgactattaacacagaaaaaccccagcacattagccacccctgcaggacatcaaaggataactgaagcccagggccaagcacattcaggaggtcaaatgcctgaagatactgaggaatggttttgaaaatcagaagtcaagaagacttctgtatctttatgtttaaaaataactataaaatagcctcagaaaaaagagcttatatatatatatatatatatatatatatatatatatatatatatataatatgtacatatgtctatatgtgacccatcatgataaatactgacatctattatttacactcaaataattttacattttcttctgttagactactccaagactggaattgttttgttttgttgtttttaatgagagggtctcgctgtgttcccaggctggtcttgaactcctggg

SEQ ID NO: 117624 - DNA, 918 bp, Artificial Sequence
  derived and/or modified sequence
atggacgataaggaattaattgagtattttaaatcccagatgaaagaggatcccgatatggccagtgctgtggccgccattcggacccttctggagttccttaaacgagacaaaggagaaactatccagggcctgcgtgctaacctgacttctgcaattgaaaccctttgcggcgtggattcttcagttgccgtctctagcgggggagaactttttctccgtttcatcagcttggcttcactggagtatagcgattattctaaatgcaagaagatcatgatagagcggggcgaactatttttgagaaggataagcttatccaggaataagatcgctgacctttgccatacgtttattaaggacggagccactattctgacccacgcatactcaagagtggtattgagggtccttgaggccgccgttgccgctaaaaaacgcttttccgtgtatgtcactgaatcacaacccgacctgagtggtaagaaaatggcaaaagccctgtgtcacttgaacgtgcccgttactgtggtcctagatgctgctgtgggttatatcatggagaaggccgatctcgttatcgtgggggctgagggagtggtggagaatggtggcataattaacaagatcggcaccaatcagatggcagtgtgcgctaaagcacagaacaagccattctatgtggtggctgagtcctttaagtttgtgagactatttcccctgaaccagcaggatgtccccgacaaatttaagtacaaagctgacactttgaaagtcgctcagaccggacaagatctgaaagaggagcatccatgggtagactacaccgctccttccctcataacgctgctatttaccgatttgggagtgcttacgccaagcgcagttagcgatgagctgattaagctgtatttatag

SEQ ID NO: 117625 - DNA, 918 bp, Artificial Sequence
  derived and/or modified sequence
atggatgacaaggagctgattgagtacttcaagagccagatgaaggaggaccctgacatggccagcgctgtggccgccatccgcaccctgctggagttcctgaagagggacaagggggagaccatccagggcctgcgggccaacctgaccagcgccatcgagaccctgtgtggggtggacagctctgtggccgtgtcctctggaggagagctgttcctgcgcttcatcagcctggccagcctggagtacagcgactacagcaagtgcaagaagatcatgattgaaagaggagagctgttcctgcggcgcatcagcctgagcaggaacaagattgctgacctgtgccacaccttcatcaaggatggagccaccatcctgacccacgcctacagccgggtggtgctgcgggtgctggaggccgctgtggccgccaagaagcgcttctctgtgtatgtgacagagagccagcctgacctgagcggcaagaagatggccaaggccctgtgccacctgaatgtgcctgtgacagtggtgctggatgctgctgtgggctacatcatggagaaggctgacctggtgattgtgggcgctgagggcgtggtggagaatggaggcatcatcaacaagattggcaccaaccagatggctgtgtgtgccaaggcccagaacaagcccttctacgtggtggccgagagcttcaagtttgtgcggctcttccccctgaaccagcaggatgtgcctgacaagttcaagtacaaggctgacaccctgaaggtggcccagacaggccaggacctgaaggaggagcacccctgggtggactacacagcccccagcctcatcaccctgctcttcacagacctgggcgtgctgacccccagcgctgtgtctgatgagctgatcaagctgtacctgtag

SEQ ID NO: 117626 - DNA, 918 bp, Artificial Sequence
  derived and/or modified sequence
atggacgacaaggagctgatcgagtacttcaagagccagatgaaggaggacccagacatggcgtcggctgttgccgccattcgtactcttttggagtttttgaaacgggacaaaggcgaaacgatccaggggctgcgggccaatctcacgtccgctatcgagaccctttgcggcgttgatagttcagtggctgtgtccagtgggggcgagttgttcctgagattcattagtttagccagtctcgagtactccgattacagtaagtgtaagaaaattatgattgagaggggggaactctttctgagaaggatttcattgagccggaacaagatcgcagatctgtgtcatacattcattaaggacggtgccacgatcttgacacatgcctactcgagagttgttttgcgcgtactggaagccgcagtcgcagcaaaaaaacgattctctgtgtatgttaccgaatcccagccggacctgagcggaaagaaaatggccaaggccctatgccacctgaacgtgcccgtgacggtcgttttagatgctgctgtagggtatatcatggagaaagctgatctggtgattgtcggagccgagggcgttgtggagaatggcgggatcattaacaagattggcacaaatcagatggccgtgtgcgctaaggcccaaaacaagcccttttatgtggttgcagagtctttcaagttcgtacgacttttcccgctgaatcagcaggatgtgccggacaagttcaagtataaagctgacacactgaaggtggcccagaccgggcaggatttgaaagaggaacacccatgggtggattacaccgccccatccttgattactcttttgttcaccgacctgggcgtgctgacccccagtgccgtatctgacgaactgatcaagctatatctttag

SEQ ID NO: 117627 - DNA, 918 bp, Artificial Sequence
  derived and/or modified sequence
atggacgataaagagctgattgaatatttcaaatcccagatgaaagaggatccggatatggcttctgccgttgctgcaatccggactttactagaattccttaagagagataaaggtgaaaccatccagggcctccgcgcaaacctgacgtcggccatcgagactctttgtggcgtggatagcagcgtcgccgtgagcagtgggggtgaactgttcctgaggttcatctcacttgctagtctcgagtattcagactatagcaaatgcaaaaaaataatgattgagaggggtgaactgttcttacgaagaatcagcctatcaagaaacaagattgccgatttgtgccatacctttattaaggacggggcaaccatcctgacccatgcgtactctagagtcgtcctgcgagtgctggaggctgcggtggcagcaaagaagcgcttttcggtgtatgtgaccgagtctcagcctgacctttccggaaaaaaaatggctaaggcgttgtgccacttaaatgtgccagtgaccgtcgtcctcgacgcagcagtggggtatattatggaaaaagctgatctcgtcattgtgggcgcagaaggagtggtagagaacggcggtatcatcaataaaattggaacgaaccagatggcagtgtgcgcaaaggcccagaataagcctttctatgtcgttgctgagagttttaaatttgtcaggttattccccttgaatcagcaggacgtgcccgacaaatttaagtataaagctgatacgcttaaggtcgcacagactggccaggaccttaaagaggagcacccatgggtggattatacagccccaagtctgataacactactattcaccgacctgggcgtccttactccaagtgccgtatctgacgagttgattaagttgtacctgtag

SEQ ID NO: 117628 - DNA, 918 bp, Artificial Sequence
  derived and/or modified sequence
atggacgacaaggagctgatcgagtacttcaagagccagatgaaggaggaccccgacatggccagcgccgtggccgccatcagaaccctgctggagttcctgaagagagacaagggcgagaccatccagggcctgagagccaacctgaccagcgccatcgagaccctgtgcggcgtggacagcagcgtggccgtgagcagcggcggcgagctgttcctgagattcatcagcctggccagcctggagtacagcgactacagcaagtgcaagaagatcatgatcgagagaggcgagctgttcctgagaagaatcagcctgagcagaaacaagatcgccgacctgtgccacaccttcatcaaggacggcgccaccatcctgacccacgcctacagcagagtggtgctgagagtgctggaggccgccgtggccgccaagaagagattcagcgtgtacgtgaccgagagccagcccgacctgagcggcaagaagatggccaaggccctgtgccacctgaacgtgcccgtgaccgtggtgctggacgccgccgtgggctacatcatggagaaggccgacctggtgatcgtgggcgccgagggcgtggtggagaacggcggcatcatcaacaagatcggcaccaaccagatggccgtgtgcgccaaggcccagaacaagcccttctacgtggtggccgagagcttcaagttcgtgagactgttccccctgaaccagcaggacgtgcccgacaagttcaagtacaaggccgacaccctgaaggtggcccagaccggccaggacctgaaggaggagcacccctgggtggactacaccgcccccagcctgatcaccctgctgttcaccgacctgggcgtgctgacccccagcgccgtgagcgacgagctgatcaagctgtacctgtag

SEQ ID NO: 117629 - protein, 472 aa, Artificial Sequence
  derived and/or modified sequence
MAGGEAGVTLGQPHLSRQDLTTLDVTKLTPLSHEVISRQATINIGTIGHVAHGKSTVVKAISGVHTVRFKNELERNITIKLGYANAKIYQLDDPSCPRPECYRSCGSSMPDEFPTDIPGTKGNFRLVRHVSFVDCPGHDILMATMLNGAAVMDAALLLIAGNESCPQPQTSEHLAAIEIMKLKHILILQNKIDLVKERQAKEQYEQILAFVQGTVAEGAPIIPISAQLKYNIEVVCEYIVKKIPVPPRDFTSEPRLIVIRSFDVNKPGCEVDDLKGGVAGGSILKGVLKVGQETEVRPGIVSKDSEGKLMCKSIFSKIVSLFAEHNDLQYAAPGGLIGVGTKIDPTLCRADRMVGQILGAVGALPEIFTELEISYFLLRRLLGVRTEGDKKAAKVQKLSKNEVLMVNIGSLSTGGRVSAVKADLGKIVLTNPVCTEVGEKIALSRRVEKHWRLIGWGQIRRGVTIKPTVDDD

SEQ ID NO: 117630 - protein, 472 aa, Artificial Sequence
  derived and/or modified sequence
MAGGEAGVTLGQPHLSRQDLTTLDVTKLTPLSHEVISRQATINIGTIGHVAHGKSTVVKAISGVHTVRFKNELERNITIKLGYANAKIYKLDDPSCPRPECYRSCGSSTPDEFPTDIPGTKGNFKLVRHVSFVDCPGHDILMATMLNGAAVMDAALLLIAGNESCPQPQTSEHLAAIEIMKLKHILILQNKIDLVKESQAKEQYEQILAFVQGTVAEGAPIIPISAQLKYNIEVVCEYIVKKIPVPPRDFTSEPRLIVIRSFDVNKPGCEVDDLKGGVAGGSILKGVLKVGQEIEVRPGIVSKDSEGKLMCKPIFSKIVSLFAEHNDLQYAAPGGLIGVGTKIDPTLCRADRMVGQVLGAVGALPEIFTELEISYFLLRRLLGVRTEGDKKAAKVQKLSKNEVLMVNIGSLSTGGRVSAVKADLGKIVLTNPVCTEVGEKIALSRRVEKHWRLIGWGQIRRGVTIKPTVDDD

SEQ ID NO: 117631 - protein, 183 aa, Artificial Sequence
  derived and/or modified sequence
  misc_feature (1)..(1): Xaa can be any naturally occurring amino acid
XAGGEAGVTLGQPHLSRQDLTTLDVTKLTPLSHEVISRQATINIGTIGHVAHGKSTVVKAISGVHTVRFKNELERNITIKLGYANAKIYKLDDPSCPRPECYRSCGSSTPDEFPTDIPGTKGNFKLVRHVSFVDCPGHDILMATMLNGAAVMDAALLLIGKYLTIGLDKSMWNKSKMKYLKGN

SEQ ID NO: 117632 - DNA, 1419 bp, Artificial Sequence
  derived and/or modified sequence
atggccggcggcgaggccggcgtgaccctgggccagccccacctgagcagacaggacctgaccaccctggacgtgaccaagctgacccccctgagccacgaggtgatcagcagacaggccaccatcaacatcggcaccatcggccacgtggcccacggcaagagcaccgtggtgaaggccatcagcggcgtgcacaccgtgagattcaagaacgagctggagagaaacatcaccatcaagctgggctacgccaacgccaagatctaccagctggacgaccccagctgccccagacccgagtgctacagaagctgcggcagcagcatgcccgacgagttccccaccgacatccccggcaccaagggcaacttcagactggtgagacacgtgagcttcgtggactgccccggccacgacatcctgatggccaccatgctgaacggcgccgccgtgatggacgccgccctgctgctgatcgccggcaacgagagctgcccccagccccagaccagcgagcacctggccgccatcgagatcatgaagctgaagcacatcctgatcctgcagaacaagatcgacctggtgaaggagagacaggccaaggagcagtacgagcagatcctggccttcgtgcagggcaccgtggccgagggcgcccccatcatccccatcagcgcccagctgaagtacaacatcgaggtggtgtgcgagtacatcgtgaagaagatccccgtgccccccagagacttcaccagcgagcccagactgatcgtgatcagaagcttcgacgtgaacaagcccggctgcgaggtggacgacctgaagggcggcgtggccggcggcagcatcctgaagggcgtgctgaaggtgggccaggagaccgaggtgagacccggcatcgtgagcaaggacagcgagggcaagctgatgtgcaagagcatcttcagcaagatcgtgagcctgttcgccgagcacaacgacctgcagtacgccgcccccggcggcctgatcggcgtgggcaccaagatcgaccccaccctgtgcagagccgacagaatggtgggccagatcctgggcgccgtgggcgccctgcccgagatcttcaccgagctggagatcagctacttcctgctgagaagactgctgggcgtgagaaccgagggcgacaagaaggccgccaaggtgcagaagctgagcaagaacgaggtgctgatggtgaacatcggcagcctgagcaccggcggcagagtgagcgccgtgaaggccgacctgggcaagatcgtgctgaccaaccccgtgtgcaccgaggtgggcgagaagatcgccctgagcagaagagtggagaagcactggagactgatcggctggggccagatcagaagaggcgtgaccatcaagcccaccgtggacgacgactag

SEQ ID NO: 117633 - DNA, 1419 bp, Artificial Sequence
  derived and/or modified sequence
atggctggtggagaagctggcgtgacccttgggcaaccccatttaagcaggcaggatcttaccactctggacgtaaccaaactcaccccactatcccacgaggtgataagccgccaggctaccattaacattggcaccattggccatgtagcccatggaaagagtactgttgtaaaggccatctcaggagtgcacactgtacggttcaaaaacgaattggagagaaacatcaccattaaactcggctacgcaaacgccaaaatctaccaactggacgatccttcgtgtccgcggcctgaatgttaccgatcctgtggctcctccatgcccgatgagttccccacagatatccctggtacgaagggaaacttccggctggtcaggcatgtgtcctttgtggactgccccggacacgatattctgatggcaactatgctaaatggggcagcagtcatggatgcggcattgctgctaatcgcaggaaatgagtcctgtcctcagccccagaccagcgaacatctcgcagcgatcgagatcatgaaactgaagcatatactgatactgcaaaacaaaattgacctcgtgaaggagaggcaggccaaggaacaatacgagcagattctagcctttgtgcagggcacagtcgcagagggggcccctatcatccctatcagcgcccaactaaagtataacatcgaagtggtgtgcgagtatatcgtgaagaagattcccgtcccgccccgagacttcacgagtgagccaagacttattgtcattaggtccttcgatgtgaataagcctgggtgcgaagtggatgatctcaagggcggagtcgcaggagggtctatcctgaaaggcgttttgaaggtgggacaggaaacagaagtaagacctggtatcgtatcaaaagattcggagggcaaactaatgtgtaagtccatttttagcaagatcgtttctctttttgctgagcataatgacctccagtacgcggcacctggtgggctgatcggtgtcggaacaaaaattgacccaactctgtgtcgcgccgatcgcatggtgggccaaatactgggcgccgtgggcgcattaccagaaatcttcacggagctggaaatttcttacttcctgctccgccgcctgctgggcgtgcggacagaaggggataagaaagccgcaaaggtgcagaaactatctaaaaatgaggttctgatggtaaacataggttccctctctactgggggtcgcgtgagtgccgtaaaagctgacctggggaaaatagtgttgacaaacccagtatgcaccgaagtcggggagaaaattgcgctctcaaggcgtgtcgagaaacattggagactcatcgggtggggccaaatccgccggggcgtaacgattaagccgacagtggatgacgattag

SEQ ID NO: 117634 - DNA, 1419 bp, Artificial Sequence
  derived and/or modified sequence
atggccggcggggaggccggcgtgaccctgggccagccccacctgagccggcaggacctgaccaccctggatgtgaccaagctgacccccctgagccatgaagtcatcagccggcaggccaccatcaacatcggcaccatcggccacgtggcccacggcaagagcacagtggtgaaggccatcagcggcgtgcacacagtgcgcttcaagaatgagctggagaggaacatcaccatcaagctgggctacgccaatgccaagatctaccagctggatgaccccagctgccccaggcctgagtgctaccgcagctgtggcagctccatgccagatgagttccccacagacatccctggcaccaagggcaacttccggctggtgagacatgtgtcctttgtggactgccccggccatgacatcctgatggccaccatgctgaatggagctgctgtgatggatgctgccctgctgctgattgctggaaatgaaagctgcccccagccccagaccagcgagcacctggccgccatcgagatcatgaagctgaagcacatcctgatcctgcagaacaagattgacctggtgaaggagcggcaggccaaggagcagtatgagcagatcctggcctttgtgcagggcaccgtggccgagggcgcccccatcatccccatcagcgcccagctgaagtacaacatcgaggtggtgtgtgagtacatcgtgaagaagatccctgtgcccccccgggacttcaccagcgagccccggctgattgtcatccgcagctttgatgtgaacaagccaggctgtgaggtggatgacctgaagggcggcgtggccggcggcagcatcctgaagggcgtgctgaaggtgggccaggagacagaggtgcggcccggcatcgtgtccaaggacagcgagggcaagctgatgtgcaagagcatcttcagcaagatcgtgtccctgtttgctgagcacaatgacctgcagtatgctgcccctgggggcctgattggagtgggcaccaagattgaccccaccctgtgcagagctgacaggatggtgggccagatcctgggcgctgtgggcgccctgcctgagatcttcacagagctggagatctcctacttcctgctgcggcggctgctgggcgtgaggacagaaggagacaagaaggccgccaaggtgcagaagctgagcaagaatgaggtgctgatggtgaacatcggcagcctgagcactggaggccgggtgtctgctgtgaaggctgacctgggcaagatcgtgctgaccaaccctgtgtgcacagaggtgggggagaagatcgccctgagcagaagagtggagaagcactggaggctcatcggctggggccagatccggcggggcgtgaccatcaagcccaccgtggatgatgactag

SEQ ID NO: 117635 - DNA, 1419 bp, Artificial Sequence
  derived and/or modified sequence
atggccggcggcgaggccggcgtgaccctgggccagccccacctgtcaaggcaggatctgactaccttggacgtcaccaaactgacccccctgtcccacgaagtgatttcccggcaagccacaatcaatatcgggacgattggccatgtggctcacggcaagtccacagtcgtgaaagccatctctggtgttcacacagtccggttcaaaaacgagctcgagcgcaatatcaccatcaagctgggatatgcaaatgcaaagatttaccagctggatgacccaagttgccccaggccagagtgctaccggtcttgtggaagcagtatgcccgacgagttccctaccgatattcctggtactaagggaaacttcagacttgtgaggcacgtaagcttcgtcgactgtcccggccacgatatcctaatggccaccatgttgaacggggccgcggtcatggacgccgccctactgcttatcgccggaaatgaatcttgtccccaaccacagacctccgaacacctggccgccatcgaaattatgaagttgaaacatattctgattctgcagaacaaaatagacttagtgaaagagcgccaggcgaaggaacaatatgaacaaattctggccttcgtgcagggcacagtcgcagaaggagcaccaatcatcccaatatcagcccagctgaagtataatatcgaagtggtttgcgaatacatcgtgaagaaaattccagtgcctcctagagactttacttccgaacctcgactcatagtgattcggagtttcgatgtcaacaagcccggttgcgaagtggacgatctgaagggaggagtcgctggcggtagcatactcaagggagttctgaaagtggggcaggaaactgaggtcagaccaggaatcgtctccaaagattcagaaggcaaacttatgtgcaagtccatttttagcaaaattgtcagtttattcgccgaacacaatgacctccagtacgctgctccaggcgggctaatcggagtaggcacgaaaattgacccaacattatgccgggcggatcgcatggtcggacagattctgggagcagtgggcgcattacctgagatcttcactgaattagagatatcctactttctcttgcgaagactgttgggggtcaggaccgaaggggataagaaagctgccaaggtgcaaaagttaagcaagaacgaagtgctgatggtgaacattggctcgctgtctacaggaggcagggtgtccgctgttaaagctgacttgggcaagatcgtgctcacaaacccagtatgtacagaagttggggaaaaaattgccctgagtcgccgcgtggaaaagcactggcgccttatcggctggggacagattcgcaggggagtgacaataaaacccacagtggatgacgactag

SEQ ID NO: 117636 - DNA, 1419 bp, Artificial Sequence
  derived and/or modified sequence
atggcagggggtgaggccggagtgaccttaggtcaaccccatttgtcacggcaagacctaacaactttggacgtgacgaaattaaccccgttaagccacgaggtgatctctcgccaggcaacaattaatattgggacaatcggacacgttgcgcacggaaaatctaccgtggtcaaagctattagtggggtgcacaccgtgaggttcaaaaacgagctcgaaaggaatatcaccatcaagctggggtatgcaaatgcaaagatttaccagctggatgatccatcctgccctagacccgagtgctaccgctcatgtggatctagtatgcctgacgagttcccaaccgatatccctggaactaaaggtaacttcagactcgtgcggcatgtaagttttgtagactgccccggacatgacatcctgatggccacaatgctgaacggcgcagccgtgatggacgcagccctgctgcttatcgccggtaacgaatcttgcccccagccccagacatctgaacatttagcagccatcgaaattatgaaactgaaacacatattaatcctgcagaacaagatagatcttgtcaaagagcgccaggccaaagagcagtatgagcaaatattggccttcgtgcagggaaccgtggccgaaggggctccaatcatcccaatctcagcgcaactgaaatataacatcgaggttgtatgcgagtatatcgtgaaaaagatccctgttcctcctagggatttcacaagcgaacctcggctgatagtgatcagatcttttgatgtcaacaagccagggtgcgaagtcgacgacctcaagggaggagtggcaggcggatccatactgaaaggggtgctgaaggtgggtcaagagaccgaagtgagaccaggcatagtgagcaaggattctgaagggaagctcatgtgtaagagcatctttagcaaaatagtcagtctcttcgcagaacacaatgatctgcaatacgccgctccaggtggcctcatcggagtgggtactaagattgatccaactctgtgtcgcgcagaccgcatggttgggcagattctgggcgcagttggcgctctcccagagatattcaccgaactggagatctcttacttcctgttacgcagactgctgggcgtccggactgagggagataagaaggcggcaaaggtccagaagctgtccaaaaatgaggtactcatggtgaatataggtagtctatccaccggagggagagtctccgctgtgaaggccgacctgggcaagatagtccttactaatcctgtatgtaccgaagtcggggagaagattgctctaagccgtcgggtggagaaacactggcggctgatcggttggggccagattcggaggggagttacaatcaagcctactgtcgatgacgattag

SEQ ID NO: 117637 - DNA, 1602 bp, Artificial Sequence
  derived and/or modified sequence
ctcttttggcaacatggcgggcggagaagctggggtgactctggggcagccgcacctttcgcgtcaggatctcaccaccttggatgttaccaagttgacgccactttcacacgaagttatcagcagacaagccacaattaatataggtacaattggtcatgtagctcatgggaaatccacagtcgtcaaagctatttctggagttcacaccgtcaggttcaaaaatgaactagaaagaaatattacaatcaagcttggatatgctaatgctaagatttatcaacttgatgacccaagttgccctcggccagaatgttatcgatcttgtgggagcagtatgcctgatgagtttcctacagacattccaggaaccaaagggaacttcagattagtcagacatgtttcctttgttgactgtcctggccacgatattttgatggctactatgctgaacggtgcagcagtgatggatgcagctcttctgttgatagctggtaatgaatcttgccctcagcctcagacatctgaacacctggctgctatagagatcatgaaactgaagcatattttgattctacaaaataaaattgatttggtaaaagaaaggcaggctaaagaacaatacgagcagatccttgcgtttgtccaaggtacagtagcagagggagctcccattattccaatttcggctcagctgaaatacaatattgaagttgtttgtgagtacatagtaaagaaaattccagtacccccaagagactttacttcagagccccggcttattgttattagatcttttgatgtcaacaaacctggctgtgaagttgatgaccttaagggaggtgtagctggtggtagtatcctaaaaggagtattaaaggtgggccaggagacagaagtaagacctggtattgtttccaaagatagtgaaggaaaactcatgtgtaaatcaatcttttccaaaattgtttcactttttgcggagcataatgatctgcaatatgctgctccaggcggtcttattggagttggaacaaaaattgaccccactttgtgccgggctgacagaatggtggggcaaatacttggtgcagtcggagctttacctgagatattcacagaattggaaatttcctatttcctgcttagacggcttctaggtgtacgcactgaaggagacaagaaagcagcaaaggttcaaaagctgtctaagaatgaagtgctcatggtgaacataggatccctgtcgacaggagggagagttagtgctgtcaaggccgatttgggcaaaattgttttgaccaatccagtgtgcacagaggtaggagaaaaaattgcccttagccgaagagttgaaaaacactggcgtttaattggttggggtcagataagaagaggagtgacaatcaagccaacagtagatgatgactgaagaataccggttaaataatacattcggatggagctggaagttgcaatttctctttaacaaccaaggggtttattttcaaagcgatattggggaattgatttcacagtttgttaccttagtaggtaacggtaaggttattctctctttttttttttggttatgaaaactta

SEQ ID NO: 117638 - DNA, 2858 bp, Artificial Sequence
  derived and/or modified sequence
agtattgcctgcacaaatatctaccaggtctgcgacgaatagctccagcaacttcgcaccgtgttttccactcagcctaccgacaggcactgtgcagattcaagcggagagatgtccaagcagtgaggccgctgctgcaccggccatcctgagcccctactcggccttcccgtctccgcttccccgccccgcactaggacccctgcagatgatcaggcggcagccggggtgatttccttcctcttttggcaacatggcgggcggagaagctggagtgactctagggcagccgcatctttcgcgtcaggatctcaccaccttggatgttaccaagttgacgccactttcacacgaagttatcagcagacaagccacaattaacataggtacaattggtcatgtagctcatgggaaatccacagtcgtcaaagctatttctggagttcatactgtcaggttcaaaaatgaactagaaagaaatattacaatcaagcttggatatgctaatgctaagatttataagcttgatgacccaagttgccctcggccagaatgttatagatcttgtgggagcagtacacctgacgagtttcctacggacattccagggaccaaagggaacttcaaattagtcagacatgtttcctttgttgactgtcctggccacgatattttgatggctactatgctgaacggtgcagcagtgatggatgcagctcttctgttgatagctggtaatgaatcttgccctcagcctcagacatcggaacacctggctgctatagagatcatgaaactgaagcatattttgattctacaaaataaaattgatttggtaaaagaaagtcaggctaaagaacaatacgagcagatccttgcatttgtccaaggtacagtagcagagggagctcccattattccaatttcagctcagctgaaatacaatattgaagttgtttgtgagtacatagtaaagaaaattccagtacccccaagagactttacttcagagccccggcttattgttattagatcttttgatgtcaacaaacctggctgtgaagttgatgaccttaagggaggtgtagctggtggtagtatcctaaaaggagtattaaaggtgggccaggagatagaagtaagacctggtattgtttccaaagatagtgaaggaaaactcatgtgtaaaccaatcttttccaaaattgtatcactttttgcggagcataatgatctgcaatatgctgctccaggcggtcttattggagttggaacaaaaattgaccccactttgtgccgggctgacagaatggtggggcaagtacttggtgcagtcggagctttacctgagatattcacagaattggaaatttcctatttcctgcttagacggcttctaggtgtacgcactgaaggagacaagaaagcagcaaaggttcaaaagctgtctaagaatgaagtgctcatggtgaacataggatccctgtcaacaggagggagagttagtgctgtcaaggccgatttgggtaaaattgttttgaccaatccagtgtgcacagaggtaggagaaaaaattgcccttagccgaagagttgaaaaacactggcgtttaattggttggggtcagataagaagaggagtgacaatcaagccaacagtagatgatgactgaagaataccagttaaataatacattcggatggatttggaagttggaattcctcttaacaaccaaggggtttattttcaaagcaatattggggaattgatttcacagttcgttaccttagtaggtaacggtaaggttattctctttttttttttttttttttttggttatgaaaacttagggactaaaattaatataaaaattggcataatgttggattgaatctacattttggcagaagttaaacattcccacataatgtcaaaattatacatcatgcagttctgtttttttgtttgttttattttgttttgtttttgagtctggctctgtcacccaggctggagtgcagtggcgtgatctgcaacctctgccccccgggttcaagcgattctcctgcctcagcctcccgagtagctgagattacaggtgcgcgccaccacacttggctaatttttgtattattagtagagacggggtttcagcatgttggctaggccggtctctcctgacctcagggtgatcagcccacctcggcctcacaaagtgctgggattacaggcgtgagccaccttgcccagcccacatcatacagtttgaaatgaaactttgccacaaccagcctttgctgtagcacacacatatatcactgaacctgtttgaaataaagttttttttctttttcatgattcgtctttgagtacctccaggctgaaagactgttgtaccagtaaaaacttaaaggcacaaattctccttgaagaccttctcccttttatgtggccccatattttatgttgctttatctttgaaattttgcatgaaaaggaaatgaatggattcgaatgaaattgtcctttagagcatgattacttgttcccatggacaaatatttttctccccttgctcttcctggcctgaaacacgggaaaccagagtcaaaagttatctccctctccctgtgatgccttgagatttttttctgcgttgtttaatgcctgaaatccaagtcttcctccatgggaaaatactgttataccaaataattctagatgagtaacaaagatctttttaggccttcattttatgttttttcttaactgttatattatgattgtgacatagattatactactactaatttttggatgtttcaaaaggtcaagaagtaaaagatgttagaaagcaa

SEQ ID NO: 117639 - DNA, 773 bp, Artificial Sequence
  derived and/or modified sequence
ggcgggcggagaagctggagtgactctagggcagccgcatctttcgcgtcaggatctcaccaccttggatgttaccaagttgacgccactttcacacgaagttatcagcagacaagccacaattaacataggtacaattggtcatgtagctcatgggaaatccacagtcgtcaaagctatttctggagttcatactgtcaggttcaaaaatgaactagaaagaaatattacaatcaagcttggatatgctaatgctaagatttataagcttgatgacccaagttgccctcggccagaatgttatagatcttgtgggagcagtacacctgacgagtttcctacggacattccagggaccaaagggaacttcaaattagtcagacatgtttcctttgttgactgtcctggccacgatattttgatggctactatgctgaacggtgcagcagtgatggatgcagctcttctgttgataggtaaatacctcacaattggtttggacaaatcaatgtggaacaaatccaagatgaaatatttaaaggggaactaaggcctttaaggatcatatctattacctaagggtgacatgaatgggaactaacatgtcatccaggatgactttcctacctatcagctatcacaaaatactcaaaaagatagacttggggctgatagcttgcgagaattcttgtggtagcatttgagaaaaagaaaaaaagtcaatagttcatttttctcatttaaatcacatgaggtgatttatttagttttaa

SEQ ID NO: 117640 - DNA, 1419 bp, Artificial Sequence
  derived and/or modified sequence
atggccggtggtgaagccggcgtaaccctgggccaaccgcacttgtcaagacaggacttgactacattggacgtgactaaactaacgcctctgagccacgaagtgatatcaaggcaagcgactatcaacatcgggacaatcggccatgtcgcccacggaaagtctacagtggtgaaggccattagtggcgtacacacggtgaggttcaagaatgagctagagcgaaacattaccataaagttaggatatgccaacgccaaaatctataaactggatgatccaagttgccccaggcctgaatgctacaggtcatgtggaagtagtactcctgatgaattccccactgacatcccaggaacgaagggtaatttcaagttggtgagacatgtctccttcgtggactgccctgggcacgacatactgatggccaccatgttaaacggtgcagcagtgatggacgctgccctgctactgatcgcggggaacgaaagctgcccacagccacaaactagtgagcatctggccgccattgagataatgaaactgaagcacatactgattcttcagaacaaaatcgacctggtcaaggagtcccaggccaaagagcagtatgaacaaatccttgcctttgttcagggaacggttgccgagggcgctcctattattcccatttccgcccagctgaagtataatatagaggtcgtctgcgagtatatagtgaaaaagattcctgtaccgccacgagattttacctccgagccacggttgatagtcatacgatcctttgacgtcaataagcccggctgcgaagttgatgatctgaagggaggtgttgcaggcgggtccatcctgaagggagtattgaaggtgggacaggaaatcgaagtacggccgggcattgtgagcaaagattctgaaggcaaactcatgtgcaagccaatctttagcaagatcgtatccctgtttgctgagcacaacgacctccagtatgctgcccctggcggtttaatcggggtgggtaccaagattgaccccactctttgccgggctgacagaatggttggccaagtattaggtgccgtgggcgctttgcccgagatttttacagaactcgaaatctcgtacttcctactaagacgcctgctgggggtgcgtacagagggtgacaagaaagccgcaaaggttcagaaactgagtaaaaatgaagtccttatggtgaatattggcagcctgtccacgggcggccgggtgtccgccgtgaaagccgacctgggcaagatcgtcttgacgaatccggtttgcactgaggtgggggagaagattgcgttgtcccgccgggtagaaaagcattggaggctgattgggtggggtcagatcaggcgcggtgtgaccatcaagccaactgttgatgacgactag

SEQ ID NO: 117641 - DNA, 552 bp, Artificial Sequence
  derived and/or modified sequence
taagcaggtggggaggcaggagtcaccctcgggcaacctcatctgagcaggcaggatttaaccaccttggacgttaccaaattaacaccgctttctcacgaggttatttcaagacaggcgacgattaatataggcacaatagggcatgtcgcccacggaaagagtactgtggttaaggcgattagtggcgtccataccgtgcgctttaaaaatgagcttgagcgaaacataactattaagctggggtacgccaatgccaagatctacaagctagatgacccaagctgtccccggcccgagtgctacagaagctgtgggagttcaacaccagatgaatttccaaccgatatcccgggtactaaagggaattttaagctggttagacatgtgtcttttgtggactgcccaggccacgatattctaatggcaactatgcttaacggagctgctgttatggacgctgcactgctgctaataggcaaatacttgactattggcctcgacaagtcgatgtggaacaagtccaagatgaagtacctgaagggcaactag

SEQ ID NO: 117642 - DNA, 1419 bp, Artificial Sequence
  derived and/or modified sequence
atggccggcggggaggccggcgtgaccctgggccagccccacctgagccggcaggacctgaccaccctggatgtgaccaagctgacccccctgagccatgaagtcatcagccggcaggccaccatcaacatcggcaccatcggccacgtggcccacggcaagagcacagtggtgaaggccatcagcggcgtgcacacagtgcgcttcaagaatgagctggagaggaacatcaccatcaagctgggctacgccaatgccaagatctacaagctggatgaccccagctgccccaggcctgagtgctaccgcagctgtggcagcagcaccccagatgagttccccacagacatccctggcaccaagggcaacttcaagctggtgagacatgtgtcctttgtggactgccccggccatgacatcctgatggccaccatgctgaatggagctgctgtgatggatgctgccctgctgctgattgctggaaatgaaagctgcccccagccccagaccagcgagcacctggccgccatcgagatcatgaagctgaagcacatcctgatcctgcagaacaagattgacctggtgaaggagagccaggccaaggagcagtatgagcagatcctggcctttgtgcagggcaccgtggccgagggcgcccccatcatccccatcagcgcccagctgaagtacaacatcgaggtggtgtgtgagtacatcgtgaagaagatccctgtgcccccccgggacttcaccagcgagccccggctgattgtcatccgcagctttgatgtgaacaagccaggctgtgaggtggatgacctgaagggcggcgtggccggcggcagcatcctgaagggcgtgctgaaggtgggccaggagattgaggtgcggcccggcatcgtgtccaaggacagcgagggcaagctgatgtgcaagcccatcttcagcaagatcgtgtccctgtttgctgagcacaatgacctgcagtatgctgcccctgggggcctgattggagtgggcaccaagattgaccccaccctgtgcagagctgacaggatggtgggccaggtgctgggcgctgtgggcgccctgcctgagatcttcacagagctggagatctcctacttcctgctgcggcggctgctgggcgtgaggacagaaggagacaagaaggccgccaaggtgcagaagctgagcaagaatgaggtgctgatggtgaacatcggcagcctgagcactggaggccgggtgtctgctgtgaaggctgacctgggcaagatcgtgctgaccaaccctgtgtgcacagaggtgggggagaagatcgccctgagcagaagagtggagaagcactggaggctcatcggctggggccagatccggcggggcgtgaccatcaagcccaccgtggatgatgactag

SEQ ID NO: 117643 - DNA, 552 bp, Artificial Sequence
  derived and/or modified sequence
tgagctggaggagaggccggcgtgaccctgggccagccccacctgagccggcaggacctgaccaccctggatgtgaccaagctgacccccctgagccatgaagtcatcagccggcaggccaccatcaacatcggcaccatcggccacgtggcccacggcaagagcacagtggtgaaggccatcagcggcgtgcacacagtgcgcttcaagaatgagctggagaggaacatcaccatcaagctgggctacgccaatgccaagatctacaagctggatgaccccagctgccccaggcctgagtgctaccgcagctgtggcagcagcaccccagatgagttccccacagacatccctggcaccaagggcaacttcaagctggtgagacatgtgtcctttgtggactgccccggccatgacatcctgatggccaccatgctgaatggagctgctgtgatggatgctgccctgctgctgattggcaagtacctgaccatcggcctggacaagtccatgtggaacaagagcaagatgaagtacctgaagggcaactag

SEQ ID NO: 117644 - DNA, 1419 bp, Artificial Sequence
  derived and/or modified sequence
atggccggcggcgaggccggcgtgaccctgggccagccccacctgtctcggcaggatttgacaactctggacgttacgaaactaacaccattaagtcatgaggtcattagccgacaggcgacaattaacatagggactatcggccacgtggctcacggtaaaagcactgtggtcaaggccatctctggtgtccataccgtgcgattcaaaaatgagctcgagcgaaacattaccatcaaactgggctacgcaaatgccaagatctataagctggacgacccatcgtgcccgaggcccgagtgctatcggtcctgcggaagctccacccctgacgaattccctactgatatacccgggaccaagggaaattttaaactggtgaggcatgtgtcattcgtcgattgtcccggtcatgatattctgatggccacaatgctcaacggggccgcagttatggatgccgccctattgctgatcgctggcaacgaatcttgcccacaacctcagaccagcgagcatttggcagccatcgagattatgaaactgaagcatattctcatcctccagaataaaatcgacctggtcaaggaatcacaggccaaggagcaatatgaacaaatcttagcctttgtccagggcacagtagccgagggtgctcccatcatccccattagtgctcagctgaagtacaacattgaagtggtctgcgaatacattgtgaaaaaaataccagtgcccccgcgtgatttcactagtgaacctagactgattgtcattaggagttttgatgtgaataagcctggatgtgaagtggatgatttgaagggaggggtagctggagggagcattctgaagggtgtgttgaaagtgggccaagagatcgaggtgcggcctggaatcgtctcgaaggactctgagggcaagctcatgtgtaaaccgattttctcaaagatagtcagcctctttgccgagcacaatgacctgcagtacgctgcgcctggtggcctgattggcgtgggaacaaaaatcgaccccacactctgcagggctgaccgaatggtcgggcaggttctgggtgccgttggggcacttcctgagatcttcaccgaactggagattagctactttcttcttcggcggttgctgggagtccggactgagggcgacaaaaaagctgccaaggtgcaaaaactcagcaaaaacgaggtactgatggtgaacataggttctctctctaccggagggcgcgtcagcgcggtcaaggccgatctgggcaagatcgtgttgactaatcccgtttgcacagaagtgggggagaagatagccctcagtaggagagtggagaagcactggcgacttattgggtggggtcagatccggcggggcgtgactatcaagccaactgtcgatgacgactag

SEQ ID NO: 117645 - DNA, 552 bp, Artificial Sequence
  derived and/or modified sequence
tgagccggcggcgaggccggcgtgaccctgggccagccccacctgtctaggcaagacctgaccaccctagacgtgacaaagctgacccctttatcccacgaggtgatctcccgtcaggctacaatcaatattggaacaataggtcatgtggcgcacggaaaatcaaccgttgtgaaagccatcagcggtgttcacacagtccgctttaagaacgaactggagagaaacattactatcaaactgggatacgcgaacgcaaaaatttacaagctggatgatcctagttgtccacggcccgaatgttacagaagttgtggtagttcaacacctgacgagttcccaactgacatcccaggcacaaagggcaatttcaaactagtgagacacgtcagtttcgtggactgtccagggcatgatatactgatggccacaatgctcaacggtgctgctgtaatggatgcagcgcttttactaatcggaaaatatctcacaattggacttgacaagtcgatgtggaacaaatcaaagatgaagtaccttaaaggtaactag

SEQ ID NO: 117646 - DNA, 1419 bp, Artificial Sequence
  derived and/or modified sequence
atggccggtggagaagcaggcgtgacacttggccagccccacctctcacggcaggatcttactacactcgacgtgacaaaactgacgccactttcacacgaggtcatttcccggcaagccaccattaatataggaactataggtcatgtggcccacggtaagtcgacggtagtcaaagcaatttctggtgtccatacagttagatttaaaaatgaactcgagcgcaatatcacaataaagctgggctatgctaatgcgaagatctataaactcgatgatccatcttgcccgcgtcccgaatgctatcgatcttgtggctcttccacacctgatgaattcccgaccgatatccccggtaccaagggcaactttaagctcgtgaggcacgtgtccttcgttgattgccccggtcacgacatcttgatggctaccatgctcaacggcgctgcagtgatggacgctgcactgctgttaattgctgggaatgagtcatgtccccagccgcaaacctcggagcatctcgccgcaatcgaaatcatgaagttgaagcatatcctgatcttacaaaacaagattgatctcgttaaggaatctcaggcaaaggagcaatatgagcagattcttgccttcgtgcagggtacagttgcagaaggcgcaccgataatcccaattagcgctcaattaaagtataacatcgaagtggtttgtgagtatatcgtgaaaaagattcctgtgccgcctcgagatttcacatccgagcctcggctgattgtgatccgcagcttcgacgtcaacaaaccgggatgcgaagttgacgatctaaagggaggagtagccggtggttctatcctgaaaggggtgctgaaggttggccaggaaatcgaggtgcggccaggaattgtaagtaaagactcagaaggcaaacttatgtgcaaaccgatcttctccaaaatcgtgtctctttttgctgagcataacgacttacagtacgcagctcctgggggactgatcggggtgggtacaaaaatcgaccccaccctgtgccgggcagatcggatggtgggccaggtgttgggcgctgttggcgcattacctgagatctttacagaactggaaattagttatttccttctgcgacgcctgctcggagttagaactgagggcgataagaaggcggctaaggtgcagaaactaagcaaaaatgaagtgctgatggtgaatattggctccttgtctacgggaggccgtgtgtcggccgttaaggcggacctcggcaaaatcgtgctcaccaatcccgtgtgtaccgaggtgggggagaaaatcgccctaagtagaagggtggagaaacattggaggttgatcggatgggggcagatccgaaggggcgttaccattaagcctaccgtggatgacgactag

SEQ ID NO: 117647 - DNA, 552 bp, Artificial Sequence
  derived and/or modified sequence
taagctggaggcgaggcaggtgtgacgcttggccaaccacacctctctaggcaggacctgactacactggatgtaaccaaactgactcctctgtcccatgaggtcatttcccggcaggctacaatcaatattggcaccataggccatgtcgctcacggcaagagtactgtcgtgaaggcaatatccggggtgcacaccgtgaggttcaaaaacgaattagagcgcaatatcacgatcaaactggggtacgcaaacgccaagatctacaaactggacgatccatcctgtccaaggcccgagtgctatcggagctgtggctccagcaccccagacgaatttcccaccgatattccagggacgaagggcaactttaagctggtgcgacacgtgtcatttgtggattgcccaggacacgatattctgatggccaccatgttaaacggggcagcagttatggacgccgcactgctgctgatcggcaaatacctcactatcggtctggacaaatccatgtggaacaagagcaagatgaaatatctaaaaggaaattag

SEQ ID NO: 117648 - DNA, 1419 bp, Artificial Sequence
  derived and/or modified sequence
atggccggcggcgaggccggcgtgaccctgggccagccccacctgagcagacaggacctgaccaccctggacgtgaccaagctgacccccctgagccacgaggtgatcagcagacaggccaccatcaacatcggcaccatcggccacgtggcccacggcaagagcaccgtggtgaaggccatcagcggcgtgcacaccgtgagattcaagaacgagctggagagaaacatcaccatcaagctgggctacgccaacgccaagatctacaagctggacgaccccagctgccccagacccgagtgctacagaagctgcggcagcagcacccccgacgagttccccaccgacatccccggcaccaagggcaacttcaagctggtgagacacgtgagcttcgtggactgccccggccacgacatcctgatggccaccatgctgaacggcgccgccgtgatggacgccgccctgctgctgatcgccggcaacgagagctgcccccagccccagaccagcgagcacctggccgccatcgagatcatgaagctgaagcacatcctgatcctgcagaacaagatcgacctggtgaaggagagccaggccaaggagcagtacgagcagatcctggccttcgtgcagggcaccgtggccgagggcgcccccatcatccccatcagcgcccagctgaagtacaacatcgaggtggtgtgcgagtacatcgtgaagaagatccccgtgccccccagagacttcaccagcgagcccagactgatcgtgatcagaagcttcgacgtgaacaagcccggctgcgaggtggacgacctgaagggcggcgtggccggcggcagcatcctgaagggcgtgctgaaggtgggccaggagatcgaggtgagacccggcatcgtgagcaaggacagcgagggcaagctgatgtgcaagcccatcttcagcaagatcgtgagcctgttcgccgagcacaacgacctgcagtacgccgcccccggcggcctgatcggcgtgggcaccaagatcgaccccaccctgtgcagagccgacagaatggtgggccaggtgctgggcgccgtgggcgccctgcccgagatcttcaccgagctggagatcagctacttcctgctgagaagactgctgggcgtgagaaccgagggcgacaagaaggccgccaaggtgcagaagctgagcaagaacgaggtgctgatggtgaacatcggcagcctgagcaccggcggcagagtgagcgccgtgaaggccgacctgggcaagatcgtgctgaccaaccccgtgtgcaccgaggtgggcgagaagatcgccctgagcagaagagtggagaagcactggagactgatcggctggggccagatcagaagaggcgtgaccatcaagcccaccgtggacgacgactag

SEQ ID NO: 117649 - DNA, 552 bp, Artificial Sequence
  derived and/or modified sequence
tgagccggcggcgaggccggcgtgaccctgggccagccccacctgagcagacaggacctgaccaccctggacgtgaccaagctgacccccctgagccacgaggtgatcagcagacaggccaccatcaacatcggcaccatcggccacgtggcccacggcaagagcaccgtggtgaaggccatcagcggcgtgcacaccgtgagattcaagaacgagctggagagaaacatcaccatcaagctgggctacgccaacgccaagatctacaagctggacgaccccagctgccccagacccgagtgctacagaagctgcggcagcagcacccccgacgagttccccaccgacatccccggcaccaagggcaacttcaagctggtgagacacgtgagcttcgtggactgccccggccacgacatcctgatggccaccatgctgaacggcgccgccgtgatggacgccgccctgctgctgatcggcaagtacctgaccatcggcctggacaagagcatgtggaacaagagcaagatgaagtacctgaagggcaactag

SEQ ID NO: 117650 - protein, 406 aa, Artificial Sequence
  derived and/or modified sequence
MSASQDSRSRDNGPDGMEPEGVIESNWNEIVDSFDDMNLSESLLRGIYAYGFEKPSAIQQRAILPCIKGYDVIAQAQSGTGKTATFAISILQQIELDLKATQALVLAPTRELAQQIQKVVMALGDYMGASCHACIGGTNVRAEVQKLQMEAPHIIVGTPGRVFDMLNRRYLSPKYIKMFVLDEADEMLSRGFKDQIYDIFQKLNSNTQVVLLSATMPSDVLEVTKKFMRDPIRILVKKEELTLEGIRQFYINVEREEWKLDTLCDLYETLTITQAVIFINTRRKVDWLTEKMHARDFTVSAMHGDMDQKERDVIMREFRSGSSRVLITTDLLARGIDVQQVSLVINYDLPTNRENYIHRIGRGGRFGRKGVAINMVTEEDKRTLRDIETFYNTSIEEMPLNVADLI

SEQ ID NO: 117651 - protein, 146 aa, Artificial Sequence
  derived and/or modified sequence
MEPEGVIESNWNEIVDSFDDMNLSESLLRGIYAYGFEKPSAIQQRAILPCIKGYDVIAQAQSGTGKTATFAISILQQIELDLKATQALVLAPTRELAQQVRVASIPSFRADLGMMSIIQGPEKSSLITTLGGRHGCPNTLETCWVN

SEQ ID NO: 117652 - protein, 200 aa, Artificial Sequence
  derived and/or modified sequence
MFVLDEADEMLSRGFKDQIYDIFQKLNSNTQVVLLSATMPSDVLEVTKKFMRDPIRILVKKEELTLEGIRQFYINVEREEWKLDTLCDLYETLTITQAVIFINTRRKVDWLTEKMHARDFTVSAMVCLPAASLLWVCPSEVSYLKPGFLEPRCLPGLLHICFLFQHGDMDQKERDVIMREFRSGSSRVLITTDLLVSRGN

SEQ ID NO: 117653 - DNA, 1877 bp, Artificial Sequence
  derived and/or modified sequence
ggaactaacgtcatgccgagttgctgagcgccggcaggcggggccggggcggccaaaccaatgcgatggccggggcggagtcgggcgctctataagttgtcgataggcgggcactccgccctagtttctaaggatcatgtctgcgagccaggattcccgatccagagacaatggccccgatgggatggagcccgaaggcgtcatcgagagtaactggaatgagattgttgacagctttgatgacatgaacctctcggagtcccttctccgtggcatctacgcgtatggttttgagaagccctctgccatccagcagcgagccattctaccttgtatcaagggttatgatgtgattgctcaagcccaatctgggactgggaaaacggccacatttgccatatcgattctgcagcagattgaattagatctaaaagccacccaggccttggtcctagcacccactcgagaattggctcagcagatacagaaggtggtcatggcactaggagactacatgggcgcctcctgtcacgcctgtatcgggggcaccaacgtgcgtgctgaggtgcagaaactgcagatggaagctccccacatcatcgtgggtacccctggccgtgtgtttgatatgcttaaccggagatacctgtcccccaaatacatcaagatgtttgtactggatgaagctgacgaaatgttaagccgtggattcaaggaccagatctatgacatattccaaaagctcaacagcaacacccaggtagttttgctgtcagccacaatgccttctgatgtgcttgaggtgaccaagaagttcatgagggaccccattcggattcttgtcaagaaggaagagttgaccctggagggtatccgccagttctacatcaacgtggaacgagaggagtggaagctggacacactatgtgacttgtatgaaaccctgaccatcacccaggcagtcatcttcatcaacacccggaggaaggtggactggctcaccgagaagatgcatgctcgagatttcactgtatccgccatgcatggagatatggaccaaaaggaacgagacgtgattatgagggagtttcgttctggctctagcagagttttgattaccactgacctgctggccagaggcattgatgtgcagcaggtttctttagtcatcaactatgaccttcccaccaacagggaaaactatatccacagaatcggtcgaggtggacggtttggccgtaaaggtgtggctattaacatggtgacagaagaagacaagaggactcttcgagacattgagaccttctacaacacctccattgaggaaatgcccctcaatgttgctgacctcatctgaggggctgtcctgccacccagccccagccagggctcaatctctgggggctgaggagcagcaggaggggggagggaagggagccaagggatggacatcttgtcattttttttctttgaataaatgtcactttttgaggcaaaagaaggaaccgtgaacattttagacacccttttctttggggtaggctcttgccccaggcgccggctcttctcccaaaaaaaaaaaaaaaacactaatccatttccctaacctagtaacctccagatcccagaggctctcctcacctcagctgagctcctttgaaagtgattcaagggactatgtcactcagcctcatttgctggaccaaatctggagggagaacccctaaaacccctaagtgaggttgcccagggggttgtccccaggtggggggaagcaggggagagaaaatggtagccatttttacattgttttgtatagtatttattgattcaggaaacaaacacaaaattctgaataaaatgacttggaaactgcc

SEQ ID NO: 117654 - DNA, 1221 bp, Artificial Sequence
  derived and/or modified sequence
atgtctgctagccaagattcgcggtcaagggataacggccctgatggcatggagccagaaggagtaatcgagtcaaactggaacgagatcgttgactcctttgatgacatgaatctgtctgagtcactgctgcgcggaatttatgcctatggttttgagaaacctagcgctatccagcagcgagccatcttaccttgtatcaaaggctacgacgtgattgcccaggctcaatccggcacagggaagacagcaacatttgcaatctccatcttgcagcaaatagagctcgacctaaaggcaacccaggctctggtgctcgccccaacacgagaattagcacagcagattcagaaggtcgtgatggccctgggcgactacatgggagcgtcctgtcatgcatgtattggggggaccaatgtgcgtgctgaagtgcagaagttacaaatggaagcaccccatataatcgtgggtacacctggaagagtgttcgacatgctcaatcggagatatctttcacccaaatatataaagatgttcgtgcttgacgaagctgatgagatgctgtcccgcggttttaaggatcagatctatgatatatttcaaaagcttaatagcaatacacaggtggtgctcctcagcgcaaccatgccgtccgacgtgcttgaggtgaccaaaaaattcatgcgagatccaattcggatcctggtgaagaaggaagagctcacactggaaggcatcaggcagttctacatcaatgtggagcgcgaggaatggaagttggataccctttgtgatctgtacgagacattaaccataacccaggcagtgatcttcatcaacacaagacggaaggtggattggctcacagagaagatgcatgcccgggactttacggtatccgctatgcacggggacatggaccagaaggaaagagatgttattatgagagagtttaggtctggatcctccagggtgctgattaccacagaccttcttgcccgggggattgacgttcagcaggtttcattggttataaactatgacctgcccactaaccgggaaaactacatccacagaatcggccgcggaggccgtttcggcagaaagggagtggccatcaacatggtgacagaagaggacaaacgcacattgagagatattgaaacattttataacactagtatcgaagaaatgcctctgaacgtcgcagatttgatctag

SEQ ID NO: 117655 - DNA, 1221 bp, Artificial Sequence
  derived and/or modified sequence
atgtctgccagccaggacagccgcagccgggacaatggaccagatggcatggagcctgagggcgtgattgagagcaactggaatgagatcgtggacagctttgatgacatgaacctgtctgagagcctgctgcggggcatctatgcctacggctttgagaagcccagcgccatccagcagagggccatcctgccctgcatcaagggctatgatgtgattgcccaggcccagagcggcaccgggaagacagccacctttgccatcagcatcctgcagcagatcgagctggacctgaaggccacccaggccctggtgctggcccccacccgggagctggcccagcagatccagaaggtggtgatggccctgggggactacatgggcgccagctgccacgcctgcattggaggcaccaacgtgcgggcagaggtgcagaagctgcagatggaggccccccacatcatcgtgggcaccccaggccgggtgtttgacatgctgaacagacgctacctgagccccaagtacatcaagatgtttgtgctggatgaagcagatgagatgctgagccggggcttcaaggaccagatctatgacatcttccagaagctgaacagcaacacccaggtggtgctgctgagcgccaccatgcccagtgatgtgctggaggtgaccaagaagttcatgagggaccccatccgcatcctggtgaagaaggaggagctgaccctggagggcatccggcagttctacatcaacgtggagcgggaggagtggaagctggacaccctgtgtgacctgtatgagaccctgaccatcacccaggccgtcatcttcatcaacaccaggaggaaggtggactggctgacagagaagatgcacgcccgggacttcaccgtgtctgccatgcatggagacatggaccagaaggagagagatgtgatcatgagggagttccgcagcggcagcagccgggtgctgatcaccacagacctgctggcccggggcattgatgtgcagcaggtgtccctggtgatcaactatgacctgcccaccaaccgggagaactacatccaccgcatcggccggggcggccgcttcggcaggaaaggagtggccatcaacatggtgacagaggaggacaagaggaccctgcgggacatcgagaccttctacaacaccagcattgaggagatgcccctgaatgtggccgacctgatctag

SEQ ID NO: 117656 - DNA, 1221 bp, Artificial Sequence
  derived and/or modified sequence
atgagcgccagccaggacagccggagccgggacaacggccccgacggtatggaacctgaaggcgtgatcgagagtaactggaatgagattgtggacagctttgacgacatgaaccttagcgagtctctgttgagaggaatttacgcctatggcttcgaaaaaccgtcagctattcagcagcgcgctatacttccctgtattaaagggtatgatgtgatcgcacaagctcaaagtggtacaggtaaaaccgctacttttgccatctctattctgcagcagattgaattggacttaaaagccacccaggccttagtcctagctcctacccgagagcttgctcagcagatccaaaaggtagtcatggcgctcggagactatatgggcgcaagttgtcatgcctgtattggcggcaccaatgttcgggcagaggtgcagaaattgcaaatggaagccccccacatcatcgtgggaactcctggacgcgtttttgacatgctcaatagaaggtatctctcccccaaatacatcaaaatgtttgtcctcgacgaagccgatgaaatgttgagccgcggattcaaggatcagatctatgatatatttcaaaaactgaattcaaacacgcaggtggtgctgttaagcgccaccatgcccagtgacgtcttagaggtgacaaagaaatttatgcgggaccctatcagaattctggtaaagaaagaggagttgaccctggaggggattcggcagttttatataaacgtggagagggaagaatggaagctggatacgctgtgcgatctatatgagacactgacgatcacccaagcagttatctttatcaacaccagacgcaaagtcgactggcttacggagaagatgcatgcccgagactttaccgtatctgccatgcatggtgacatggaccagaaggaacgggacgtaattatgcgcgagtttaggagtggaagtagtcgagtgctaatcacaactgacctcctagccagaggcatcgacgtacagcaggtgtccctcgtcatcaattacgatttgccaacaaaccgggagaactatatccacaggatcgggaggggcggtcgcttcggtagaaaaggggtcgcgatcaatatggttacggaggaagataaaagaaccctgagggacattgaaacgttctacaacacttccatagaagagatgccattgaatgtcgccgatctaatttag

SEQ ID NO: 117657 - DNA, 1221 bp, Artificial Sequence
  derived and/or modified sequence
atgtctgctagccaagactcgaggagtcgagataacggccctgacgggatggaacccgagggcgttatcgagagcaattggaatgagatcgtggacagcttcgacgacatgaacctgtccgagagtctcttgaggggaatatatgcctacggcttcgagaagccttctgctatccagcaaagagcaattctgccctgcatcaagggatacgacgtcatagctcaagctcagagcgggaccggcaagacagccacttttgctatcagtattctgcagcagattgagcttgatttgaaggcgacgcaggccctggtgctggcaccaacgagagagctcgcccagcagatccagaaggtagtaatggctctgggggactacatgggtgccagctgtcatgcttgtatcggagggaccaatgttagggccgaggtacaaaaactacaaatggaagcaccccacatcatcgtgggaacgcccggacgagtcttcgacatgctgaaccgccgatatctgagtccaaagtacattaaaatgttcgtgctggatgaggcagacgagatgctatccagaggatttaaggaccagatttatgatatttttcagaagctaaattctaatacccaggtggttttgctgtcagccacaatgccaagcgatgtgctggaggtgacaaagaagtttatgagggacccaattcggattctagtcaagaaggaagaactaacactcgagggaatcagacagttttacatcaacgttgagcgagaggaatggaagctggataccttgtgcgatttgtatgagactctgactattacgcaggccgttatattcataaacacccgcagaaaagttgactggctcacggagaagatgcacgctcgggattttaccgtgagcgctatgcatggagatatggaccagaaggagcgggatgttatcatgagggaattcaggagtggtagttcacgggtgttaattaccaccgatcttctcgccagggggattgacgttcagcaggtcagcttggtcatcaactatgatctgccaactaaccgagagaactacatacatcggattgggagggggggacggtttggcagaaaaggcgttgctatcaacatggtaaccgaagaggataaacgaaccctgagagacatcgagactttttacaacacaagcattgaagaaatgcctctaaatgtggccgatctgatatag

SEQ ID NO: 117658 - DNA, 1221 bp, Artificial Sequence
  derived and/or modified sequence
atgagcgccagccaggacagcagaagcagagacaacggccccgacggcatggagcccgagggcgtgatcgagagcaactggaacgagatcgtggacagcttcgacgacatgaacctgagcgagagcctgctgagaggcatctacgcctacggcttcgagaagcccagcgccatccagcagagagccatcctgccctgcatcaagggctacgacgtgatcgcccaggcccagagcggcaccggcaagaccgccaccttcgccatcagcatcctgcagcagatcgagctggacctgaaggccacccaggccctggtgctggcccccaccagagagctggcccagcagatccagaaggtggtgatggccctgggcgactacatgggcgccagctgccacgcctgcatcggcggcaccaacgtgagagccgaggtgcagaagctgcagatggaggccccccacatcatcgtgggcacccccggcagagtgttcgacatgctgaacagaagatacctgagccccaagtacatcaagatgttcgtgctggacgaggccgacgagatgctgagcagaggcttcaaggaccagatctacgacatcttccagaagctgaacagcaacacccaggtggtgctgctgagcgccaccatgcccagcgacgtgctggaggtgaccaagaagttcatgagagaccccatcagaatcctggtgaagaaggaggagctgaccctggagggcatcagacagttctacatcaacgtggagagagaggagtggaagctggacaccctgtgcgacctgtacgagaccctgaccatcacccaggccgtgatcttcatcaacaccagaagaaaggtggactggctgaccgagaagatgcacgccagagacttcaccgtgagcgccatgcacggcgacatggaccagaaggagagagacgtgatcatgagagagttcagaagcggcagcagcagagtgctgatcaccaccgacctgctggccagaggcatcgacgtgcagcaggtgagcctggtgatcaactacgacctgcccaccaacagagagaactacatccacagaatcggcagaggcggcagattcggcagaaagggcgtggccatcaacatggtgaccgaggaggacaagagaaccctgagagacatcgagaccttctacaacaccagcatcgaggagatgcccctgaacgtggccgacctgatctag

SEQ ID NO: 117659 - protein, 611 aa, Artificial Sequence
  derived and/or modified sequence
MAASAKKKNKKGKTISLTDFLAEDGGTGGGSTYVSKPVSWADETDDLEGDVSTTWHSNDDDVYRAPPIDRSILPTAPRAAREPNIDRSRLPKSPPYTAFLGNLPYDVTEESIKEFFRGLNISAVRLPREPSNPERLKGFGYAEFEDLDSLLSALSLNEESLGNRRIRVDVADQAQDKDRDDRSFGRDRNRDSDKTDTDWRARPATDSFDDYPPRRGDDSFGDKYRDRYDSDRYRDGYRDGYRDGPRRDMDRYGGRDRYDDRGSRDYDRGYDSRIGSGRRAFGSGYRRDDDYRGGGDRYEDRYDRRDDRSWSSRDDYSRDDYRRDDRGPPQRPKLNLKPRSTPKEDDSSASTSQSTRAASIFGGAKPVDTAAREREVEERLQKEQEKLQRQLDEPKLERRPRERHPSWRSEETQERERSRTGSESSQTGTSTTSSRNARRRESEKSLENETLNKEEDCHSPTSKPPKPDQPLKVMPAPPPKENAWVKRSSNPPARSQSSDTEQQSPTSGGGKVAPAQPSEEGPGRKDENKVDGMNAPKGQTGNSSRGPGDGGNRDHWKESDRKDGKKDQDSRSAPEPKKPEENPASKFSSASKYAALSVDGEDENEGEDYAE

SEQ ID NO: 117660 - protein, 587 aa, Artificial Sequence
  derived and/or modified sequence
MAASAKKKNKKGKTISLTDFLAEDGGTGGGSTYVSKPVSWADETDDLEGDVSTTWHSNDDDVYRAPPIDRSILPTAPRAAREPNIDRSRLPKSPPYTAFLGNLPYDVTEESIKEFFRGLNISAVRLPREPSNPERLKGFGYAEFEDLDSLLSALSLNEESLGNRRIRVDVADQAQDKDRDDRSFGRDRNRDSDKTDTDWRARPATDSFDDYPPRRGDDSFGDKYRDRYGGRDRYDDRGSRDYDRGYDSRIGSGRRAFGSGYRRDDDYRGGGDRYEDRYDRRDDRSWSSRDDYSRDDYRRDDRGPPQRPKLNLKPRSTPKEDDSSASTSQSTRAASIFGGAKPVDTAAREREVEERLQKEQEKLQRQLDEPKLERRPRERHPSWRSEETQERERSRTGSESSQTGTSTTSSRNARRRESEKSLENETLNKEEDCHSPTSKPPKPDQPLKVMPAPPPKENAWVKRSSNPPARSQSSDTEQQSPTSGGGKVAPAQPSEEGPGRKDENKVDGMNAPKGQTGNSSRGPGDGGNRDHWKESDRKDGKKDQDSRSAPEPKKPEENPASKFSSASKYAALSVDGEDENEGEDYAE

SEQ ID NO: 117661 - DNA, 1836 bp, Artificial Sequence
  derived and/or modified sequence
atggccgccagcgccaagaagaagaacaagaagggcaagaccatcagcctgaccgacttcctggccgaggacggcggcaccggcggcggcagcacctacgtgagcaagcccgtgagctgggccgacgagaccgacgacctggagggcgacgtgagcaccacctggcacagcaacgacgacgacgtgtacagagccccccccatcgacagaagcatcctgcccaccgcccccagagccgccagagagcccaacatcgacagaagcagactgcccaagagccccccctacaccgccttcctgggcaacctgccctacgacgtgaccgaggagagcatcaaggagttcttcagaggcctgaacatcagcgccgtgagactgcccagagagcccagcaaccccgagagactgaagggcttcggctacgccgagttcgaggacctggacagcctgctgagcgccctgagcctgaacgaggagagcctgggcaacagaagaatcagagtggacgtggccgaccaggcccaggacaaggacagagacgacagaagcttcggcagagacagaaacagagacagcgacaagaccgacaccgactggagagccagacccgccaccgacagcttcgacgactacccccccagaagaggcgacgacagcttcggcgacaagtacagagacagatacgacagcgacagatacagagacggctacagagacggctacagagacggccccagaagagacatggacagatacggcggcagagacagatacgacgacagaggcagcagagactacgacagaggctacgacagcagaatcggcagcggcagaagagccttcggcagcggctacagaagagacgacgactacagaggcggcggcgacagatacgaggacagatacgacagaagagacgacagaagctggagcagcagagacgactacagcagagacgactacagaagagacgacagaggccccccccagagacccaagctgaacctgaagcccagaagcacccccaaggaggacgacagcagcgccagcaccagccagagcaccagagccgccagcatcttcggcggcgccaagcccgtggacaccgccgccagagagagagaggtggaggagagactgcagaaggagcaggagaagctgcagagacagctggacgagcccaagctggagagaagacccagagagagacaccccagctggagaagcgaggagacccaggagagagagagaagcagaaccggcagcgagagcagccagaccggcaccagcaccaccagcagcagaaacgccagaagaagagagagcgagaagagcctggagaacgagaccctgaacaaggaggaggactgccacagccccaccagcaagccccccaagcccgaccagcccctgaaggtgatgcccgcccccccccccaaggagaacgcctgggtgaagagaagcagcaacccccccgccagaagccagagcagcgacaccgagcagcagagccccaccagcggcggcggcaaggtggcccccgcccagcccagcgaggagggccccggcagaaaggacgagaacaaggtggacggcatgaacgcccccaagggccagaccggcaacagcagcagaggccccggcgacggcggcaacagagaccactggaaggagagcgacagaaaggacggcaagaaggaccaggacagcagaagcgcccccgagcccaagaagcccgaggagaaccccgccagcaagttcagcagcgccagcaagtacgccgccctgagcgtggacggcgaggacgagaacgagggcgaggactacgccgagtag

SEQ ID NO: 117662 - DNA, 1764 bp, Artificial Sequence
  derived and/or modified sequence
atggccgccagcgccaagaagaagaacaagaagggcaagaccatcagcctgaccgacttcctggccgaggacggcggcaccggcggcggcagcacctacgtgagcaagcccgtgagctgggccgacgagaccgacgacctggagggcgacgtgagcaccacctggcacagcaacgacgacgacgtgtacagagccccccccatcgacagaagcatcctgcccaccgcccccagagccgccagagagcccaacatcgacagaagcagactgcccaagagccccccctacaccgccttcctgggcaacctgccctacgacgtgaccgaggagagcatcaaggagttcttcagaggcctgaacatcagcgccgtgagactgcccagagagcccagcaaccccgagagactgaagggcttcggctacgccgagttcgaggacctggacagcctgctgagcgccctgagcctgaacgaggagagcctgggcaacagaagaatcagagtggacgtggccgaccaggcccaggacaaggacagagacgacagaagcttcggcagagacagaaacagagacagcgacaagaccgacaccgactggagagccagacccgccaccgacagcttcgacgactacccccccagaagaggcgacgacagcttcggcgacaagtacagagacagatacggcggcagagacagatacgacgacagaggcagcagagactacgacagaggctacgacagcagaatcggcagcggcagaagagccttcggcagcggctacagaagagacgacgactacagaggcggcggcgacagatacgaggacagatacgacagaagagacgacagaagctggagcagcagagacgactacagcagagacgactacagaagagacgacagaggccccccccagagacccaagctgaacctgaagcccagaagcacccccaaggaggacgacagcagcgccagcaccagccagagcaccagagccgccagcatcttcggcggcgccaagcccgtggacaccgccgccagagagagagaggtggaggagagactgcagaaggagcaggagaagctgcagagacagctggacgagcccaagctggagagaagacccagagagagacaccccagctggagaagcgaggagacccaggagagagagagaagcagaaccggcagcgagagcagccagaccggcaccagcaccaccagcagcagaaacgccagaagaagagagagcgagaagagcctggagaacgagaccctgaacaaggaggaggactgccacagccccaccagcaagccccccaagcccgaccagcccctgaaggtgatgcccgcccccccccccaaggagaacgcctgggtgaagagaagcagcaacccccccgccagaagccagagcagcgacaccgagcagcagagccccaccagcggcggcggcaaggtggcccccgcccagcccagcgaggagggccccggcagaaaggacgagaacaaggtggacggcatgaacgcccccaagggccagaccggcaacagcagcagaggccccggcgacggcggcaacagagaccactggaaggagagcgacagaaaggacggcaagaaggaccaggacagcagaagcgcccccgagcccaagaagcccgaggagaaccccgccagcaagttcagcagcgccagcaagtacgccgccctgagcgtggacggcgaggacgagaacgagggcgaggactacgccgagtag

SEQ ID NO: 117663 - DNA, 1836 bp, Artificial Sequence
  derived and/or modified sequence
atggccgcctctgccaagaagaaaaataagaaagggaagacaattagtctgaccgatttccttgctgaggatggcggcacagggggaggctccacctatgtatccaagcccgtgagctgggctgacgagacagacgacctcgagggagacgtgtccactacttggcattccaacgacgacgacgtataccgagcaccccctatcgacagatccatcctgcccactgcgccaagagctgccagagaaccaaacattgacaggtccagacttccaaagagccccccctacacagcattccttggcaatcttccctacgatgtgacagaggagagtattaaggaattcttcaggggactgaatattagcgccgtccggctgcctagggagccctctaaccccgagcgactgaagggatttggatacgcagagtttgaagacctggattcactgttgagcgccttatcattgaatgaggagagccttgggaaccgacgtatacgggtggatgttgcggatcaggcccaagacaaagatagagacgataggtcctttgggcgcgacagaaatagggatagcgacaagaccgacactgattggcgcgctcgaccagctacagatagttttgatgattaccctccccgtaggggcgatgactcatttggagacaaatacagagaccggtacgattcagacaggtacagagatgggtaccgagacggttatcgtgatggacccagaagagatatggaccgatatggcgggcgtgatcggtatgacgataggggttccagggactatgatagagggtatgactccagaatcggttctgggcgccgggccttcggaagcgggtaccggagggacgacgattacagaggcggaggcgaccgatatgaggacagatatgacaggagggatgatcgctcgtggagtagcagggatgactattccagggacgattaccggcgagatgatcggggcccaccccaaagacctaaactgaacttgaagccccgctctacccccaaagaggacgactccagcgcaagtacctctcagtccacacgagccgcttctatttttggtggtgccaaaccggtagataccgcggcacgagaaagagaagtggaagaaaggctccagaaggaacaggagaagctgcagagacaacttgatgaacctaaattggagaggcgtcctagagaacgtcacccatcctggaggtctgaagagacccaggagcgcgaaaggtccagaaccggcagtgagagtagccagaccggaactagtacaacatcttccagaaatgcccggagacgggaatctgaaaaatccctcgaaaacgaaacgctgaataaggaggaggattgtcactctcctacaagcaagccaccaaaacccgatcaacccttaaaagtcatgcccgcaccgccaccgaaagagaacgcttgggtcaagcggtcgtccaaccctcctgcgcgttcccagagctctgacactgaacaacagtcgcccacctctggcggcgggaaggttgcgcctgcacagccgtcagaggagggtcctggacgcaaagacgaaaacaaagttgacggtatgaacgcgccaaaagggcagactggcaactcatctcgcggtccaggcgatggaggaaatcgggatcactggaaggaatccgataggaaagacgggaagaaagatcaggatagtcgttcagcacctgagcctaagaagccggaggagaacccagcaagcaaatttagcagtgccagcaaatatgcagcactgtctgtggatggagaagatgagaacgagggggaggattatgccgagtag

SEQ ID NO: 117664 - DNA, 1764 bp, Artificial Sequence
  derived and/or modified sequence
atggcagcctctgctaaaaaaaagaacaagaagggcaagacaatctcactgacagatttcctggccgaggatgggggaaccgggggcgggagtacttacgtgagcaaaccggtgtcgtgggctgatgaaacagacgacctcgagggggacgtctctacgacttggcactctaatgacgacgatgtgtaccgagcacctcccattgatcgcagtatcctgccgactgctcccagagctgcaagagagccgaacattgaccgctcccgtctgcctaaatctccaccatatacagcatttcttgggaacttaccttatgacgtgacagaggagagcattaaggaattctttcggggactgaacatcagtgcagttcggctcccgcgcgaaccatcgaacccagagcgcctcaagggctttggatatgccgaatttgaggatcttgacagtctcctctcagcactgtcacttaacgaagagtctctcggcaatagaaggatccgggtggatgtcgccgaccaggcccaggataaggatcgggatgacaggtcattcggcagagacagaaatagagatagcgataagacggatacagattggcgcgcccgtccagccacagactcttttgacgactacccccctcgcaggggggatgattcattcggggataagtatcgggatcgatacggtggacgggaccgctatgatgatcgcgggagtcgagactacgaccgcgggtacgacagcagaatcggctcaggccgacgtgctttcggctccggctatcgaagagatgacgactataggggaggcggcgatcgttatgaggacaggtatgacagaagagatgatcgaagctggtcgtcacgtgacgactacagcagggatgattatcggcgcgacgacagagggcctccccagagaccgaaacttaatctcaagccgaggagcacccccaaagaggatgattcttctgcgagcacgtcgcaatccacacgcgcagcatctattttcggaggcgccaaacccgtggatactgctgcaagagagagggaggtggaagaacgcctgcagaaagagcaggagaagttgcagcggcagctggatgaacctaagttagaacggcgtcccagagagaggcatccaagttggaggagcgaggagacccaggagagggagcgatcaagaaccggatccgaaagcagccaaacaggtacatctactacttcgtcgcgaaacgctcgaagaagggagagcgaaaagtcattggagaatgagacactcaataaggaggaggactgccacagcccaacctccaaaccccccaaacctgaccagcctctgaaagtgatgcccgccccaccccccaaagagaatgcctgggtcaagcgaagttcgaacccccctgcaagatctcagtcgtccgacaccgaacagcaatctccaacctctggcggggggaaggtggcacctgcccaaccgagtgaggaggggcccggacgcaaggacgaaaacaaggttgatgggatgaatgctcccaaaggacagactggaaatagttctcgtgggccaggagacggcggaaaccgcgatcactggaaggagagtgacagaaaggacggtaaaaaggatcaggatagtaggtctgcacccgaacccaaaaaacccgaagaaaatccggcttctaagtttagtagcgcatctaaatacgccgccctcagtgtggacggagaggatgagaatgaaggggaggactatgccgaatag

SEQ ID NO: 117665 - DNA, 4148 bp, Artificial Sequence
  derived and/or modified sequence
tcttccggcaggaagtctgtgcgtcaggaggccggccaggactcagctccagccccgcgctcgcgtgtagccctacgtaaagcgtgaggggtttcgcgacaacccaggccccgcccctttggccacatgtcgcgcatgtcttcccgtcggacggcgtgccacctcgccgcgcagctttacgaacctagagcagcgccgccccgcctcctgtctccgtcctcacctccccgccccctcccagcttcgcgtctcctagctcgacgcgcccgctataatcacgtgattgcctcatccgggtcttttgcgttctctttccctctcccaacatggcggcctcagcaaaaaagaagaataagaaggggaagactatctccctaacagactttctggctgaggatgggggtactggtggaggaagcacctatgtttccaaaccagtcagctgggctgatgaaacggatgacctggaaggagatgtttcgaccacttggcacagtaacgatgacgatgtgtatagggcgcctccaattgaccgttccatccttcccactgctccacgggctgctcgggaacccaatatcgaccggagccgtcttcccaaatcgccaccctacactgcttttctaggaaacctaccctatgatgttacagaagagtcaattaaggaattctttcgaggattaaatatcagtgcagtgcgtttaccacgtgaacccagcaatccagagaggttgaaaggttttggttatgctgaatttgaggacctggattccctgctcagtgccctgagtctcaatgaagagtctctaggtaacaggagaattcgagtggacgttgctgatcaagcacaggataaagacagggatgatcgttcttttggccgtgatagaaatcgggattctgacaaaacagatacagactggagggctcgtcctgctacagacagctttgatgactacccacctagaagaggtgatgatagctttggagacaagtatcgagatcgttatgattcagaccggtatcgggatgggtatcgggatgggtatcgggatggcccacgccgggatatggatcgatatggtggccgggatcgctatgatgaccgaggcagcagagactatgatagaggctatgattcccggataggcagtggcagaagagcatttggcagtgggtatcgcagggatgatgactacagaggaggcggggaccgctatgaagaccgatatgacagacgggatgatcggtcgtggagctccagagatgattactctcgggatgattataggcgtgatgatagaggtcccccccaaagacccaaactgaatctaaagcctcggagtactcctaaggaagatgattcctctgctagtacctcccagtccactcgagctgcttctatctttggaggggcaaagcctgttgacacagctgctagagaaagagaagtagaagaacggctacagaaggaacaagagaagttgcagcgtcagctggatgagccaaaactagaacgacggcctcgggagagacacccaagctggcgaagtgaagaaactcaggaacgggaacggtcgaggacaggaagtgagtcatcacaaactgggacctccaccacatctagcagaaatgcacgaaggagagagagtgagaagtctctagaaaatgaaacactcaataaggaggaagattgccactctccaacttctaaacctcccaaacctgatcagcccctaaaggtaatgccagcccctccaccaaaggagaatgcttgggtgaagcgaagttctaaccctcctgctcgatctcagagctcagacacagagcagcagtcccctacaagtggtgggggaaaagtagctccagctcaaccatctgaggaaggaccaggaaggaaagatgaaaataaagtagatgggatgaatgccccaaaaggccaaactgggaactctagccgtggtccaggcgacggagggaacagagaccactggaaggagtcagataggaaagatggcaaaaaggatcaagactccagatctgcacctgagccaaagaaacctgaggaaaatccagcttccaagttcagttctgcaagcaagtatgctgctctctctgttgatggtgaagatgaaaatgagggagaagattatgccgaatagacctctacatcctgtgcttttctcctagtttctctccaccctggaacattcgagagcaaatcaaaacctctatccagacaagacaaaataaaactcaccatctcctgaagacctttcttacctttttttaaaaacaaaaaatgaaattattttgcatgctgctgcagcctttaaagtattgaagtaactggagaattgccaatacagccagagagaaagggactacagctttttagaggaaaagttgtggtgcgttatgtcaccatgcagttgccagtgtgattagtgcctaggggtctccatttagcagaaatggtaatgacagtgatataatgcctggaacctggttgggcagtaggggagggaggtagaaggaaaagtgtgagatttctaccttttagtttttatcctattgtggcatatatgaattctcaaacattatctgaataaattttccactcttggaaaggtagatttagcctcaagttgttctagtctccaggaggctgccagcccctcctcttatttaattctgagttttgggggccagcctagagggaattccttttttttttttaaccccccaggggggtagttgggagtgagactataggccataaagaatgggactgcattggaccaaaataaatgggaaaatcgtggtttgaaaagaagcttttgggaagtgatgagtcattttgcaccaggtaataggggaaaattgtgtgacctccagcaaacacatgaatggttatttcctggagccggaagcacttgggggtcgtggtaattcccagtgttttctgtgtcctagttttaccctttctaaacactgtcctttttgaaagttttgaatatatccacattctattgaaaccttgaaactaaaaatttagactcttatcatcatcttaagttcttcatgctactcttaacctcccaaaaagcagtatctaagtcacatacatgatgtcttgggcattttctcagccatggagaactctgaaaggaagaatcgctgcttttctcaagcaaatcggtttcttgatgtcttttggttctccttgcctgctcctgatgcttggaccccttttattgatcagagtgctctagaataatggatggtcttggatgatggataaatagggacagggacagttaaattgggagcctttcttacaaccttgatgggatttttccccccaagtttccttctccactgaaatgccacactaatgcttgttggattcatgaggtggccagaccaatgtgttgttttgttgttgtttttttaagcttcccttgagagaataaatggtaatggagagaactatttaacaaggtcctggtttctcttgcaacacagtagctaaacttgcctgcttttatatgcatttttgtagggatcagcttggtagacagtattagcggagaaacaccttgatcttggtttgcaagcccttctcccatcagtcctagattaggccctgttcagccatgcaggggtgttggtttatgcgtgctgcagcagtgggcataatgaatataatttacccagtggacaaaggtgtgtaccaagtgaatttaaataattggtgtggattggccagtagctaagaagtgggcttttaaagagtattgaagattgaaagggtttttctttcttttttaaaaaagaaaaacaaactattgattgtagataatgaaaagctagggtttgccctcttcatgtctactctccttccaaatagttatatccaaaactgtttttccctctcccctaccttgtcccccctattaaaatagaaacagggattgattaatgtcccgctcctgaatacatgtaaaatttgtacaaaaatatcttctatgaaaatgatttgtaatctgtagacttattacctgggagatgtcttgatgtaaaatcccatcctttgggttgtgggttttttgttttctccaaataaatctgatctttaaagttca

SEQ ID NO: 117666 - DNA, 1899 bp, Artificial Sequence
  derived and/or modified sequence
cttttgcgttctctttccctctcccaacatggcggcctcagcaaaaaagaagaataagaaggggaagactatctccctaacagactttctggctgaggatgggggtactggtggaggaagcacctatgtttccaaaccagtcagctgggctgatgaaacggatgacctggaaggagatgtttcgaccacttggcacagtaacgatgacgatgtgtatagggcgcctccaattgaccgttccatccttcccactgctccacgggctgctcgggaacccaatatcgaccggagccgtcttcccaaatcgccaccctacactgcttttctaggaaacctaccctatgatgttacagaagagtcaattaaggaattctttcgaggattaaatatcagtgcagtgcgtttaccacgtgaacccagcaatccagagaggttgaaaggttttggttatgctgaatttgaggacctggattccctgctcagtgccctgagtctcaatgaagagtctctaggtaacaggagaattcgagtggacgttgctgatcaagcacaggataaagacagggatgatcgttcttttggccgtgatagaaatcgggattctgacaaaacagatacagactggagggctcgtcctgctacagacagctttgatgactacccacctagaagaggtgatgatagctttggagacaagtatcgagatcgatatggtggccgggatcgctatgatgaccgaggcagcagagactatgatagaggctatgattcccggataggcagtggcagaagagcatttggcagtgggtatcgcagggatgatgactacagaggaggcggggaccgctatgaagaccgatatgacagacgggatgatcggtcgtggagctccagagatgattactctcgggatgattataggcgtgatgatagaggtcccccccaaagacccaaactgaatctaaagcctcggagtactcctaaggaagatgattcctctgctagtacctcccagtccactcgagctgcttctatctttggaggggcaaagcctgttgacacagctgctagagaaagagaagtagaagaacggctacagaaggaacaagagaagttgcagcgtcagctggatgagccaaaactagaacgacggcctcgggagagacacccaagctggcgaagtgaagaaactcaggaacgggaacggtcgaggacaggaagtgagtcatcacaaactgggacctccaccacatctagcagaaatgcacgaaggagagagagtgagaagtctctagaaaatgaaacactcaataaggaggaagattgccactctccaacttctaaacctcccaaacctgatcagcccctaaaggtaatgccagcccctccaccaaaggagaatgcttgggtgaagcgaagttctaaccctcctgctcgatctcagagctcagacacagagcagcagtcccctacaagtggtgggggaaaagtagctccagctcaaccatctgaggaaggaccaggaaggaaagatgaaaataaagtagatgggatgaatgccccaaaaggccaaactgggaactctagccgtggtccaggcgacggagggaacagagaccactggaaggagtcagataggaaagatggcaaaaaggatcaagactccagatctgcacctgagccaaagaaacctgaggaaaatccagcttccaagttcagttctgcaagcaagtatgctgctctctctgttgatggtgaagatgaaaatgagggagaagattatgccgaatagacctctacatcctgtgcttttctcctagtttctctccaccctggaacattcgagagcaaatcaaaacctctatccagacaagacaaaataaaactcaccatctcctg

SEQ ID NO: 117667 - DNA, 1836 bp, Artificial Sequence
  derived and/or modified sequence
atggccgccagcgccaagaagaagaacaagaagggcaagaccatcagcctgacagacttcctggctgaagatggcggcactggaggcggcagcacctacgtgtccaagcctgtgtcctgggcagatgaaacagatgacctggagggagatgtgtccaccacctggcacagcaatgatgatgatgtgtaccgggccccacccatcgacaggagcatcctgcccacagcccccagggctgcccgggagcccaacatcgacaggagccggctgcccaagagccccccctacacagccttcctgggcaacctgccctatgatgtgacagaggagagcatcaaggagttcttccggggcctgaacatctctgctgtgcggctgccccgggagcccagcaaccctgagcggctgaagggcttcggctacgccgagtttgaggacctggacagcctgctgagcgccctgagcctgaatgaggagagcctgggcaacagacgcatccgggtggatgtggccgaccaggcccaggacaaggacagagatgacaggagctttggccgggacaggaacagagacagcgacaagacagacacagactggagggcccggcctgccacagacagctttgatgactacccacccaggagaggagatgacagctttggagacaagtacagagacagatatgacagcgaccgctacagagatggctacagagatggctacagagatggcccccggcgggacatggacagatatggaggccgggacagatatgatgaccggggcagccgggactatgaccggggctatgacagccgcatcggcagcggccggcgggcctttggaagtggctacagaagagatgatgactacagaggaggaggagacagatatgaagatagatatgacagaagagatgaccgctcctggagcagcagagatgactacagcagagatgactacagaagagatgaccggggccccccccagaggcccaagctgaacctgaagcccaggagcacccccaaggaggatgacagcagcgccagcaccagccagagcaccagggctgccagcatctttggaggagccaagcctgtggacacagctgcccgggagcgggaggtggaggagcggctgcagaaggagcaggagaagctgcagaggcagctggatgagcccaagctggagcggcggccccgggagcggcaccccagctggaggtctgaggagacccaggagcgggagaggagcaggacaggcagcgagagcagccagacaggcaccagcaccaccagcagcagaaatgccaggagaagagagagcgagaagagcctggagaatgagaccctgaacaaggaggaggactgccacagccccaccagcaagccacccaagccagaccagcccctgaaggtgatgcctgcccccccacccaaggaaaatgcctgggtgaagaggagcagcaaccccccagcccggagccagagcagtgacacagagcagcagagccccaccagcggcggcggcaaggtggccccagcccagcccagcgaggagggccctggcaggaaggatgagaacaaggtggatggcatgaatgcccccaagggccagacaggcaacagcagccggggccctggagatggcggcaacagagaccactggaaggagagtgacaggaaggatggcaagaaggaccaggacagccgcagcgcccctgagcccaagaagccagaagaaaatcctgccagcaagttcagcagcgccagcaaatatgctgccctgtctgtggatggagaagatgaaaatgaaggagaagattatgcagagtag

SEQ ID NO: 117668 - DNA, 1764 bp, Artificial Sequence
  derived and/or modified sequence
atggccgccagcgccaagaagaagaacaagaagggcaagaccatcagcctgacagacttcctggctgaagatggcggcactggaggcggcagcacctacgtgtccaagcctgtgtcctgggcagatgaaacagatgacctggagggagatgtgtccaccacctggcacagcaatgatgatgatgtgtaccgggccccacccatcgacaggagcatcctgcccacagcccccagggctgcccgggagcccaacatcgacaggagccggctgcccaagagccccccctacacagccttcctgggcaacctgccctatgatgtgacagaggagagcatcaaggagttcttccggggcctgaacatctctgctgtgcggctgccccgggagcccagcaaccctgagcggctgaagggcttcggctacgccgagtttgaggacctggacagcctgctgagcgccctgagcctgaatgaggagagcctgggcaacagacgcatccgggtggatgtggccgaccaggcccaggacaaggacagagatgacaggagctttggccgggacaggaacagagacagcgacaagacagacacagactggagggcccggcctgccacagacagctttgatgactacccacccaggagaggagatgacagctttggagacaagtacagagacagatatggaggccgggacagatatgatgaccggggcagccgggactatgaccggggctatgacagccgcatcggcagcggccggcgggcctttggaagtggctacagaagagatgatgactacagaggaggaggagacagatatgaagatagatatgacagaagagatgaccgctcctggagcagcagagatgactacagcagagatgactacagaagagatgaccggggccccccccagaggcccaagctgaacctgaagcccaggagcacccccaaggaggatgacagcagcgccagcaccagccagagcaccagggctgccagcatctttggaggagccaagcctgtggacacagctgcccgggagcgggaggtggaggagcggctgcagaaggagcaggagaagctgcagaggcagctggatgagcccaagctggagcggcggccccgggagcggcaccccagctggaggtctgaggagacccaggagcgggagaggagcaggacaggcagcgagagcagccagacaggcaccagcaccaccagcagcagaaatgccaggagaagagagagcgagaagagcctggagaatgagaccctgaacaaggaggaggactgccacagccccaccagcaagccacccaagccagaccagcccctgaaggtgatgcctgcccccccacccaaggaaaatgcctgggtgaagaggagcagcaaccccccagcccggagccagagcagtgacacagagcagcagagccccaccagcggcggcggcaaggtggccccagcccagcccagcgaggagggccctggcaggaaggatgagaacaaggtggatggcatgaatgcccccaagggccagacaggcaacagcagccggggccctggagatggcggcaacagagaccactggaaggagagtgacaggaaggatggcaagaaggaccaggacagccgcagcgcccctgagcccaagaagccagaagaaaatcctgccagcaagttcagcagcgccagcaaatatgctgccctgtctgtggatggagaagatgaaaatgaaggagaagattatgcagagtag

SEQ ID NO: 117669 - DNA, 1836 bp, Artificial Sequence
  derived and/or modified sequence
atggccgccagcgccaagaagaagaacaagaagggcaagaccatctccctcacagactttttagcagaagatggcggcactggcggcgggagcacttatgtgtctaaacctgtatcttgggccgatgaaactgacgatctggaaggagatgtctctacaacttggcacagtaacgatgatgatgtatatcgggcgcctccaattgaccgcagcatactccccacagccccccgtgctgccagagaacctaatattgaccgcagtaggttaccaaagtcccctccatatactgcttttttagggaatttgccttacgatgtgaccgaggagagcatcaaagagtttttcagagggttgaacatctctgccgtgaggctcccccgggaaccatctaaccctgaacgactgaagggcttcggatatgctgagttcgaggatctcgatagtctgctttccgctctttctctcaacgaagaatctcttggcaacaggagaatccgcgttgacgtggccgatcaggcacaagataaagaccgcgacgaccggtcctttggcagggacaggaatcgggactcagataagaccgatactgactggagagcacgtcccgcaactgattcattcgatgattacccccctaggcgtggggacgatagtttcggggataaatatcgggatcgctacgactcagacagataccgcgatggctatcgtgatggctatcgagatgggcctcgccgggatatggacaggtacggtggcagggacaggtacgatgacagaggttcccgggattacgatagagggtacgactcaagaattggttctggcaggagggcttttggcagtggttacaggagggatgatgattataggggcggcggggatcgctacgaagataggtatgaccggagggatgatcggagctggtcttctcgggacgattattcgagggatgattatcgaagagatgacagggggcccccacagcgacccaaattgaatctgaaacctagatcaacacctaaggaggacgacagctcagcctccactagccagtctacccgtgcagctagcatttttggaggcgccaagcccgtcgatactgccgcacgcgagcgcgaagtggaggaacgattgcagaaagagcaggagaagctccaaaggcagcttgatgagcccaagctggaaagacgacccagggagcggcatccgtcttggcggtccgaggaaacacaggaaagagagcggagtagaactgggagcgagtcctcccagacaggcacgagtactacctccagccgaaatgccaggaggagggagtctgagaagagtttagagaatgagaccctgaataaggaggaggactgtcatagtcctacgtccaagcccccgaagcctgatcaacctttaaaggtgatgcctgcccccccccccaaagaaaacgcctgggttaagcggtcctccaatccccccgctcgaagccagagctctgatacagagcagcagtcccctacctctgggggaggaaaggtcgctcccgcacaaccctccgaagagggccctggaaggaaggatgagaacaaggtggacggtatgaacgcacccaagggacaaacagggaactcgtctcgcggaccgggtgacgggggtaatagggatcattggaaagaatcagatagaaaggacgggaaaaaagatcaggacagcagatccgcccccgaacccaaaaaaccagaagaaaatcccgcttctaaattctctagtgcctctaagtatgctgccctgtccgtcgacggggaagacgaaaacgaaggagaagactatgctgaatag

SEQ ID NO: 117670 - DNA, 1764 bp, Artificial Sequence
  derived and/or modified sequence
atggccgccagcgccaagaagaagaacaagaagggcaagaccatctctctgaccgacttcctcgccgaagatggtggcaccggtggcgggagcacttacgtgagtaaaccagtctcttgggcagacgaaaccgacgatctggagggggacgtgtccaccacttggcattctaacgatgacgatgtataccgggccccaccgattgacagatcaatcctcccgaccgcgccaagggcagcaagagaaccaaatatagacaggtcaaggctgcccaagtctccaccatacacggcatttctggggaatttaccctatgacgtcacagaggagtccatcaaggagtttttccgcggcctaaatattagcgccgtgcgtcttccaagagaaccttccaatcccgaaagacttaagggatttgggtatgccgagttcgaagacctagatagcctcctgtccgctctctccctcaatgaggagagtctgggaaataggcggatcagggtggatgtggctgatcaggctcaggacaaggatcgcgacgacagatcattcgggcgcgaccggaaccgagattctgacaaaacggacactgactggcgcgcccggcctgcaaccgattcttttgacgattatcctcctaggcgaggcgatgactccttcggcgacaagtatcgggaccgctacggcgggcgcgacagatatgatgatagagggtccagggattatgacaggggatatgactcccgaattggcagtggccgtagggccttcggatcgggataccgtcgcgatgacgattatcgaggaggcggagatcggtacgaagatagatacgatagacgggatgaccgaagctggagctccagggacgactactctcgcgacgattaccggcgcgatgatcgaggacctcctcagcgtcctaagctgaaccttaagcctagatcaaccccgaaggaggatgattcttctgctagtacttcacaaagcacacgcgcagcatccatattcggcggagctaaacccgtggacacagctgccagagaaagagaagttgaagaaagattgcaaaaggagcaggagaagcttcagcgccaactggacgagccaaagcttgagaggagacccagggaacggcatccatcctggcgaagtgaagaaacccaggaacgagaaagatccaggaccggaagcgaaagctcacagacaggtacaagcacgacctcatcacggaacgctagacgccgggaatccgagaagtctctggagaacgagactcttaataaggaggaagactgtcacagtccgacctcaaagcctccaaagcctgaccagcccctgaaagtgatgccagctccaccacctaaggaaaatgcatgggtcaagcggtcatccaaccctcccgcccggagccagtctagcgatacagaacagcagtctcctaccagtggtggtggaaaggtggctcccgcccaaccttctgaggagggccccggcaggaaggacgaaaacaaggttgatggaatgaatgccccgaaaggacagacaggtaattcaagccggggacccggggatggcggaaacagggaccactggaaggaaagcgatcgcaaggatggcaagaaagaccaggattcccggagcgcgcccgagcctaagaaacctgaagaaaatccagcctctaaattttccagtgccagtaagtacgccgctctatcagtcgacggggaagatgagaatgagggtgaggactatgcagaatag

SEQ ID NO: 117671 - DNA, 1836 bp, Artificial Sequence
  derived and/or modified sequence
atggccgcaagcgcgaaaaagaagaacaagaaaggtaaaacaattagtctcacagatttcctggctgaggacgggggtacgggcggaggaagtacatatgtatccaagcctgtgagctgggcagacgagacagatgaccttgaaggggatgtgtctacaacgtggcacagcaacgatgatgacgtatatagagcccctcctatagacaggtctattctgccaaccgccccaagagccgctcgcgaaccgaatattgacagatccagactgccaaaatcccctccgtatactgccttcctagggaacctgccttatgatgtcactgaggaaagcataaaagaatttttcagggggctgaatatctccgcggtgaggttgcccagagagccttcgaacccagaacgcctgaaaggttttggctacgcagaatttgaagatctggactccctgctgtccgctctcagcttgaatgaggaatccctgggaaacagacgaatacgcgtggacgttgcagaccaagcccaagacaaagatagggacgaccggagcttcggcagggaccgtaacagagactccgataaaaccgacaccgactggagggctcgaccggcaaccgactcattcgatgactatccaccccgaagaggcgacgatagttttggcgacaagtaccgcgatagatacgatagcgaccggtaccgcgatggttatagagatgggtatcgggatggacctagacgagacatggaccgctatggcggtcgcgatcgttacgatgacagaggtagtagagattacgatagaggctacgattctagaatcggttccggaaggcgagcttttgggagcgggtataggcgtgacgacgattatcggggaggaggagacagatacgaggacagatacgatagacgggacgatagaagctggagctctagagacgactactcacgagatgactatcggagagatgataggggccctcctcagaggcctaagctgaacctgaaaccaagatccacccctaaggaagacgatagctccgcttccaccagccagtctacccgggcagcaagtatctttggaggcgctaagcccgttgacaccgccgctcgggagcgcgaggtggaagagagactacaaaaggaacaggagaagctccagcgccagttggacgagccgaagctcgagaggcgtccaagagagcgacacccatcgtggaggagcgaggaaacgcaggagagggagcggtcaagaacaggatcggagtcaagtcagaccggcacatcaaccacaagctctcgcaacgcgagacggcgtgagtcagagaaatccctggaaaacgaaactctgaacaaggaggaggactgtcatagccctacatccaagcctcccaagcccgatcaacccttaaaggtaatgcctgcgccaccccctaaagagaatgcatgggtgaagagaagctcaaaccccccagccagatcacagagtagtgataccgagcagcaaagcccgacttcaggtggcggaaaagtcgcacctgctcagcccagcgaagaagggccaggtagaaaagacgagaataaagtcgatggtatgaatgcacccaaagggcagacaggaaatagcagtcgcggtcccggagacggagggaacagggatcattggaaggaatctgatcgaaaggacggtaagaaagatcaggacagcaggtccgcgccagagccaaagaagcctgaggagaacccggctagcaaattttcatctgcttctaagtatgcagccttgtctgtagacggggaggatgaaaatgaaggggaagattacgctgaatag

SEQ ID NO: 117672 - DNA, 1764 bp, Artificial Sequence
  derived and/or modified sequence
atggccgcatctgctaagaaaaaaaacaaaaagggcaaaacaatatctctcacagattttcttgccgaagatggtgggacagggggtggcagcacatatgtgagcaagccagttagctgggcggacgagacggacgacctggaaggtgatgtctccacaacatggcatagcaatgatgatgatgtgtaccgtgcaccacctatcgaccggtctatcctgccaacggctcccagagcagctcgggaacctaacatcgacaggagccggctaccgaaatctccaccatacacggccttcctggggaacctcccctatgacgtgacagaggagtctattaaggaattctttaggggcctcaacatcagtgcagtccggctgccacgggaaccttccaacccggagcgcctgaagggcttcggttacgcagaattcgaagacttagactccctcctttcagccctatcgttgaatgaggagtctcttggaaatcgtagaatccgcgtggacgtggcggatcaggcccaggacaaagatagagacgacaggagctttgggagagaccggaacagggacagtgataagacggacaccgattggcgtgcacggcctgccaccgattccttcgatgattacccacccagaagaggcgatgattcctttggagacaaatatcgggacagatatgggggtcgtgatagatacgatgaccggggaagcagggactacgataggggatacgattctcgcatcggcagtggcagacgtgccttcggctctggctatagaagagatgacgattatcgcggagggggagaccgctacgaggaccgctacgaccgaagggatgataggtcatggagctcacgagacgactactctagggacgattatagacgggatgacagagggcctcctcagaggcctaagctgaacttgaagccacgtagtacgcccaaagaggacgattcctccgccagcacctcccagagcacgcgcgctgcctcgatttttgggggagctaagcccgtggacacagcagcccgagaacgcgaagtcgaggagcgccttcagaaagagcaggagaaacttcagcggcagctggacgaaccaaagctcgaaagacgaccccgagagagacatcctagctggcgtagcgaggagacgcaggagcgagagagaagccgaacaggctccgagtcaagtcagaccggcacctccactacctcttctagaaatgccaggagacgtgagtccgagaagtctcttgaaaacgagacccttaacaaggaagaagattgccactcacctactagcaagccacccaagccagatcagccactcaaggtcatgcctgcaccgccacccaaggaaaacgcctgggttaagagatcttcaaacccgccagccaggtcacaatcttctgatacagagcagcaatcgcctactagcggtggtggcaaggtggcccctgcacagccttccgaggaaggcccaggcaggaaggacgagaataaagttgacgggatgaatgcacctaaggggcagacaggcaattcctcaagaggacctggcgacggtggaaatagagatcactggaaggagtcagatcgaaaagacgggaagaaagaccaggactcgagatctgcaccagaaccaaaaaaaccggaagagaatcctgctagtaagttttctagcgccagcaaatacgcggctctgagcgtggatggggaggatgagaacgaaggggaggactatgcagaatag

SEQ ID NO: 117673 - protein, 326 aa, Artificial Sequence
  derived and/or modified sequence
MSNGYEDHMAEDCRGDIGRTNLIVNYLPQNMTQDELRSLFSSIGEVESAKLIRDKVAGHSLGYGFVNYVTAKDAERAINTLNGLRLQSKTIKVSYARPSSEVIKDANLYISGLPRTMTQKDVEDMFSRFGRIINSRVLVDQTTGLSRGVAFIRFDKRSEAEEAITSFNGHKPPGSSEPITVKFAANPNQNKNVALLSQLYHSPARRFGGPVHHQAQRFRFSPMGVDHMSGLSGVNVPGNASSGWCIFIYNLGQDADEGILWQMFGPFGAVTNVKVIRDFNTNKCKGFGFVTMTNYEEAAMAIASLNGYRLGDKILQVSFKTNKSHK

SEQ ID NO: 117674 - DNA, 981 bp, Artificial Sequence
  derived and/or modified sequence
atgagtaatggctatgaggaccatatggccgaagactgtcggggggatatcggccggacaaatttaatcgtgaactatctgccacagaacatgactcaggatgagctacggagcttattctccagtatcggcgaggtggagtcagccaagttaatccgcgacaaagtggctggacatagtttaggttacggctttgtgaattacgtgaccgcaaaagatgccgaaagagctattaatactttgaatggcctaaggctacagtccaagactattaaggtctcctacgctagacccagttcagaggtcattaaggacgccaacctgtatatctccggcctacccagaaccatgactcagaaagatgtcgaggatatgtttagtaggttcggtcggatcattaattccagagttctggtagatcaaaccaccggcctctcaagaggcgttgcattcatccgcttcgacaaaagatccgaggccgaggaggccattactagttttaacggacacaagccgcctggatcttctgagcccattaccgtcaagtttgctgcaaatcccaatcagaataagaacgtggccctgttgtctcagctctaccacagccctgcccgtagatttggcgggccagtgcaccaccaggctcaaagattcagattctctcccatgggggtggaccacatgagtgggctgagcggagtaaacgtccccgggaatgcctcatccggctggtgtattttcatttataaccttgggcaagatgccgatgaaggaattctctggcagatgtttggccccttcggggccgtaactaacgtgaaggtgataagggattttaacactaacaagtgcaagggatttggattcgtaacaatgactaactacgaagaagccgccatggcaattgcgtcattgaatgggtatcgcctgggggataaaattttgcaggtgtcgttcaagactaacaagtctcacaagtag

SEQ ID NO: 117675 - DNA, 981 bp, Artificial Sequence
  derived and/or modified sequence
atgagcaatggctatgaggaccacatggccgaggactgccgcggggacattggaagaaccaacctgattgtgaactacctgccccagaacatgacccaggatgagctgcggagcctcttcagcagcattggagaggtggagagcgccaagctgatccgggacaaggtggccggccacagcctgggctacggctttgtgaactacgtgacagccaaggatgctgagcgggccatcaacaccctgaatggcctgcggctgcagagcaagaccatcaaggtgtcctatgcccggcccagcagcgaggtgatcaaggatgccaacctgtacatcagcggcctgcccaggaccatgacccagaaggatgtggaggacatgttcagcagatttggccgcatcatcaacagccgggtgctggtggaccagaccaccggcctgagccggggcgtggccttcatccgctttgacaagaggtctgaggccgaggaggccatcaccagcttcaacggccacaagcccccaggcagcagcgagcccatcaccgtgaagtttgctgccaaccccaaccagaacaagaatgtggccctgctgagccagctgtaccacagccctgccaggagatttggaggccctgtgcaccaccaggcccagcgcttccgcttcagccccatgggcgtggaccacatgagcggcctgagcggcgtgaatgtgcctggaaatgccagcagcggctggtgcatcttcatctacaacctgggccaggatgctgatgagggcatcctgtggcagatgtttggcccctttggagctgtgaccaacgtgaaggtgatccgggacttcaacaccaacaagtgcaagggctttggatttgtgaccatgaccaactatgaggaggccgccatggccatcgccagcctgaatggctaccgcctgggggacaagatcctgcaggtgtccttcaagaccaacaagagccacaagtag

SEQ ID NO: 117676 - DNA, 981 bp, Artificial Sequence
  derived and/or modified sequence
atgagcaacggctacgaggaccacatggccgaggactgccggggcgacattggcaggactaatctgatagtgaactatctgccccaaaacatgacacaagacgaactgaggagcttattcagtagtatcggggaagtcgagagcgccaagctcatacgcgacaaggtcgctggccatagcctgggctatggctttgtcaattacgtgaccgccaaggacgccgagagggctatcaataccctgaacgggctgaggctccagagtaaaacgataaaagtgtcatacgcaaggcctagttccgaggtcattaaggatgctaacctgtacattagcggcttgccacgtacaatgactcaaaaagacgtcgaggacatgttctcccggttcgggcggattattaatagccgagttttggttgaccagacgaccggcctttcacgcggagtagcttttatacggtttgacaaacggtcagaggccgaagaagccattacaagcttcaacggacataagccaccaggtagttctgaacccattactgtgaagtttgctgccaaccctaaccagaacaaaaatgtggcactcctgagccagctgtatcacagcccagcgagacggttcggcggaccagtgcaccatcaggcacagcgcttcaggttttctcccatgggagttgaccacatgagtgggctgtccggcgtgaatgttcccggcaacgcgagctccggctggtgcatcttcatctacaatttgggccaagatgctgacgaaggcattctgtggcagatgttcggcccttttggagccgtgaccaacgttaaagtgattagagactttaatactaataaatgtaaaggattcgggtttgttacaatgacgaattatgaggaggccgccatggcaattgcctccttgaacggctacagactgggcgacaagatacttcaggttagcttcaagaccaataaatcccataaatag

SEQ ID NO: 117677 - DNA, 981 bp, Artificial Sequence
  derived and/or modified sequence
atgagcaatggctacgaagaccacatggccgaggattgtagaggtgacatcggaaggacaaacttaattgtgaattacctgccccagaacatgacacaggatgagctccgatccttgtttagttctatcggcgaggttgaatccgcaaagctcattagggacaaagtcgcaggtcacagtttgggctatggattcgtaaattacgttaccgctaaggacgcagagcgtgctatcaatactctgaacggcttgcggctccagtctaagactatcaaggtttcgtatgcccgaccctcgtcagaggtgatcaaagacgcaaatctgtacatctctggccttcctcgcactatgacacagaaggacgtggaggatatgttttcccgtttcggtcggataatcaatagccgtgtgctggttgatcagactaccggcttgtccagaggggtggccttcattaggttcgataagcggagtgaggcggaagaggctataacctctttcaacggacacaagccaccaggtagctctgaacccataacagtgaaattcgccgcaaacccaaatcaaaataaaaacgttgctcttctcagccagttgtaccacagcccagccaggagatttggtggtcctgtgcaccatcaggcgcaacgattccgatttagcccaatgggcgtggaccatatgtctgggctctcaggcgtgaacgtacccggtaacgcatccagcgggtggtgcatcttcatttacaatttaggtcaggatgctgacgaaggcatcctctggcagatgtttggcccattcggagcagtaacaaatgtgaaggttatcagagactttaacactaataagtgcaaaggttttggattcgtcacaatgacaaattacgaggaggctgctatggctattgcctcgttgaatggctatagactgggtgataagatcttgcaggttagttttaaaaccaataagagtcacaagtag

SEQ ID NO: 117678 - DNA, 981 bp, Artificial Sequence
  derived and/or modified sequence
atgagcaacggctacgaggaccacatggccgaggactgcagaggcgacatcggcagaaccaacctgatcgtgaactacctgccccagaacatgacccaggacgagctgagaagcctgttcagcagcatcggcgaggtggagagcgccaagctgatcagagacaaggtggccggccacagcctgggctacggcttcgtgaactacgtgaccgccaaggacgccgagagagccatcaacaccctgaacggcctgagactgcagagcaagaccatcaaggtgagctacgccagacccagcagcgaggtgatcaaggacgccaacctgtacatcagcggcctgcccagaaccatgacccagaaggacgtggaggacatgttcagcagattcggcagaatcatcaacagcagagtgctggtggaccagaccaccggcctgagcagaggcgtggccttcatcagattcgacaagagaagcgaggccgaggaggccatcaccagcttcaacggccacaagccccccggcagcagcgagcccatcaccgtgaagttcgccgccaaccccaaccagaacaagaacgtggccctgctgagccagctgtaccacagccccgccagaagattcggcggccccgtgcaccaccaggcccagagattcagattcagccccatgggcgtggaccacatgagcggcctgagcggcgtgaacgtgcccggcaacgccagcagcggctggtgcatcttcatctacaacctgggccaggacgccgacgagggcatcctgtggcagatgttcggccccttcggcgccgtgaccaacgtgaaggtgatcagagacttcaacaccaacaagtgcaagggcttcggcttcgtgaccatgaccaactacgaggaggccgccatggccatcgccagcctgaacggctacagactgggcgacaagatcctgcaggtgagcttcaagaccaacaagagccacaagtag

SEQ ID NO: 117679 - protein, 367 aa, Artificial Sequence
  derived and/or modified sequence
MVTQILGAMESQVGGGPAGPALPNGPLLGTNGATDDSKTNLIVNYLPQNMTQDEFKSLFGSIGDIESCKLVRDKITGQSLGYGFVNYSDPNDADKAINTLNGLKLQTKTIKVSYARPSSASIRDANLYVSGLPKTMSQKEMEQLFSQYGRIITSRILVDQVTGVSRGVGFIRFDKRIEAEEAIKGLNGQKPLGAAEPITVKFANNPSQKTGQALLTHLYQSSARRYAGPLHHQTQRFRLDNLLNMAYGVKSPLSLIARFSPIAIDGMSGLAGVGLSGGAAGAGWCIFVYNLSPEADESVLWQLFGPFGAVTNVKVIRDFTTNKCKGFGFVTMTNYDEAAMAIASLNGYRLGERVLQVSFKTSKQHKA

SEQ ID NO: 117680 - DNA, 1104 bp, Artificial Sequence
  derived and/or modified sequence
atggtcacgcagattttgggtgccatggagtctcaggtcggcggaggccctgccggcccagcactgccgaatgggccgctgctgggtacgaacggagcaacagacgactccaaaacaaacctcattgtcaattaccttccccagaacatgacccaggatgagttcaaatcccttttcggctcgattggtgacattgagtcatgcaagcttgtccgcgataaaattaccggacagtccctggggtatggattcgtgaattactctgatccgaacgacgcagacaaggccattaacactctaaacggtctaaaattacagacaaaaacaataaaggtgagttacgctcgaccttctagtgcctctatcagggacgccaacctgtacgtttcgggcctgcctaaaacaatgtctcaaaaggagatggaacagttgttctcacagtacggtcggatcattacaagtaggattctggtggatcaagtgaccggggtgagcaggggtgtcgggttcatccgttttgacaagcgcatcgaggccgaagaagcgattaagggactgaacggtcagaagccgctcggtgccgcagagccaattacagtgaaattcgctaacaatccttcccagaagactggacaagccctgcttactcacctttaccagagttcggctcgccggtacgccggaccccttcatcaccaaactcaacgattccgactcgacaacctgctgaatatggcatacggtgtcaaaagtccactctccctgatcgcccgttttagtccgattgctatcgacggaatgtccggactcgcgggcgtcggactgtcaggcggagcagctggtgccggatggtgtatttttgtttacaatctgagcccagaggccgatgaaagcgtcctctggcagctttttggcccatttggagccgttacaaacgtcaaggtcatcagagatttcactacaaataagtgcaaggggtttggctttgtcaccatgacgaactacgatgaggctgcaatggctatagccagcctgaacggttatcgattgggcgaaagagtgctgcaggtgtcctttaagacctcaaaacagcacaaggcctag

SEQ ID NO: 117681 - DNA, 1104 bp, Artificial Sequence
  derived and/or modified sequence
atggtgacccagatcctgggcgccatggagagccaggtgggcggcggccctgctggccctgccctgcccaacggccccctgctgggcaccaatggagccacagatgacagcaagaccaacctgattgtgaactacctgccccagaacatgacccaggatgagttcaagagcctgtttggcagcatcggggacatcgagagctgcaagctggtgcgggacaagatcaccggccagagcctgggctacggctttgtgaactacagcgaccccaatgatgctgacaaggccatcaacaccctgaatggcctgaagctgcagaccaagaccatcaaggtgtcctatgcccggcccagcagcgccagcatcagagatgccaacctgtatgtgtctggcctgcccaagaccatgagccagaaggagatggagcagctgttcagccagtatggccgcatcatcaccagccgcatcctggtggaccaggtgactggagtgtccagaggagtgggcttcatccgctttgacaagagaattgaagctgaggaggccatcaagggcctgaatggccagaagcccctgggcgctgctgagcccatcaccgtgaagtttgccaacaaccccagccagaagacaggccaggccctgctgacccacctgtaccagagcagcgcccggcgctatgccggccccctgcaccaccagacccagcgcttccggctggacaacctgctgaacatggcctatggagtgaagagccccctgagcctcatcgcccgcttcagccccatcgccattgatggcatgagcggcctggccggcgtgggcctgagcggcggggccgccggggccggctggtgcatctttgtgtacaacctgagccctgaggctgatgagagcgtgctgtggcagctgtttggcccctttggagctgtgaccaacgtgaaggtgatccgggacttcaccaccaacaagtgcaagggctttggatttgtgaccatgaccaactatgatgaggccgccatggccatcgccagcctgaatggctaccgcctgggggagcgggtgctgcaggtgtccttcaagaccagcaagcagcacaaggcctag

SEQ ID NO: 117682 - DNA, 1104 bp, Artificial Sequence
  derived and/or modified sequence
atggtgacccagatcctgggcgccatggagagccaggtgggcggcggccctgccggtccagcgcttcctaacggacccctgctcggtactaacggtgcaactgacgattccaagacaaacctaatagtcaactatctgcctcagaatatgacacaggacgaatttaagagcttgtttggcagtattggagacatagaatcctgcaagcttgtgagagacaagattaccggccagtctctcggctatggttttgttaattactcggatcctaatgacgcagacaaagccataaataccctgaatggtctaaaattgcagactaaaacaataaaggtcagttacgcacgcccgagctctgcctccatacgcgatgctaacttatacgtcagcgggctcccaaaaacaatgagtcaaaaagagatggagcagctgttcagtcagtacgggcgcatcataacctcacgcatcctcgtagatcaagtcactggggtctcccgtggagtggggttcatacgcttcgacaagagaatcgaggccgaggaagcgatcaaggggttaaacgggcagaagccgttaggagcagcggaacccatcaccgtcaagttcgctaataaccctagccaaaagaccggccaggccctcctgacacatttgtatcaatcttcagcccggcgctacgctgggccattgcatcaccagacgcagaggtttcgccttgacaacttgctcaacatggcatacggcgtaaagtctcccctgtccttaatcgcaagattcagtcccatcgccattgatggcatgtcaggtttggccggcgtcggtctttccgggggggccgctggggcaggttggtgcatcttcgtatacaatttgagcccagaagctgacgagtctgtactctggcagctatttggaccctttggcgcagtgacaaacgtaaaagtcattcgggatttcacaaccaacaagtgtaaagggtttggcttcgtcactatgaccaactatgacgaggcagcaatggccatagccagcctgaatggctatcggctaggcgagcgtgtgttgcaggtatcttttaaaaccagtaaacagcataaggcttag

SEQ ID NO: 117683 - DNA, 1104 bp, Artificial Sequence
  derived and/or modified sequence
atggttacccaaattttaggcgcaatggagtctcaggtggggggtgggcctgcaggccctgcactgcctaatgggcctctgctggggacaaacggcgctaccgatgactcgaagactaacctcatcgtcaactacctccctcaaaacatgacacaggatgaatttaagtccctgtttggctcaatcggagacatcgagtcatgtaagctggtgcgggataaaatcacaggacagtcacttggatatggctttgtgaactactctgaccccaacgacgcagataaggctatcaatacactcaacgggttaaagctgcagactaaaaccattaaggtctcatatgccagacctagctctgcatcaatcagagacgcaaacctgtatgtatctgggctgcccaaaactatgtcacagaaagaaatggagcagctgttcagtcaatacggtcgcatcatcactagccgaattcttgtggaccaggtcactggggtcagcaggggggtgggcttcattagatttgacaaaagaattgaggctgaagaagcaatcaagggcctgaacgggcagaagccattaggcgcagcagagcccatcactgtcaaatttgcaaataacccgtctcaaaagacaggacaagccctgctgacacacctgtatcagtcctccgccagacgctacgctggccctctccaccatcagactcagaggtttcggctcgacaatctcttgaatatggcttacggggtgaaatccccactctcccttattgccagattctcccccatagcaattgatggcatgtccggactggccggagtgggtctgtccgggggagctgcaggggctgggtggtgcatcttcgtttacaatcttagtccggaggccgatgagagcgtgctttggcagctgtttgggccttttggcgcagtgacgaacgtcaaggtgatacgagattttactacaaacaagtgtaagggattcggctttgtgacaatgacgaattacgatgaggctgccatggcgattgccagtttaaacgggtaccgactgggcgaacgggttttgcaagtcagcttcaagacttcaaaacaacataaagcctag

SEQ ID NO: 117684 - DNA, 1104 bp, Artificial Sequence
  derived and/or modified sequence
atggtgacccagatcctgggcgccatggagagccaggtgggcggcggccccgccggccccgccctgcccaacggccccctgctgggcaccaacggcgccaccgacgacagcaagaccaacctgatcgtgaactacctgccccagaacatgacccaggacgagttcaagagcctgttcggcagcatcggcgacatcgagagctgcaagctggtgagagacaagatcaccggccagagcctgggctacggcttcgtgaactacagcgaccccaacgacgccgacaaggccatcaacaccctgaacggcctgaagctgcagaccaagaccatcaaggtgagctacgccagacccagcagcgccagcatcagagacgccaacctgtacgtgagcggcctgcccaagaccatgagccagaaggagatggagcagctgttcagccagtacggcagaatcatcaccagcagaatcctggtggaccaggtgaccggcgtgagcagaggcgtgggcttcatcagattcgacaagagaatcgaggccgaggaggccatcaagggcctgaacggccagaagcccctgggcgccgccgagcccatcaccgtgaagttcgccaacaaccccagccagaagaccggccaggccctgctgacccacctgtaccagagcagcgccagaagatacgccggccccctgcaccaccagacccagagattcagactggacaacctgctgaacatggcctacggcgtgaagagccccctgagcctgatcgccagattcagccccatcgccatcgacggcatgagcggcctggccggcgtgggcctgagcggcggcgccgccggcgccggctggtgcatcttcgtgtacaacctgagccccgaggccgacgagagcgtgctgtggcagctgttcggccccttcggcgccgtgaccaacgtgaaggtgatcagagacttcaccaccaacaagtgcaagggcttcggcttcgtgaccatgaccaactacgacgaggccgccatggccatcgccagcctgaacggctacagactgggcgagagagtgctgcaggtgagcttcaagaccagcaagcagcacaaggcctag

SEQ ID NO: 117685 - DNA, 4682 bp, Artificial Sequence
  derived and/or modified sequence
ggacttgaacacacgggaccggacaggaccgaccgaggggcggcggcgaaaggcagagcgccgcgatctctgtcgggaagcgcaacctccccgggccccgcggggccgcgcagggggcgtcctcaaccccgcgcccgctccctctttccatcccctgccgcccgcaggccaccccggggcccggccatccgcgcgcgcatccccgggttcgggcccgtccctggccctcgagggagccgccgccttcatcgccacatctgcagcggccgcaccagaggccgcccgggcgggaccccagcgtgagcatcgggcgcccccctaggagtgcaccacccccggagcccccctcaacacggaccgcgcccgccgggcacacaagaatggtcactcagatactgggggccatggagtctcaggtgggggggggcccggccggcccggccctgcccaacgggccactccttggtacaaatggagccactgacgacagcaagaccaacctcatcgtcaactacctgccccagaacatgacccaggatgagttcaagagtctcttcggcagcattggcgacatcgagtcctgcaagttggttcgggacaagatcacagggcagagccttggctacgggtttgtgaactattctgaccccaatgatgcagacaaagccatcaacaccctcaacggcctcaaattacagacgaagaccatcaaggtgtcctatgccagacccagttcagcatccatccgggatgctaacctgtacgtcagcgggctccccaagaccatgagccagaaagagatggagcagctcttctcccagtacggccgcatcatcacgtcccgcatcctggtggaccaggtcacaggtgtctctcggggtgtgggattcatccgctttgacaagaggattgaggccgaagaggctatcaaaggactgaatgggcagaagccgctgggcgcagctgagcccatcacagtcaagttcgcgaacaacccaagtcagaagacggggcaggcgctgctcacccacctctaccagtcatccgcccggcgctacgcaggccccctacaccatcagacccagcgtttccggctggacaatttgctcaacatggcctacggcgtcaagagtcccctgtcgctcatcgccaggttctcgccgatcgccatcgatggtatgagcggcctggcgggcgtgggcctgtcggggggcgcggcgggcgccggctggtgcatcttcgtgtacaacctgtcaccggaggcagacgagagcgtgctgtggcagctgttcgggccttttggggcagtcaccaacgtcaaggtcatccgtgatttcaccaccaacaagtgcaagggtttcggcttcgtgaccatgaccaactatgacgaggcggccatggccatcgccagcctgaacggctatcgcctgggcgagcgcgtgctgcaggtctccttcaagaccagcaaacagcacaaggcgtgagcccaccccgcctgccctcccaccccctccccgggcagcagagagagagagagagaaagagagagagagagagagaaggggcccaagagagacagcacaggcagccccacggacgacgcgagggccccacgtccctgcggaagccacagggtgagcactctggggtgggagggtctgcagggaattgggggggtgcccggggatcccccgccccatcctcctgcccccaccccaggctgggctgttcactctctcgtcttggtttggttcatggtgaaggtttttgtttcttttttcggctaaaaagaatgcagagatgtgcccccacccccaccctcgaccacccccgatgggatggcttggggggctccagggggtgccctcccagacccccttgcccaggcctccccagcacctaggtggggcctggggtaggaggaacaggtttaaaaatccccaaaaaagcgaaccgtgaggaggggtgtgggcacccccggcccagtgccccctggtggaatgcgggggagcaggcagtggggctggaagcagaaacaaaatgaaaaaaaaaggggggtgggaggggaagaaaaactctatttttgtaaaaagggaaaaagacctcgtggagaatttttactggggattcttgaacttgaaaaaaaaaaacacaaaaaaagacaaaaaaaaaaaaagaaaatattttggcaggttatgtttaccaactggggcgggggtggggggggcccagggagcagggcttaggggctagcagcccacggggccacacagagaaacaaccacgcagacagtcacaccacggggacacacggacagacgcagacggacacagcgacatgccccagacacgttaagggactggttggccaaactcagacacgtggacagggatagacagaaagagacagaagctggggctacgtccatgtggacacagaccacagatgtgggcacacgaatccatccacctgtccacgtgcacacgtgaatgtagcgatagatatttggacatcaaatttggacaccaggtcacggagaaacacaaacaccacccaggaacacgcagacatatgcccatagcatcccacaggcccaggcaggaggtcccaccccagaccctgccccagacgctccctcaccctctcggccccctcgccctggcccccaggttctctgcagagatctctcctggacccccagcggtctccttggcgcccacgaacacaggcgtgcacacgcagcgcacatgcattgagacacacgatacctcgttccaccttggcgtcacggtgggctggaggcagcccccccccccacaacacttgaggccaaaggacacccctgtccccggggctcagcctccccctgggccgaggccttggcccacacagctgagggagaggcccagccctgagcctcccccaccaggactgggcctccccggcagcaagaccccggcactccccgccaggcccagggtggggtggatgggcccaaaggcccagccccacactcctttcccgtccacttgtcacctacctatcccctttcggtttgttgggtttttcgtctttccagattgcagtggacacagcccccgatctcgagccccggcccccggcttctgtctggacattgcatcgccctagttttctttctttaaaaaaaaaaaattccaacagaagccacaggccggagcccctgggagccctcgcaccgctccccaccccactcagcggccccatcggaactgagaattgcaaaacccccgactttagctatagttaagttgccttcccccggtgtccccacgtttggtgtctggctatggcgcccccatctgactgtccagctctctctcccccacccctcccggtgttgttattaaacgtctgtggagcttctgctgcaaggaacaaaaaagaaaaaaatcaaaaaagcgacaaaaaaacacaaacagaagaggaaaaaaaagcaacaaaaaaagaaaacacacagaagagatttaaaaaaaaaaaaggaaaaaaaaaaaagacataaactggcaccagttaactttcttgtacttttttgctgaatttagcttcttgtagttttaacttattgctatgttaactatttattctcctcgttgccctgtaaggacatccgtgtatatttctgttacttcatccggtttgcaagttaaaggaacgacaatgttctctttgtttctttaagttttgccgagacatggttatgcctaatttatttataaaaggggaagtggaatcattaaagtaataataattattaataacagtaatggtagccgagtggcacgcgggggcgtgtgctctgcgggacagtccccacggccagcgacgtccaggtcaccaatgggattctttttgctcttgtcttgagaattttttcagtcctatttagctggtgaaatccctagcttgttcttgatacacgaacctatttattctcgtggttttaagtcctccctgccctctctcctctcccctgcagcagggcagggacccctctcccctgctgtctcttggggctctctcccctccgccctctgcattcgggaacacgcacgtccgcgtgggaagcttgcagcagggcgtccgagcaataagggctgggtttgtcccccaccctggggggggccaggctccagagagggggcacctccccacacaccccccccccaccgaggcctaggcccctgccacccccaagactgggaggggacttctttttctaaaacacaaaactcagcccagccaggccccctccctggaggccagcccctccccgcagggggccaggccggggctcccaggcgagggggacttggggcttccacgtccctggggggcaggggccaggccaggggggagggggctcagcccctccacccctcccttcatcctgttatttattcggaaggtttcaaatcacgacagagtccatgttggaggtgataaaaaactgtaaaaaaaaaaaaaaaaaaaaagacaaaacaaaagacaaaaaaaaaaaaaaaacccaacaagaacacttcgcgttgcgtttagactatttattaccgggatcacaggcctggccgcggtaacagacttttacatggaattgtttaattatttgtacttttcatgccagaaaataaaagttcagaatctt

SEQ ID NO: 117686 - DNA, 768 bp, Artificial Sequence
  derived and/or modified sequence
atgttagatagcgtgacacacagcacattcctacctaacgccagcttttgtgatcccctgatgagctggaccgatctgttcagcaacgaagagtactatcccgccttcgagcatcagactgcctgtgattcctactggaccagtgtccatcccgagtactggacaaagcggcacgtttgggaatggttgcaattctgctgcgaccagtacaaactggacacgaattgtatcagcttttgcaacttcaacatctctggactccagttatgctctatgacccaggaggagttcgtggaagctgctggtttgtgtggcgagtatctgtactttatcctccagaatatccgaacccaagggtattcgttctttaacgacgcggaagaaagcaaggcgacaattaaggactacgctgactctaactgtttgaaaaccagcggcatcaagtcccaggactgtcatagtcactctcgaacctccttgcagtctagtcacctctgggaattcgtgcgtgacctcctgcttagtcccgaggaaaattgcggaatactggaatgggaggaccgggaacagggcattttccgggtggtaaagagtgaagcccttgctaaaatgtgggggcagagaaagaagaacgacaggatgacatatgagaagctaagccgggccctgaggtactactataaaaccgggattctggaacgtgtagatagacgtttagtgtataaattcggtaagaacgcacacggatggcaggaggacaagctttag

SEQ ID NO: 117687 - DNA, 768 bp, Artificial Sequence
  derived and/or modified sequence
atgctggacagcgtgacccacagcaccttcctgcccaatgccagcttctgtgaccccctgatgtcctggacagacctcttcagcaatgaggagtactacccagcctttgagcaccagacagcctgtgacagctactggacctctgtgcaccctgagtactggaccaagagacatgtgtgggagtggctgcagttctgctgtgaccagtacaagctggacaccaactgcatctccttctgcaacttcaacatcagcggcctgcagctgtgcagcatgacccaggaggagtttgtggaggccgccggcctgtgtggggagtacctgtacttcatcctgcagaacatccgcacccagggctacagcttcttcaatgatgctgaggagagcaaggccaccatcaaggactatgctgacagcaactgcctgaagaccagcggcatcaagagccaggactgccacagccacagcaggaccagcctgcagagcagccacctgtgggagtttgtgcgggacctgctgctgagccctgaggagaactgtggcatcctggagtgggaggaccgggagcagggcatcttccgggtggtgaagtctgaggccctggccaagatgtggggccagaggaagaagaatgacaggatgacctatgagaagctgagccgggccctgcgctactactacaagacaggcatcctggagcgggtggaccggcggctggtgtacaagtttgggaagaatgcccacggctggcaggaggacaagctgtag

SEQ ID NO: 117688 - DNA, 768 bp, Artificial Sequence
  derived and/or modified sequence
atgctggacagcgtgacccacagcaccttcctgcccaacgccagcttttgtgatcctttaatgagctggacagacctgttctccaatgaagagtactatccagccttcgaacaccaaaccgcctgcgacagctattggacttctgtacatcccgaatactggacaaagagacacgtctgggaatggctgcagttttgctgcgaccaatacaaactggacacaaactgcatttctttttgtaatttcaatatctcaggactgcagctgtgcagcatgactcaggaggagttcgtcgaggccgccggtctctgtggcgaatacctctacttcatcctgcagaatattagaacgcaggggtactccttcttcaacgacgccgaagagagtaaggcaaccatcaaggattatgccgacagcaattgccttaagacctctggcatcaagtctcaggactgtcattcccacagtcgcacctcacttcagtcaagccatctgtgggaattcgtgcgagatctgctactgtcacctgaggaaaactgtggtatcctcgaatgggaagacagagaacagggtatattcagagtcgttaaatccgaagcattggcaaagatgtggggacagagaaagaaaaacgatcgaatgacatacgaaaagctgtctcgagcactgcggtattactataagacaggtattctcgagcgcgtggacaggagactcgtgtataaatttggaaagaatgcccatggctggcaggaagataaactgtag

SEQ ID NO: 117689 - DNA, 768 bp, Artificial Sequence
  derived and/or modified sequence
atgctcgacagcgtcacccacagtacattcttacctaacgcgagcttctgtgatcccttaatgtcttggaccgaccttttttcgaacgaagagtactaccccgctttcgagcatcagacggcatgtgacagctactggacaagcgtgcatcctgagtattggacaaaacgacatgtgtgggagtggctacagttttgttgcgaccagtataagctcgatacgaactgtattagcttctgtaatttcaacatttcaggactccagctgtgctcgatgacgcaggaagaatttgtggaggccgcaggcctctgtggcgagtatctctatttcatactccagaatatccgcacccaaggttacagtttttttaatgacgcggaggagtccaaggcaacgatcaaggactatgccgactccaactgtttaaagacgtcaggtataaagagccaggactgtcattcacactcccgcacgtctctccagtcctcgcacctctgggagttcgtacgtgaccttttattatcccctgaagaaaattgtggcattctggaatgggaggatcgggagcagggtattttccgcgtcgtgaaatcagaggccctggccaaaatgtgggggcaacgcaaaaagaatgatcgcatgacttatgagaagttatcgcgcgcactgagatattactacaaaactggcatcttggaacgcgttgaccgacgcctagtgtacaagttcggtaagaatgcccacggatggcaagaagataagctctag

SEQ ID NO: 117690 - DNA, 768 bp, Artificial Sequence
  derived and/or modified sequence
atgctggacagcgtgacccacagcaccttcctgcccaacgccagcttctgcgaccccctgatgagctggaccgacctgttcagcaacgaggagtactaccccgccttcgagcaccagaccgcctgcgacagctactggaccagcgtgcaccccgagtactggaccaagagacacgtgtgggagtggctgcagttctgctgcgaccagtacaagctggacaccaactgcatcagcttctgcaacttcaacatcagcggcctgcagctgtgcagcatgacccaggaggagttcgtggaggccgccggcctgtgcggcgagtacctgtacttcatcctgcagaacatcagaacccagggctacagcttcttcaacgacgccgaggagagcaaggccaccatcaaggactacgccgacagcaactgcctgaagaccagcggcatcaagagccaggactgccacagccacagcagaaccagcctgcagagcagccacctgtgggagttcgtgagagacctgctgctgagccccgaggagaactgcggcatcctggagtgggaggacagagagcagggcatcttcagagtggtgaagagcgaggccctggccaagatgtggggccagagaaagaagaacgacagaatgacctacgagaagctgagcagagccctgagatactactacaagaccggcatcctggagagagtggacagaagactggtgtacaagttcggcaagaacgcccacggctggcaggaggacaagctgtag

SEQ ID NO: 117691 - protein, 157 aa, Artificial Sequence
  derived and/or modified sequence
MLVLLAGIFVVHIATVIMLFVSTIANVWLVSNTVDASVGLWKNCTNISCSDSLSYASEDALKTVQAFMILSIIFCVIALLVFVFQLFTMEKGNRFFLSGATTLVCWLCILVGVSIYTSHYANRDGTQYHHGYSYILGWICFCFSFIIGVLYLVLRKK

SEQ ID NO: 117692 - protein, 141 aa, Artificial Sequence
  derived and/or modified sequence
MLVLLAGIFVVHIATVIMLFVSTIANVWLVSNTVDASVGLWKNCTNISCSDSLSYASEDALKTVQAFMILSIIFCVIALLVFVFQLFTMEKGNRFFLSGATTLVCFIMRIVMERSITTAIPTSWAGSASASASSSAFSIWS

SEQ ID NO: 117693 - DNA, 474 bp, Artificial Sequence
  derived and/or modified sequence
atgctcgttctcctggccggcatcttcgtggtccatatcgccaccgtgatcatgttatttgtctctactatagccaatgtgtggctggtgtccaacaccgttgatgcttctgtcgggctgtggaagaactgtacaaatatatcctgcagtgattcgctatcatacgcgtccgaagatgctctcaaaactgtgcaggcgtttatgattctaagtatcattttctgtgtgatagctcttctggttttcgtgtttcaattatttaccatggagaaaggtaatcgtttctttctgagtggggctactaccctcgtgtgctggctttgcattttagtgggagtgtcaatctacacttcccattacgctaacagggacggaactcaataccaccacgggtatagctacattcttggttggatctgcttctgtttcagttttatcatcggcgttctctaccttgtgctcagaaagaaatag

SEQ ID NO: 117694 - DNA, 426 bp, Artificial Sequence
  derived and/or modified sequence
atgctcgtgctccttgccgggatcttcgtggtgcatattgccaccgtgatcatgctctttgttagcaccattgccaacgtttggttagtgagcaacaccgtggatgcctccgtcggcctgtggaaaaattgcacaaatatatcctgtagcgatagccttagttacgcgagtgaagacgccttgaagacggtgcaggcttttatgatcctcagtatcattttttgcgtcattgcattgcttgtgttcgtatttcagttgttcaccatggagaagggaaacaggttctttcttagtggggctactaccttagtatgttttattatgcggattgttatggagcgctcaatcaccacagcgatacccaccagttgggctggctctgcatcagcttctgcttcgagtagcgcgttttcaatttggtcttag

SEQ ID NO: 117695 - DNA, 474 bp, Artificial Sequence
  derived and/or modified sequence
atgctggtgctgctggccggcatctttgtggtgcacatcgccaccgtcatcatgctgtttgtgtccaccatcgccaacgtgtggctggtgagcaacacagtggatgcctctgtgggcctgtggaagaactgcaccaacatcagctgcagcgacagcctgtcctatgcctctgaagatgccctgaagacagtgcaggccttcatgatcctgagcatcatcttctgtgtgattgccctgctggtgtttgtgttccagctgttcaccatggagaagggcaaccgcttcttcctgagcggggccaccaccctggtgtgctggctgtgcatcctggtgggcgtgtccatctacaccagccactacgccaacagagatggcacccagtaccaccacggctacagctacatcctgggctggatctgcttctgcttctccttcatcattggagtgctgtacctggtgctgaggaagaagtag

SEQ ID NO: 117696 - DNA, 426 bp, Artificial Sequence
  derived and/or modified sequence
atgctggtgctgctggccggcatctttgtggtgcacatcgccaccgtcatcatgctgtttgtgtccaccatcgccaacgtgtggctggtgagcaacacagtggatgcctctgtgggcctgtggaagaactgcaccaacatcagctgcagcgacagcctgtcctatgcctctgaagatgccctgaagacagtgcaggccttcatgatcctgagcatcatcttctgtgtgattgccctgctggtgtttgtgttccagctgttcaccatggagaagggcaaccgcttcttcctgagcggggccaccaccctggtgtgcttcatcatgagaattgtgatggagaggagcatcaccacagccatccccacctcctgggccggcagcgccagcgccagcgccagcagcagcgccttcagcatctggagctag

SEQ ID NO: 117697 - DNA, 474 bp, Artificial Sequence
  derived and/or modified sequence
atgctggtgctgctggccggcatcttcgtggtgcacatcgccaccgtcatcatgctctttgtttctactattgccaacgtttggttggtgtcaaacaccgtggatgcttccgtcggcctttggaagaattgcactaacatctcatgctccgacagcctctcctacgcatcagaggatgctctgaaaacagtgcaggcgttcatgattctgtccatcattttctgtgttattgcgttgctggtgtttgtttttcagctgttcacgatggagaaaggcaatcgattcttcctctcaggagccacgactcttgtctgttggctgtgtatcctggtgggtgtaagcatttatacaagccattacgcaaatcgtgacggcacccagtaccatcatggatattcctacatcctaggctggatctgcttttgcttcagtttcatcattggcgttttgtatcttgttttgagaaaaaagtag

SEQ ID NO: 117698 - DNA, 426 bp, Artificial Sequence
  derived and/or modified sequence
atgctggtgctgctggccggcatcttcgtggtgcacatcgccaccgtcatcatgttgttcgtgagcaccatcgcaaacgtctggttggtttcgaataccgtggacgccagtgttggcctctggaagaattgcaccaacatatcatgtagcgattcactgtcttatgctagcgaagatgcactaaagactgtccaagcttttatgattttatctatcatattctgcgtgattgcactgttggttttcgtttttcagctattcactatggagaaaggtaacaggttctttctgtctggcgccacaacgctggtttgctttataatgagaatcgtgatggagcgctcaattacaacggccatccccaccagctgggccggaagcgccagtgcaagcgccagctcatcagccttctctatttggagctag

SEQ ID NO: 117699 - DNA, 474 bp, Artificial Sequence
  derived and/or modified sequence
atgcttgtgctgcttgccggtatctttgtcgttcacatcgccaccgtgattatgttattcgtcagcaccatcgcgaatgtgtggctcgtttcgaacactgtggacgcgtcagtgggactatggaagaactgtacgaatatcagttgttccgattcattgagttacgcaagtgaggacgccctcaaaacagtgcaggccttcatgattttatctattatattttgtgtgatagccttgctggtgttcgtgttccagttgtttactatggagaagggcaataggtttttcctttctggcgctacgaccctggtgtgctggctttgtatccttgtcggagtgagtatttataccagccattatgctaaccgagatggcacacaataccaccacggttacagttacatactggggtggatctgcttttgtttcagtttcatcattggcgtgttgtacctcgtactgaggaagaaatag

SEQ ID NO: 117700 - DNA, 426 bp, Artificial Sequence
  derived and/or modified sequence
atgctcgtcctattagcgggtattttcgtagtccatattgctacagtcattatgctgttcgtgtctacgattgccaatgtctggctcgtatctaataccgtggacgccagcgtgggcctgtggaaaaactgcacaaacataagctgctctgacagcctgagttacgcttccgaggatgcattgaagactgtgcaagcattcatgatcctgtccattatcttttgtgtaattgccttactcgtgtttgtcttccaactctttactatggaaaaggggaaccgcttttttctctcgggggctaccacgctggtgtgctttattatgagaattgtgatggaacggagcatcacgaccgctataccgacctcttgggctggctccgctagcgctagcgccagttctagcgccttctcgatctggagctag

SEQ ID NO: 117701 - DNA, 474 bp, Artificial Sequence
  derived and/or modified sequence
atgctggtgctgctggccggcatcttcgtggtgcacatcgccaccgtgatcatgctgttcgtgagcaccatcgccaacgtgtggctggtgagcaacaccgtggacgccagcgtgggcctgtggaagaactgcaccaacatcagctgcagcgacagcctgagctacgccagcgaggacgccctgaagaccgtgcaggccttcatgatcctgagcatcatcttctgcgtgatcgccctgctggtgttcgtgttccagctgttcaccatggagaagggcaacagattcttcctgagcggcgccaccaccctggtgtgctggctgtgcatcctggtgggcgtgagcatctacaccagccactacgccaacagagacggcacccagtaccaccacggctacagctacatcctgggctggatctgcttctgcttcagcttcatcatcggcgtgctgtacctggtgctgagaaagaagtag

SEQ ID NO: 117702 - DNA, 426 bp, Artificial Sequence
  derived and/or modified sequence
atgctggtgctgctggccggcatcttcgtggtgcacatcgccaccgtgatcatgctgttcgtgagcaccatcgccaacgtgtggctggtgagcaacaccgtggacgccagcgtgggcctgtggaagaactgcaccaacatcagctgcagcgacagcctgagctacgccagcgaggacgccctgaagaccgtgcaggccttcatgatcctgagcatcatcttctgcgtgatcgccctgctggtgttcgtgttccagctgttcaccatggagaagggcaacagattcttcctgagcggcgccaccaccctggtgtgcttcatcatgagaatcgtgatggagagaagcatcaccaccgccatccccaccagctgggccggcagcgccagcgccagcgccagcagcagcgccttcagcatctggagctag

SEQ ID NO: 117703 - DNA, 2756 bp, Artificial Sequence
  derived and/or modified sequence
accgcccattacacaccccagtacaccagcagaggaaacttataacctcgggaggcaggtccttcccctcagtgcggtcacatacttccagaagagcggaccagggctgctgccagcacctgccactcagagcgcctctgtcgctgggacccttcagaactctctttgctcacaagttaccaaaaaaaaaagagccaacatgttggtattgctggctggtatctttgtggtccacatcgctactgttattatgctatttgttagcaccattgccaatgtctggttggtttccaatacggtagatgcatcagtaggtctttggaaaaactgtaccaacattagctgcagtgacagcctgtcatatgccagtgaagatgccctcaagacagtgcaggccttcatgattctctctatcatcttctgtgtcattgccctcctggtcttcgtgttccagctcttcaccatggagaagggaaaccggttcttcctctcaggggccaccacactggtgtgctggctgtgcattcttgtgggggtgtccatctacactagtcattatgcgaatcgtgatggaacgcagtatcaccacggctattcctacatcctgggctggatctgcttctgcttcagcttcatcatcggcgttctctatctggtcctgagaaagaaataaggccggacgagttcatggggatctggggggtggggaggaggaagccgttgaatctgggagggaagtggaggttgctgtacaggaaaaaccgagataggggaggggggagggggaagcaaaggggggaggtcaaatcccaaaccattactgaggggattctctactgccaagcccctgccctggggagaaagtagttggctagtactttgatgctcccttgatggggtccagagagcctccctgcagccaccagacttggcctccagctgttcttagtgacacacactgtctggggccccatcagctgccacaacaccagccccacttctgggtcatgcactgaggtccacagacctactgcactgagttaaaatagcggtacaagttctggcaagagcagatactgtctttgtgctgaatacgctaagcctggaagccatcctgcccttctgacccaaagcaaaacatcacattccagtctgaagtgcctactggggggctttggcctgtgagccattgtccctctttggaacagatatttagctctgtggaattcagtgacaaaatgggaggaggaaagagagtttgtaaggtcatgctggtgggttagctaaaccaagaaggagaccttttcacaatggaaaacctgggggatggtcagagcccagtcgagacctcacacacggctgtccctcatggagacctcatgccatggtctttgctaggcctcttgctgaaagccaaggcagctcttctggagtttctctaaagtcactagtgaacaattcggtggtaaaagtaccacacaaactatgggatccaaggggcagtcttgcaacagtgccatgttagggttatgtttttaggattcccctcaatgcagtcagtgtttcttttaagtatacaacaggagagagatggacatggctcattgtagcacaatcctattactcttcctctaacatttttgaggaagttttgtctaattatcaatattgaggatcagggctcctaggctcagtggtagctctggcttagacaccacctggagtgatcacctcttggggaccctgcctatcccacttcacaggtgaggcatggcaattctggaagctgattaaaacacacataaaccaaaaccaaacaacaggcccttgggtgaaaggtgctatataattgtgaagtattaagcctaccgtatttcagccatgataagaacagagtgcctgcattcccaggaaaatacgaaaatcccatgagataaataaaaatataggtgatgggcagatcttttctttaaaataaaaaagcaaaaactcttgtggtacctagtcagatggtagacgagctgtctgctgccgcaggagcacctctatacaggacttagaagtagtatgttattcctggttaagcaggcattgctttgccctggagcagctattttaagccatctcagattctgtctaaaggggttttttgggaagacgttttctttatcgccctgagaagatctaccccagggagaatctgagacatcttgcctacttttctttattagctttctcctcatccatttcttttatacctttcctttttggggagttgttatgccatgatttttggtatttatgtaaaaggattattactaattctatttctctatgtttattctagttaaggaaatgttgagggcaagccaccaaattacctaggctgaggttagagagattggccagcaaaaactgtgggaagatgaactttgtcattatgatttcattatcacatgattatagaaggctgtcttagtgcaaaaaacatacttacatttcagacatatccaaagggaatactcacattttgttaagaagttgaactatgactggagtaaaccatgtattcccttatcttttactttttttctgtgacatttatgtctcatgtaatttgcattactctggtggattgttctagtactgtattgggcttcttcgttaatagattatttcatatactataattgtaaatattttgatacaaatgtttataactctagggatataaaaacagattctgattcccttca

SEQ ID NO: 117704 - DNA, 675 bp, Artificial Sequence
  derived and/or modified sequence
agtgcggtcacatacttccagaagagcggaccagggctgctgccagcacctgccactcagagcgcctctgtcgctgggacccttcagaactctctttgctcacaagttaccaaaaaaaaaagagccaacatgttggtattgctggctggtatctttgtggtccacatcgctactgttattatgctatttgttagcaccattgccaatgtctggttggtttccaatacggtagatgcatcagtaggtctttggaaaaactgtaccaacattagctgcagtgacagcctgtcatatgccagtgaagatgccctcaagacagtgcaggccttcatgattctctctatcatcttctgtgtcattgccctcctggtcttcgtgttccagctcttcaccatggagaagggaaaccggttcttcctctcaggggccaccacactggtgtgcttcattatgcgaatcgtgatggaacgcagtatcaccacggctattcctacatcctgggctggatctgcttctgcttcagcttcatcatcggcgttctctatctggtcctgagaaagaaataaggccggacgagttcatggggatctggggggtggggaggaggaagccgttgaatctgggagggaagtggaggttgctgtacaggaaaaaccgagataggggaggggggag

SEQ ID NO: 117705 - protein, 392 aa, Artificial Sequence
  derived and/or modified sequence
MEEQQPEPKSQRDSALGAAAAATPGGLSLSLSPGASGSSGSGSDGDSVPVSPQPAPPSPPAAPCLPPLAHHPHLPPHPPPPPPQHLAAPAHQPQPAAQLHRTTNFFIDNILRPDFGCKKEQPPPQLLVAAAARGGAGGGGRVERDRGQTAAGRDPVHPLGTRAPGAASLLCAPDANCGPPDGSQPAAAGAGASKAGNPAAAAAAAAAAVAAAAAAAAAKPSDTGGGGSGGGAGSPGAQGTKYPEHGNPAILLMGSANGGPVVKTDSQQPLVWPAWVYCTRYSDRPSSGPRTRKLKKKKNEKEDKRPRTAFTAEQLQRLKAEFQANRYITEQRRQTLAQELSLNESQIKIWFQNKRAKIKKATGIKNGLALHLMAQGLYNHSTTTVQDKDESE

SEQ ID NO: 117706 - DNA, 2962 bp, Artificial Sequence
  derived and/or modified sequence
agctcacagacccataatcctgcatttctctaacaagttgtttatggagttgcttctccatttgcctacatcccaaaattcacccctcccgggtttcttctgccccctcctgagtcccggcctgaaggagggggagggacgcgggtgcgggcgcgggtgggggagggcggacccgacgcacagggccagcgccgaggcgccccctctccgccagcggttgacgcccccggattatttatccgcaaagtcccgcgcgcgcccattgggccgaggcccgagtgtcagcgcgagtcccggctcgccattggctccgcacacgtgcggccctgactcacgtgcttccggtttgaaggcaaaaagtgtgcctgggtgattttttttttaagcgagagagtttgtgcaaagatccgagctgtcagagatttgaaaaaaaaaaaaaaaaaaaaaaaaaaaaaaacagcccggcgctggcggagacgcgctctccctgcaaaaaaagcaaaggcgattaaaggcgctgccagcctcacgctctgggcacagctgagcgtgacactcggggaagtcaaacccctcactactgcctaggaagatggctagactttaaatactatttttttccctttaagaaaaaaattattggagctttttttcttgctttctttttccttttctttttctttttttccttcatttttttggccgtggcttactccccatttaaatcaaatcattgaatctggttgcagaaagaaaaaagaaatagccaagtgtctccatatctggatgtctacaaattagagagggagagacagcgagatctatctgctagataagaacgagcgatccaggccagacgcctgagcttttttcctgcacccgccccgtgccttcgctgaggcttcgcctgcctccttcctccgcgcacccccacgggccgctggcaaagtggggtggggagcgaggcggtgggggcgggggccggcgcggcggccggggcggcggggcggccgagcatggaagaacagcagccggaacctaaaagtcagcgcgactcggccctcggcgcggcggcggcggcgactccgggcggcctcagcctgagcctcagtccgggcgccagcggcagcagcggcagcggcagcgatggagacagcgtgccggtgtccccgcagcctgcgcccccctcgccgcccgcggcgccttgcctgccgcccctggcccaccacccgcacctccccccacaccccccgcccccgccgcctcagcatctcgcggcgcctgctcaccagccgcagccagcggcccagctgcaccgcaccaccaactttttcatcgacaacatcctgaggccggacttcggctgcaaaaaggagcagccgccaccgcagcttctggtggctgcggcggccagaggaggcgcaggaggaggaggccgggtcgagcgtgacagaggccagactgccgcaggtagagaccctgtccacccgttgggcacccgggcgccaggcgctgcctcgctcctgtgcgccccggacgcgaactgtggcccacccgacggctcccagccagccgccgccggcgcgggcgcgtctaaagctgggaacccggctgcggcggcggcggcggccgcggcggcagtggcggcggcggcggcggccgcagcagccaagccctcggacaccggtggcggcggcagtggaggcggcgcggggagccccggagcgcagggcaccaaatacccggagcacggcaacccggctatcctacttatgggctcagccaacggcgggcccgtggtcaaaactgactcgcagcagcctctcgtatggcccgcctgggtgtactgcacacgttattcggatcgtccatcctccggtccgcgcaccaggaagctgaagaagaagaagaacgagaaggaggacaagcggccgcggaccgcgttcacggccgagcagctgcagagactcaaggcggagttccaggcaaaccgctacatcacggagcagcggcggcagaccctggcccaggaactcagcctcaacgagtcccagatcaagatctggttccagaacaagcgcgccaagatcaagaaagccacaggcatcaagaacggcctggcgctgcacctcatggcccagggactgtacaaccactccaccaccacggtccaggacaaagacgagagcgagtagccgccacaggccggggccgcgcccgcgccccctcccggcaccgccgccgtcgtctcccggcccctcgctgggggagaaagcatctgctccaaggagggagggagcgcagggaaaagagcgagagagacagaaagagagcctcagaatggacaatgacgttgaaacgcagcatttttgaaaagggagaaagactcggacaggtgctatcgaaaaataagatccattctctattcccagtataagggacgaaactgcgaactccttaaagctctatctagccaaaccgcttacgaccttgtatatatttaatttcaggtaaggaaaacacatacgtgtagcgatctctatttgctggacatttttattaatctcctttattattattgttataattattataattattataattattttatcccctcccccaccgcctcgctgcccccgcccagtttcgttttcgttgcctttttcatttgaatgtcattgcttctccggtgcctcccgacccgcatcgccggccctggtttctctgggacttttctttgtgtgcgagagtgtgtttcctttcgtgtctgcccacctcttctcccccacctcccgggtcccttctgtcggtctgtctgttctgcccccctttcgttttccggagacttgttgagaaatacgaccccacagactgcgagactgaaccgccgctacaagccaaagattttattatgttcagaaacctgtagtctgaaataaagtgtacactgtgctcacga

SEQ ID NO: 117707 - DNA, 447 bp, Artificial Sequence
  derived and/or modified sequence
atgagcgtgcccaagctggtgaaccacggctgggagaccgagccctgtaacccagaccccgcactgctgctcaccggcgctgtgccaggagagggcgagactactctggagcgcgcattacctagagtagtgggtgagcaagagctcgggtcctggagagaaagggctaattctaccccagagcgcagactgtctcccgccctcaaacacgttagcgcccggccgacctccatacctgagacacccggtgaacgtggagctagaaccaggagggaccgcgcaggtcgggctaggaaaggcgagggtgcggccgcatcaacgctaagtagtctccggggggccgctccagaagcaggccgcggcgctgaagcgcccgaatggagcgtgtcaggaggcgccgacgcagtccccctggaaggggcgccggctgtacggagcaaatcttag

SEQ ID NO: 117708 - DNA, 261 bp, Artificial Sequence
  derived and/or modified sequence
gccgcacggtctctagcccgcagggctctcagagtcgcaggcggtgacgcccggtcggggggcccggtcgcaagggacacacagctgggggcgcaatgtcacccgcattgacgttccctaggcgctggatcgccgaaggtctggttgaaaacttgaacccgcctggagcggatgcctaagaaaatgcaggcccgctgaagcctccccgccgggccctgggccctgaaagcctccggcagtttcccgtgaccccgcggccgc

SEQ ID NO: 117709 - DNA, 1179 bp, Artificial Sequence
  derived and/or modified sequence
atggaggaacagcagccagagcctaaaagccaacgcgatagcgctcttggagccgccgctgctgctacccctgggggattatcgctttcactgtcccctggcgctagcggttccagtggaagtggctcagacggcgactcagtacccgtatccccccaacctgcacccccgtcacctccggccgcgccatgtttgccacctctggcccatcatccacaccttcctccacatccaccccccccccctccccagcatttggcagcccctgcccatcagcctcagccagccgcgcagcttcatcgtactactaacttttttatcgataatatcctgcggccagacttcggatgcaaaaaggagcaacctcccccacagctgcttgtggccgcagccgcgagagggggtgccggcggcggcggcagagtcgagcgggaccggggtcagaccgctgcaggccgagatcccgttcaccccctgggaacaagggccccgggagcagcaagccttctgtgcgccccagatgctaactgcggcccaccagacggctcacaacccgccgcagcaggagccggagcgagcaaggccgggaacccagccgcagctgccgcagcagccgcagccgctgttgctgcagcggctgcagccgccgccgcaaagccctctgacaccggaggagggggttcaggaggaggagccggctctcccggcgcgcagggtacgaagtacccagaacacgggaaccccgccatactgctgatgggctccgccaatggaggtcccgtggtgaaaactgattcacagcaacctcttgtctggcccgcctgggtgtattgtacccgctacagcgataggccgtcaagcgggcctcggactcggaagttaaaaaagaaaaaaaacgagaaggaagataaacgccctcggacagcctttactgcagagcaactccagagactgaaggccgagttccaggctaatcgatacatcacagaacaacgcaggcagacccttgcacaagagcttagcctcaacgagagtcagattaaaatttggtttcagaacaagcgggccaaaattaagaaggctaccggaataaaaaacggtctagcccttcatctgatggcccagggactgtataaccactcaaccacaacggtgcaagataaagatgaatcagaatag

SEQ ID NO: 117710 - DNA, 1179 bp, Artificial Sequence
  derived and/or modified sequence
atggaggagcagcagcctgagcccaagagccagagggacagcgccctgggcgctgctgctgctgccacccctgggggcctgagcctgagcctgagccctggggccagcggcagcagcggcagcggcagtgatggagacagcgtgcctgtgagcccccagcctgccccacccagccccccagctgccccctgcctgccccccctggcccaccacccccacctgcccccccaccccccacctcctccaccccagcacctggccgccccagcccaccagccccagcctgctgcccagctgcacaggaccaccaacttcttcatcgacaacatcctgcggccagactttggctgcaagaaggagcagcccccaccccagctgctggtggccgctgctgcccggggcggggccggcggcggcggccgggtggagcgggaccggggccagacagctgctggccgggaccctgtgcaccccctgggcacccgggcccctggggccgccagcctgctgtgtgccccagatgccaactgtggccccccagatggcagccagcctgctgctgctggggccggggccagcaaggccggcaacccagctgctgctgctgctgctgctgctgctgctgtggccgctgctgctgctgctgctgctgccaagcccagcgacacaggaggcggcggcagcggcggcggggccggcagccctggggcccagggcaccaagtacccagagcacggcaacccagccatcctgctgatgggcagcgccaatggaggccctgtggtgaagacagacagccagcagcccctggtgtggccagcctgggtgtactgcacccgctacagcgaccggcccagcagcggccccaggaccaggaagctgaagaagaagaagaatgagaaggaggacaagaggcccaggacagccttcaccgctgagcagctgcagaggctgaaggccgagttccaggccaaccgctacatcacagagcagaggcggcagaccctggcccaggagctgagcctgaatgaaagccagatcaagatctggttccagaacaagagggccaagatcaagaaggccaccggcatcaagaatggcctggccctgcacctgatggcccagggcctgtacaaccacagcaccaccaccgtgcaggacaaggatgaaagtgaatag

SEQ ID NO: 117711 - DNA, 1179 bp, Artificial Sequence
  derived and/or modified sequence
atggaggagcagcagcccgagcccaagagccagcgggacagcgcccttggcgctgcagccgccgctacgccgggtggcctctccctttccctgtcccctggcgccagcgggtcttcgggcagtggaagcgatggggattcagtgcctgtttctcctcagccagcccccccttctccacccgccgccccctgtttacccccactggcccaccaccctcatctgcctccccaccctccgcctccacctcctcagcacctggctgcacccgctcaccagcctcagcccgcagcccagttgcatcgaactacgaatttttttatcgataacatactgcgacccgattttgggtgcaagaaagagcagccaccaccccaactgctcgtcgctgccgccgcacggggaggcgcaggtggaggcggccgcgtggagcgcgatagaggtcagacagcagcaggcagggaccctgttcatcctctgggtacgagggcgcccggcgcggcctcattgctgtgtgcccccgacgcaaactgtgggccacccgacggctctcagcccgccgccgccggcgccggagccagcaaggcgggaaatccagcggccgccgccgccgcggctgccgcagctgttgctgcagcagccgcagctgccgctgccaagccctcggacacaggaggtggaggaagcggaggtggcgccggatcccccggggcccagggaaccaaatatcccgagcacggcaaccctgccattctcctcatgggttctgcaaatggagggcctgtcgttaaaacagattcccagcagccgctggtctggcccgcttgggtgtactgtaccagatactccgaccgtccatccagcggccccagaactcgcaaattgaagaaaaagaagaatgaaaaggaagacaagcgcccccgaacagctttcacagccgagcaattacaaagattgaaggccgagtttcaggcgaaccggtacatcactgaacaaagacggcaaactctcgcccaggagctgagtttgaacgaatcccagatcaaaatctggttccagaataagcgagctaaaattaaaaaagccactggaatcaagaacggccttgcattgcatctgatggcacagggactttataaccatagcactaccaccgttcaggataaggatgagtcagaatag

SEQ ID NO: 117712 - DNA, 1179 bp, Artificial Sequence
  derived and/or modified sequence
atggaggaacagcagcccgaaccgaaaagtcagagagattctgcactgggcgcagccgcagctgcgacaccgggtggtttgtccctgtctctgtcccctggagcctcaggcagttcaggctccgggagcgacggagacagtgtcccagtgtcccctcaaccagctccaccctctccaccagcggctccgtgcctgccgcctttggcccatcacccacatctaccccctcacccacctccacccccaccccagcacctggcggcacctgcacaccagccccagcctgcagcgcagctccaccgcacaactaatttcttcatcgataacatcttgaggcccgattttggctgcaaaaaagaacagccaccgcctcaattgctagtggctgcagccgctcggggaggtgccggaggcggtggcagagtggagcgggacaggggtcagacagcagccggaagagacccagtgcaccccctgggtaccagagcccctggtgccgcttctctcctctgtgcacccgacgctaattgcggacccccagacggaagtcagcccgcagccgctggggcaggtgcgtcaaaggccggtaaccctgccgctgctgcagcggcagccgctgccgctgtcgccgcagctgctgctgcagccgcagcaaaaccgtcagataccggcggtggcggaagcggcggtggagctggcagcccaggggcacaggggacaaagtacccagagcacgggaaccccgctatactgctcatgggctccgcaaacggcggaccagtcgtaaagaccgatagccagcagcccctggtttggcccgcttgggtgtattgcacaaggtattctgatagacccagcagcggacctaggacccggaaactaaagaaaaagaaaaatgaaaaggaggacaaaaggcctcggactgcgtttacagctgaacagcttcagaggttgaaagctgagtttcaggccaaccgatacataacagagcagcgacgacagacgttagcccaggagcttagcctgaatgagtcccagataaaaatttggttccagaacaagcgggcaaagataaaaaaagccacaggtattaaaaatggcttagccctccatctgatggcacagggcctttataatcactcgaccacaaccgtccaggacaaggatgaaagcgagtag

SEQ ID NO: 117713 - DNA, 1179 bp, Artificial Sequence
  derived and/or modified sequence
atggaggagcagcagcccgagcccaagagccagagagacagcgccctgggcgccgccgccgccgccacccccggcggcctgagcctgagcctgagccccggcgccagcggcagcagcggcagcggcagcgacggcgacagcgtgcccgtgagcccccagcccgccccccccagcccccccgccgccccctgcctgccccccctggcccaccacccccacctgcccccccaccccccccccccccccccccagcacctggccgcccccgcccaccagccccagcccgccgcccagctgcacagaaccaccaacttcttcatcgacaacatcctgagacccgacttcggctgcaagaaggagcagccccccccccagctgctggtggccgccgccgccagaggcggcgccggcggcggcggcagagtggagagagacagaggccagaccgccgccggcagagaccccgtgcaccccctgggcaccagagcccccggcgccgccagcctgctgtgcgcccccgacgccaactgcggcccccccgacggcagccagcccgccgccgccggcgccggcgccagcaaggccggcaaccccgccgccgccgccgccgccgccgccgccgccgtggccgccgccgccgccgccgccgccgccaagcccagcgacaccggcggcggcggcagcggcggcggcgccggcagccccggcgcccagggcaccaagtaccccgagcacggcaaccccgccatcctgctgatgggcagcgccaacggcggccccgtggtgaagaccgacagccagcagcccctggtgtggcccgcctgggtgtactgcaccagatacagcgacagacccagcagcggccccagaaccagaaagctgaagaagaagaagaacgagaaggaggacaagagacccagaaccgccttcaccgccgagcagctgcagagactgaaggccgagttccaggccaacagatacatcaccgagcagagaagacagaccctggcccaggagctgagcctgaacgagagccagatcaagatctggttccagaacaagagagccaagatcaagaaggccaccggcatcaagaacggcctggccctgcacctgatggcccagggcctgtacaaccacagcaccaccaccgtgcaggacaaggacgagagcgagtag

SEQ ID NO: 117714 - DNA, 2438 bp, Artificial Sequence
  derived and/or modified sequence
cgattaaaggcgctgccagcctcacgctctgggcacagctgagcgtgacactcggggaagtcaaacccctcactactgcctaggaagatggctagactttaaatactatttttttccctttaagaaaaaaattattggagctttttttcttgctttctttttccttttctttttctttttttccttcatttttttggccgtggcttactccccatttaaatcaaatcattgaatctggttgcagaaagaaaaaagaaatagccaagtgtctccatatctggatgtctacaaattagagagggagagacagcgagatctatctgctagataagaacgagcgatccaggccagacgcctgagcttttttcctgcacccgccccgtgccttcgctgaggcttcgcctgcctccttcctccgcgcacccccacgggccgctggcaaagtggggtggggagcgaggcggtgggggcgggggccggcgcggcggccggggcggcggggcggccgagcatggaagaacagcagccggaacctaaaagtcagcgcgactcggccctcggcgcggcggcggcggcgactccgggcggcctcagcctgagcctcagtccgggcgccagcggcagcagcggcagcggcagcgatggagacagcgtgccggtgtccccgcagcctgcgcccccctcgccgcccgcggcgccttgcctgccgcccctggcccaccacccgcacctccccccacaccccccgcccccgccgcctcagcatctcgcggcgcctgctcaccagccgcagccagcggcccagctgcaccgcaccaccaactttttcatcgacaacatcctgaggccggacttcggctgcaaaaaggagcagccgccaccgcagcttctggtggctgcggcggccagaggaggcgcaggaggaggaggccgggtcgagcgtgacagaggccagactgccgcaggtagagaccctgtccacccgttgggcacccgggcgccaggcgctgcctcgctcctgtgcgccccggacgcgaactgtggcccacccgacggctcccagccagccgccgccggcgcgggcgcgtctaaagctgggaacccggctgcggcggcggcggcggccgcggcggcagtggcggcggcggcggcggccgcagcagccaagccctcggacaccggtggcggcggcagtggaggcggcgcggggagccccggagcgcagggcaccaaatacccggagcacggcaacccggctatcctacttatgggctcagccaacggcgggcccgtggtcaaaactgactcgcagcagcctctcgtatggcccgcctgggtgtactgcacacgttattcggatcgtccatcctccggtccgcgcaccaggaagctgaagaagaagaagaacgagaaggaggacaagcggccgcggaccgcgttcacggccgagcagctgcagagactcaaggcggagttccaggcaaaccgctacatcacggagcagcggcggcagaccctggcccaggaactcagcctcaacgagtcccagatcaagatctggttccagaacaagcgcgccaagatcaagaaagccacaggcatcaagaacggcctggcgctgcacctcatggcccagggactgtacaaccactccaccaccacggtccaggacaaagacgagagcgagtagccgccacaggccggggccgcgcccgcgccccctcccggcaccgccgccgtcgtctcccggcccctcgctgggggagaaagcatctgctccaaggagggagggagcgcagggaaaagagcgagagagacagaaagagagcctcagaatggacaatgacgttgaaacgcagcatttttgaaaagggagaaagactcggacaggtgctatcgaaaaataagatccattctctattcccagtataagggacgaaactgcgaactccttaaagctctatctagccaaaccgcttacgaccttgtatatatttaatttcaggtaaggaaaacacatacgtgtagcgatctctatttgctggacatttttattaatctcctttattattattgttataattattataattattataattattttatcccctcccccaccgcctcgctgcccccgcccagtttcgttttcgttgcctttttcatttgaatgtcattgcttctccggtgcctcccgacccgcatcgccggccctggtttctctgggacttttctttgtgtgcgagagtgtgtttcctttcgtgtctgcccacctcttctcccccacctcccgggtcccttctgtcggtctgtctgttctgcccccctttcgttttccggagacttgttgagaaatacgaccccacagactgcgagactgaaccgccgctacaagccaaagattttattatgttcagaaacctgtagtctgaaataaa

SEQ ID NO: 117715 - protein, 333 aa, Artificial Sequence
  derived and/or modified sequence
MEENDPKPGEAAAAVEGQRQPESSPGGGSGGGGGSSPGEADTGRRRALMLPAVLQAPGNHQHPHRITNFFIDNILRPEFGRRKDAGTCCAGAGGGRGGGAGGEGGASGAEGGGGAGGSEQLLGSGSREPRQNPPCAPGAGGPLPAAGSDSPGDGEGGSKTLSLHGGAKKGGDPGGPLDGSLKARGLGGGDLSVSSDSDSSQAGANLGAQPMLWPAWVYCTRYSDRPSSGPRSRKPKKKNPNKEDKRPRTAFTAEQLQRLKAEFQTNRYLTEQRRQSLAQELSLNESQIKIWFQNKRAKIKKATGNKNTLAVHLMAQGLYNHSTTAKEGKSDSE

SEQ ID NO: 117716 - DNA, 3405 bp, Artificial Sequence
  derived and/or modified sequence
tctctcatcgtctgggcgagcggggcggctcgtggtgtttctaacccagttcgtggattcaaaggtggctccgcgccgagcgcggccggcgacttgtaggacctcagccctggccgcggccgccgcgcacgccctcggaagactcggcggggtgggggcgcgggggtctccgtgtgcgccgcgggagggccgaaggctgatttggaagggcgtccccggagaaccagtgtgggatttactgtgaacagcatggaggagaatgaccccaagcctggcgaagcagcggcggcggtggagggacagcggcagccggaatccagccccggcggcggctcgggcggcggcggcggtagcagcccgggcgaagcggacaccgggcgccggcgggctctgatgctgcccgcggtcctgcaggcgcccggcaaccaccagcacccgcaccgcatcaccaacttcttcatcgacaacatcctgcggcccgagttcggccggcgaaaggacgcggggacctgctgtgcgggcgcgggaggaggaaggggcggcggagccggcggcgaaggcggcgcgagcggtgcggagggaggcggcggcgcgggcggctcggagcagctcttgggctcgggctcccgagagccccggcagaacccgccatgtgcgcccggcgcgggcgggccgctcccagccgccggcagcgactctccgggtgacggggaaggcggctccaagacgctctcgctgcacggtggcgccaagaaaggcggcgaccccggcggccccctggacgggtcgctcaaggcccgcggcttgggcggcggcgacctgtcggtgagctcggactcggacagctcgcaagccggcgccaacctgggcgcgcagcccatgctctggccggcgtgggtctactgtacgcgctactcggaccggccttcttcaggtcccaggtctcgaaaaccaaagaagaagaacccgaacaaagaggacaagcggccgcgcacggcctttaccgccgagcagctgcagaggctcaaggccgagttccagaccaacaggtacctgacggagcagcggcgccagagcctggcgcaggagctgagcctcaacgagtcacagatcaagatttggttccagaacaagcgcgccaagatcaagaaggccacgggcaacaagaacacgctggccgtgcacctcatggcacagggcttgtacaaccactccaccacagccaaggagggcaagtcggacagcgagtagggcggggggcatggaggccaggtctcagtccgcgctaaacaatgcaataatttaaaatcataaagggccagtgtataaagattataccagcattaatagtgaaaatattgtgtattagctaaggttctgaaatattctatgtatatatcatttacaggtggtataaaatccaaaatatctgactataaaatatttttttgagttttttgtgtttatgagattatgctaattttatgggtttttttcttttttgcgaagggggctgcttagggtttcacctttttttaatcccctaagctccattatatgacattggacacttttttattattccaaaagaagaaaaaattaaaacaacttgctgaagtccaaagattttttattgctgcatttcacacaactgtgaaccgaataaatagctcctatttggtctatgacttctgccactttgtttgtgttggcttggtgaggacagcaggaggggcccacacctcaagcctggaccagccacctcaaggccttggggagcttaggggacctggtgggagagaggggacttccagggtccttgggccagttctgggatttggccctgggaagcagcccagcgtaccccaggcctgctctgggaagtcggctccatgctcaccagcagccgcccaggcccgcagcctcacccggctccctctcctcaccctcctgcacctaactccctcctccttctcctttttcctcctcttcctccttcctccttcctcctgctcctcctttcttcttctttttcttctcctcctcctccttccttcctcctcctccttctctttcctcctcctcctcaccaagggcccaaccgtgtgcatacatcgtctgcgtctgtggtctgtgtcgctgtccccagtcccaccgcagtcctgccgcaggcctaaccctcctgccctgggcactgcctccatgcagaagcgcttcgaggttctggggctaaaggcctggggtgtgtggcctaaagcccaagagcggtggggcgaccctccttttggcttggccccaggaatttcctgtgactccaccagccatcatgggtgccagccagggtcccagaaatgaggccatggctcactgtttctgggcgggcagaaggctctgtagagggagatggcatcatctatcttcctttcctttttcttttcttccctatttttttctttttttcctttatttttttcttttcttggagtggctgcttctgctatagagaacattcttccaagataaatatgtgtgtttacacatatgtctgcatgcatgtgaacacacacacacacacacacacaccaggcgtgtttgagtccacagttctgaaacatgtggctaccttgtctttcaaaagaactcagaatcctccaggatctagaagaaggaagaaagtgtgtaaataatcatttcttatcatcactttttgtcttttcttgttttttaaaatatacattttatttttgaaggtgtggtacagtgtaaattaaatatattcaatatatttcccaccaagtacctatatatgtatataaacaaacacattatctatatataacgccacactgtcttctgtttagtgtatggggaaagaccaatccaactgtccatctgtggctgggacagcccagggggtgtgcccacggctgacccaggggtgtgcacacggctgagctgggagtcccgctggtctccctgaggactgagggtgaacttcgctctttgccttaaacctctttatttcattgcagtaatagttttacgttgtacataatagtgtaaacctttttaaaaaggaaagtataaaaacaaaagttgtaatttaaaagtctgaataaccatctgctgcttaggaaactcaatgaaatgacatgcctttttagcaggaagcaaagttggtttctgttttttgttttctttgttgttttagtttataaaacatgtgcattttacagttccagtatcaaatatttataatcttatgagaaatgaatgaatgtttctatttacaactgtgcttatcaaaattgtgaacacccccacccccgcatttttgtgtgttgaaattcttgaaggttacattaaataaaacaaaatctctttattataaaataaaaaaaaaaa

SEQ ID NO: 117717 - DNA, 1002 bp, Artificial Sequence
  derived and/or modified sequence
atggaagagaacgatccaaaaccaggagaagccgcagcagctgtagagggtcagcgtcagcccgagtccagccctggcggaggctcaggaggaggaggaggttcctcacccggcgaggcggacacaggacgaaggagagccctgatgcttcctgcagtgttgcaggcacccgggaaccaccagcatccccaccggataactaacttctttattgataatattttacggcccgagtttggtagaaggaaagacgccgggacttgctgcgcgggagctggtggagggcgtggcggtggggccggtggagagggaggcgcaagcggggcggagggtggaggtggcgctggcgggtcggagcagctcctaggctccggctctcgggagccacggcagaacccaccctgcgcccctggcgctggagggcctctgcccgccgccggatccgactccccaggagatggcgaaggaggtagtaaaacactgtctctacacgggggcgccaagaaaggtggagaccctggtggcccactggacgggtctctaaaggcaagaggcctagggggcggtgatctgagcgtgtccagcgactctgactcatcacaagctggggccaatctgggcgctcaacctatgctctggccagcctgggtctattgcacacggtattcggatcgcccatcctccgggccgaggtctcggaagcctaagaagaagaaccctaacaaggaggacaaaagaccacgtacggccttcactgcggaacagcttcagcggctaaaggctgagtttcagacgaaccggtacctaaccgagcagagaagacagagcctggctcaagaactctctttgaatgaaagccagatcaagatctggtttcagaataagagagccaaaattaaaaaggcaacgggcaacaaaaatactctggcagtgcacctcatggctcaggggttgtataaccattccactacagccaaagagggcaagtctgactctgaatag

SEQ ID NO: 117718 - DNA, 1002 bp, Artificial Sequence
  derived and/or modified sequence
atggaggagaatgaccccaagccaggagaggccgctgctgctgtggagggccagaggcagcctgagagcagccctgggggcggcagcggcggcggcggcggcagcagccctggagaggccgacaccggcagaagaagagccctgatgctgcctgctgtgctgcaggcccctggcaaccaccagcacccccaccgcatcaccaacttcttcatcgacaacatcctgcggcctgagtttggaagaaggaaggatgctggcacctgctgtgccggggccggcggcggccggggcggcggggccggcggggagggcggggccagcggggctgagggcggcggcggggccggcggcagcgagcagctgctgggcagcggcagccgggagccccggcagaaccccccctgtgcccctggagctgggggccccctgcctgctgctggcagtgacagccctggagatggagagggcggcagcaagaccctgagcctgcacggcggggccaagaagggcggggaccccggcggccccctggatggcagcctgaaggcccggggcctgggcggcggggacctgtctgtgtccagtgacagcgacagcagccaggccggggccaacctgggcgcccagcccatgctgtggccagcctgggtgtactgcacccgctacagcgaccggcccagcagcggccccaggagcaggaagcccaagaagaagaaccccaacaaggaggacaagaggcccaggacagccttcaccgctgagcagctgcagaggctgaaggccgagttccagaccaaccgctacctgacagagcagaggcggcagagcctggcccaggagctgagcctgaatgaaagccagatcaagatctggttccagaacaagagggccaagatcaagaaggccactggaaacaagaacaccctggccgtgcacctgatggcccagggcctgtacaaccacagcaccacagccaaggagggcaagagtgacagcgagtag

SEQ ID NO: 117719 - DNA, 1002 bp, Artificial Sequence
  derived and/or modified sequence
atggaggagaacgaccccaagcccggcgaggccgccgccgccgtggaggggcagagacaaccagagagcagtcccggaggcggttctgggggcggggggggaagtagcccaggtgaggcagacactggaaggaggcgcgctctgatgctgcccgccgttctgcaagcacccggtaaccaccagcacccgcatcgcatcacaaatttcttcattgataatatcctgcggcctgagtttggccgccgtaaagatgctggtacatgctgtgcgggcgctggggggggcaggggggggggcgctggtggcgagggtggcgcctctggcgcagaagggggaggcggcgccggcgggtccgagcagttactaggttccgggagtagagagcccaggcagaaccccccatgtgcccccggggccgggggacccctacccgccgccgggtccgactctcccggcgatggcgagggcggatccaagaccctgtcactgcacggcggggccaagaagggaggcgacccagggggcccgctggacggaagtctgaaagccagagggttgggcgggggcgacctcagcgtatccagcgatagtgactccagtcaagccggcgccaatctgggcgcccagccaatgctctggcctgcctgggtgtattgcacccgctacagcgatagaccttcttcgggaccgagatcccgcaaacctaagaagaagaaccccaacaaagaagataagcgaccccgcaccgcattcaccgccgaacagctgcagcggctcaaagcagagtttcagacaaatcgatacctgaccgagcagagacggcagtcactggctcaggagttatcactgaacgagagtcagatcaaaatctggttccagaacaagagagctaaaataaagaaagcgaccggtaataagaacaccctggccgtccacctcatggcccaggggctatacaaccactctactactgctaaggagggaaagtctgattccgaatag

SEQ ID NO: 117720 - DNA, 1002 bp, Artificial Sequence
  derived and/or modified sequence
atggaggagaacgaccctaaaccgggagaggctgctgccgctgtggagggtcagcggcagcctgaaagtagtccgggaggcggaagcgggggtggagggggaagctccccaggtgaagcagatactggccgtcggagagcgctgatgcttcccgcagtactccaggcacctggcaatcatcagcatccccaccgtatcactaatttttttattgataatatcctgaggccagaattcggtcgacgcaaggacgccggtacatgctgtgctggcgctggtggcggacgtggaggtggcgctggcggtgaaggcggtgcttctggcgctgagggtggcggaggggcaggcggatctgagcagctgctcggcagtggaagccgcgagccaagacagaacccaccatgcgctccaggagctgggggaccacttcctgctgctggctcggacagtcccggtgatggtgaaggcggaagcaagacattgtccctccatgggggagcgaagaaaggtggagaccctggagggcctcttgatggcagcctgaaagccaggggccttggcggtggggatctgagcgtgagctccgactctgattcttcccaggcaggcgctaacctgggtgctcagcccatgctgtggcctgcctgggtctactgtacgcgctactctgacaggccaagttccgggcctagatcacggaagccgaagaaaaagaaccctaataaggaggacaagcgacctcgcacagcgttcaccgccgaacagcttcagcggttaaaggcagagttccagaccaatcgctatttgaccgaacagcgcagacagagtctagctcaggaactgtcacttaatgaatctcagattaagatatggttccagaacaagcgggcaaagataaagaaagccactgggaataagaacaccctggccgtgcacctaatggctcaggggctgtacaatcacagcaccaccgcgaaggaaggtaagagtgactcagaatag

SEQ ID NO: 117721 - DNA, 1002 bp, Artificial Sequence
  derived and/or modified sequence
atggaggagaacgaccccaagcccggcgaggccgccgccgccgtggagggccagagacagcccgagagcagccccggcggcggcagcggcggcggcggcggcagcagccccggcgaggccgacaccggcagaagaagagccctgatgctgcccgccgtgctgcaggcccccggcaaccaccagcacccccacagaatcaccaacttcttcatcgacaacatcctgagacccgagttcggcagaagaaaggacgccggcacctgctgcgccggcgccggcggcggcagaggcggcggcgccggcggcgagggcggcgccagcggcgccgagggcggcggcggcgccggcggcagcgagcagctgctgggcagcggcagcagagagcccagacagaaccccccctgcgcccccggcgccggcggccccctgcccgccgccggcagcgacagccccggcgacggcgagggcggcagcaagaccctgagcctgcacggcggcgccaagaagggcggcgaccccggcggccccctggacggcagcctgaaggccagaggcctgggcggcggcgacctgagcgtgagcagcgacagcgacagcagccaggccggcgccaacctgggcgcccagcccatgctgtggcccgcctgggtgtactgcaccagatacagcgacagacccagcagcggccccagaagcagaaagcccaagaagaagaaccccaacaaggaggacaagagacccagaaccgccttcaccgccgagcagctgcagagactgaaggccgagttccagaccaacagatacctgaccgagcagagaagacagagcctggcccaggagctgagcctgaacgagagccagatcaagatctggttccagaacaagagagccaagatcaagaaggccaccggcaacaagaacaccctggccgtgcacctgatggcccagggcctgtacaaccacagcaccaccgccaaggagggcaagagcgacagcgagtag

SEQ ID NO: 117722 - DNA, 3395 bp, Artificial Sequence
  derived and/or modified sequence
tctctcatcgtctgggcgagcggggcggctcgtggtgtttctaacccagttcgtggattcaaaggtggctccgcgccgagcgcggccggcgacttgtaggacctcagccctggccgcggccgccgcgcacgccctcggaagactcggcggggtgggggcgcgggggtctccgtgtgcgccgcgggagggccgaaggctgatttggaagggcgtccccggagaaccagtgtgggatttactgtgaacagcatggaggagaatgaccccaagcctggcgaagcagcggcggcggtggagggacagcggcagccggaatccagccccggcggcggctcgggcggcggcggcggtagcagcccgggcgaagcggacaccgggcgccggcgggctctgatgctgcccgcggtcctgcaggcgcccggcaaccaccagcacccgcaccgcatcaccaacttcttcatcgacaacatcctgcggcccgagttcggccggcgaaaggacgcggggacctgctgtgcgggcgcgggaggaggaaggggcggcggagccggcggcgaaggcggcgcgagcggtgcggagggaggcggcggcgcgggcggctcggagcagctcttgggctcgggctcccgagagccccggcagaacccgccatgtgcgcccggcgcgggcgggccgctcccagccgccggcagcgactctccgggtgacggggaaggcggctccaagacgctctcgctgcacggtggcgccaagaaaggcggcgaccccggcggccccctggacgggtcgctcaaggcccgcggcttgggcggcggcgacctgtcggtgagctcggactcggacagctcgcaagccggcgccaacctgggcgcgcagcccatgctctggccggcgtgggtctactgtacgcgctactcggaccggccttcttcaggtcccaggtctcgaaaaccaaagaagaagaacccgaacaaagaggacaagcggccgcgcacggcctttaccgccgagcagctgcagaggctcaaggccgagttccagaccaacaggtacctgacggagcagcggcgccagagcctggcgcaggagctgagcctcaacgagtcacagatcaagatttggttccagaacaagcgcgccaagatcaagaaggccacgggcaacaagaacacgctggccgtgcacctcatggcacagggcttgtacaaccactccaccacagccaaggagggcaagtcggacagcgagtagggcggggggcatggaggccaggtctcagtccgcgctaaacaatgcaataatttaaaatcataaagggccagtgtataaagattataccagcattaatagtgaaaatattgtgtattagctaaggttctgaaatattctatgtatatatcatttacaggtggtataaaatccaaaatatctgactataaaatatttttttgagttttttgtgtttatgagattatgctaattttatgggtttttttcttttttgcgaagggggctgcttagggtttcacctttttttaatcccctaagctccattatatgacattggacacttttttattattccaaaagaagaaaaaattaaaacaacttgctgaagtccaaagattttttattgctgcatttcacacaactgtgaaccgaataaatagctcctatttggtctatgacttctgccactttgtttgtgttggcttggtgaggacagcaggaggggcccacacctcaagcctggaccagccacctcaaggccttggggagcttaggggacctggtgggagagaggggacttccagggtccttgggccagttctgggatttggccctgggaagcagcccagcgtaccccaggcctgctctgggaagtcggctccatgctcaccagcagccgcccaggcccgcagcctcacccggctccctctcctcaccctcctgcacctaactccctcctccttctcctttttcctcctcttcctccttcctccttcctcctgctcctcctttcttcttctttttcttctcctcctcctccttccttcctcctcctccttctctttcctcctcctcctcaccaagggcccaaccgtgtgcatacatcgtctgcgtctgtggtctgtgtcgctgtccccagtcccaccgcagtcctgccgcaggcctaaccctcctgccctgggcactgcctccatgcagaagcgcttcgaggttctggggctaaaggcctggggtgtgtggcctaaagcccaagagcggtggggcgaccctccttttggcttggccccaggaatttcctgtgactccaccagccatcatgggtgccagccagggtcccagaaatgaggccatggctcactgtttctgggcgggcagaaggctctgtagagggagatggcatcatctatcttcctttcctttttcttttcttccctatttttttctttttttcctttatttttttcttttcttggagtggctgcttctgctatagagaacattcttccaagataaatatgtgtgtttacacatatgtctgcatgcatgtgaacacacacacacacacacacacaccaggcgtgtttgagtccacagttctgaaacatgtggctaccttgtctttcaaaagaactcagaatcctccaggatctagaagaaggaagaaagtgtgtaaataatcatttcttatcatcactttttgtcttttcttgttttttaaaatatacattttatttttgaaggtgtggtacagtgtaaattaaatatattcaatatatttcccaccaagtacctatatatgtatataaacaaacacattatctatatataacgccacactgtcttctgtttagtgtatggggaaagaccaatccaactgtccatctgtggctgggacagcccagggggtgtgcccacggctgacccaggggtgtgcacacggctgagctgggagtcccgctggtctccctgaggactgagggtgaacttcgctctttgccttaaacctctttatttcattgcagtaatagttttacgttgtacataatagtgtaaacctttttaaaaaggaaagtataaaaacaaaagttgtaatttaaaagtctgaataaccatctgctgcttaggaaactcaatgaaatgacatgcctttttagcaggaagcaaagttggtttctgttttttgttttctttgttgttttagtttataaaacatgtgcattttacagttccagtatcaaatatttataatcttatgagaaatgaatgaatgtttctatttacaactgtgcttatcaaaattgtgaacacccccacccccgcatttttgtgtgttgaaattcttgaaggttacattaaataaaacaaaatctctttattataaaata

SEQ ID NO: 117723 - protein, 2414 aa, Artificial Sequence
  derived and/or modified sequence
MAENVVEPGPPSAKRPKLSSPALSASASDGTDFGSLFDLEHDLPDELINSTELGLTNGGDINQLQTSLGMVQDAASKHKQLSELLRSGSSPNLNMGVGGPGQVMASQAQQSSPGLGLINSMVKSPMTQAGLTSPNMGMGTSGPNQGPTQSTGMMNSPVNQPAMGMNTGMNAGMNPGMLAAGNGQGIMPNQVMNGSIGAGRGRQNMQYPNPGMGSAGNLLTEPLQQGSPQMGGQTGLRGPQPLKMGMMNNPNPYGSPYTQNPGQQIGASGLGLQIQTKTVLSNNLSPFAMDKKAVPGGGMPNMGQQPAPQVQQPGLVTPVAQGMGSGAHTADPEKRKLIQQQLVLLLHAHKCQRREQANGEVRQCNLPHCRTMKNVLNHMTHCQSGKSCQVAHCASSRQIISHWKNCTRHDCPVCLPLKNAGDKRNQQPILTGAPVGLGNPSSLGVGQQSAPNLSTVSQIDPSSIERAYAALGLPYQVNQMPTQPQVQAKNQQNQQPGQSPQGMRPMSNMSASPMGVNGGVGVQTPSLLSDSMLHSAINSQNPMMSENASVPSLGPMPTAAQPSTTGIRKQWHEDITQDLRNHLVHKLVQAIFPTPDPAALKDRRMENLVAYARKVEGDMYESANNRAEYYHLLAEKIYKIQKELEEKRRTRLQKQNMLPNAAGMVPVSMNPGPNMGQPQPGMTSNGPLPDPSMIRGSVPNQMMPRITPQSGLNQFGQMSMAQPPIVPRQTPPLQHHGQLAQPGALNPPMGYGPRMQQPSNQGQFLPQTQFPSQGMNVTNIPLAPSSGQAPVSQAQMSSSSCPVNSPIMPPGSQGSHIHCPQLPQPALHQNSPSPVPSRTPTPHHTPPSIGAQQPPATTIPAPVPTPPAMPPGPQSQALHPPPRQTPTPPTTQLPQQVQPSLPAAPSADQPQQQPRSQQSTAASVPTPTAPLLPPQPATPLSQPAVSIEGQVSNPPSTSSTEVNSQAIAEKQPSQEVKMEAKMEVDQPEPADTQPEDISESKVEDCKMESTETEERSTELKTEIKEEEDQPSTSATQSSPAPGQSKKKIFKPEELRQALMPTLEALYRQDPESLPFRQPVDPQLLGIPDYFDIVKSPMDLSTIKRKLDTGQYQEPWQYVDDIWLMFNNAWLYNRKTSRVYKYCSKLSEVFEQEIDPVMQSLGYCCGRKLEFSPQTLCCYGKQLCTIPRDATYYSYQNRYHFCEKCFNEIQGESVSLGDDPSQPQTTINKEQFSKRKNDTLDPELFVECTECGRKMHQICVLHHEIIWPAGFVCDGCLKKSARTRKENKFSAKRLPSTRLGTFLENRVNDFLRRQNHPESGEVTVRVVHASDKTVEVKPGMKARFVDSGEMAESFPYRTKALFAFEEIDGVDLCFFGMHVQEYGSDCPPPNQRRVYISYLDSVHFFRPKCLRTAVYHEILIGYLEYVKKLGYTTGHIWACPPSEGDDYIFHCHPPDQKIPKPKRLQEWYKKMLDKAVSERIVHDYKDIFKQATEDRLTSAKELPYFEGDFWPNVLEESIKELEQEEEERKREENTSNESTDVTKGDSKNAKKKNNKKTSKNKSSLSRGNKKKPGMPNVSNDLSQKLYATMEKHKEVFFVIRLIAGPAANSLPPIVDPDPLIPCDLMDGRDAFLTLARDKHLEFSSLRRAQWSTMCMLVELHTQSQDRFVYTCNECKHHVETRWHCTVCEDYDLCITCYNTKNHDHKMEKLGLGLDDESNNQQAAATQSPGDSRRLSIQRCIQSLVHACQCRNANCSLPSCQKMKRVVQHTKGCKRKTNGGCPICKQLIALCCYHAKHCQENKCPVPFCLNIKQKLRQQQLQHRLQQAQMLRRRMASMQRTGVVGQQQGLPSPTPATPTTPTGQQPTTPQTPQPTSQPQPTPPNSMPPYLPRTQAAGPVSQGKAAGQVTPPTPPQTAQPPLPGPPPAAVEMAMQIQRAAETQRQMAHVQIFQRPIQHQMPPMTPMAPMGMNPPPMTRGPSGHLEPGMGPTGMQQQPPWSQGGLPQPQQLQSGMPRPAMMSVAQHGQPLNMAPQPGLGQVGISPLKPGTVSQQALQNLLRTLRSPSSPLQQQQVLSILHANPQLLAAFIKQRAAKYANSNPQPIPGQPGMPQGQPGLQPPTMPGQQGVHSNPAMQNMNPMQAGVQRAGLPQQQPQQQLQPPMGGMSPQAQQMNMNHNTMPSQFRDILRRQQMMQQQQQQGAGPGIGPGMANHNQFQQPQGVGYPPQQQQRMQHHMQQMQQGNMGQIGQLPQALGAEAGASLQAYQQRLLQQQMGSPVQPNPMSPQQHMLPNQAQSPHLQGQQIPNSLSNQVRSPQPVPSPRPQSQPPHSSPSPRMQPQPSPHHVSPQTSSPHPGLVAAQANPMEQGHFASPDQNSMLSQLASNPGMANLHGASATDLGLSTDNSDLNSNLSQSTLDIH

SEQ ID NO: 117724 - protein, 870 aa, Artificial Sequence
  derived and/or modified sequence
MTADKEKKRSSSERRKEKSRDAARCRRSKETEVFYELAHELPLPHSVSSHLDKASIMRLAISFLRTHKLLSSVCSENESEAEADQQMDNLYLKALEGFIAVVTQDGDMIFLSENISKFMGLTQVELTGHSIFDFTHPCDHEEIRENLSLKNGSGFGKKSKDMSTERDFFMRMKCTVTNRGRTVNLKSATWKVLHCTGQVKVYNNCPPHNSLCGYKEPLLSCLIIMCEPIQHPSHMDIPLDSKTFLSRHSMDMKFTYCDDRITELIGYHPEELLGRSAYEFYHALDSENMTKSHQNLCTKGQVVSGQYRMLAKHGGYVWLETQGTVIYNPRNLQPQCIMCVNYVLSEIEKNDVVFSMDQTESLFKPHLMAMNSIFDSSGKGAVSEKSNFLFTKLKEEPEELAQLAPTPGDAIISLDFGNQNFEESSAYGKAILPPSQPWATELRSHSTQSEAGSLPAFTVPQAAAPGSTTPSATSSSSSCSTPNSPEDYYTSLDNDLKIEVIEKLFAMDTEAKDQCSTQTDFNELDLETLAPYIPMDGEDFQLSPICPEERLLAENPQSTPQHCFSAMTNIFQPLAPVAPHSPFLLDKFQQQLESKKTEPEHRPMSSIFFDAGSKASLPPCCGQASTPLSSMGGRSNTQWPPDPPLHFGPTKWAVGDQRTEFLGAAPLGPPVSPPHVSTFKTRSAKGFGARGPDVLSPAMVALSNKLKLKRQLEYEEQAFQDLSGGDPPGGSTSHLMWKRMKNLRGGSCPLMPDKPLSANVPNDKFTQNPMRGLGHPLRHLPLPQPPSAISPGENSKSRFPPQCYATQYQDYSLSSAHKVSGMASRLLGPSFESYLLPELTRYDCEVNVPVLGSSTLLQGGDLLRALDQAT

SEQ ID NO: 117725 - protein, 259 aa, Artificial Sequence
  derived and/or modified sequence
MTADKEKKRSSSERRKEKSRDAARCRRSKETEVFYELAHELPLPHSVSSHLDKASIMRLAISFLRTHKLLSSVCSENESEAEADQQMDNLYLKALEGFIAVVTQDGDMIFLSENISKFMGLTQVELTGHSIFDFTHPCDHEEIRENLSLKNGSGFGKKSKDMSTERDFFMRMKCTVTNRGRTVNLKSATWKVLHCTGQVKVYNNCPPHNSLCGYKEPLLSCLIIMCEPIQHPSHMDIPLDSKTFLSRHSMDMKFTYCDD

SEQ ID NO: 117726 - DNA, 132 bp, Artificial Sequence
  derived and/or modified sequence
cgtctgcgcagccgccctcaagcaggcggagccggaagcgcagctgcctgtggcccaggtcagggcaggtttcgacgagccgctccacgcccttcgtcctcacgagtatgcgggcagcgaactagccgatag

SEQ ID NO: 117727 - DNA, 2613 bp, Artificial Sequence
  derived and/or modified sequence
atgactgccgacaaggagaaaaagagatcttcttccgaacgccgtaaggaaaaaagtcgtgacgccgcgcggtgtagacgaagtaaggaaaccgaggtgttttatgagttagctcacgagctgcctttgccccactccgtcagctcgcatctggacaaagcttcaatcatgcgacttgccatatcctttttacgcactcacaaactgctgtcatccgtatgctcagagaatgaatcagaggccgaagcagaccaacagatggacaacctgtatttaaaggctcttgaagggtttatcgcagtcgtgacccaggacggtgacatgatattcctctcagagaatatcagcaaattcatgggacttacccaagtggagctgacaggccatagcatttttgactttacccacccttgtgaccacgaggagatccgggaaaatctcagcctgaaaaatgggagtgggttcggtaagaagagcaaagatatgtctaccgagcgagatttttttatgcggatgaagtgtactgtcacaaatagggggaggaccgtcaacctgaaatctgcaacatggaaagtgttgcactgcactggccaggtgaaggtctataacaactgtcctccccacaattcgctctgcggttataaggagcctcttttgagctgcctgatcataatgtgcgagcccatacaacatccaagtcatatggacatcccactagactcgaaaacattcctgagcaggcacagtatggacatgaaatttacatactgtgacgaccgcattacagaactgattggataccacccggaggaactgcttggacgctcggcttacgagttttatcacgccctggactccgaaaacatgaccaaaagtcaccagaatctgtgcactaaaggacaggtggttagcggacagtacagaatgctggctaagcatggaggatacgtgtggctagaaacacagggcactgtgatttataatcctcgtaatctccagcctcagtgtataatgtgcgtgaactacgttctctcagagatagagaaaaacgacgtggtattcagtatggatcagactgagtcattatttaaaccccacctgatggctatgaattctatttttgactctagcgggaaaggggctgtgagcgagaagtccaacttcctctttacaaagctcaaggaggaaccagaggagcttgcacagctcgctccgacaccaggggatgccattatttctcttgattttggaaaccagaatttcgaggagagttccgcatacggcaaggctattcttcccccatctcagccttgggcgactgagttgcgcagccactccacacagagcgaggccggttccttgcctgccttcaccgtgccacaggcagcggcccccggaagtactacaccaagcgcgacttcttccagttcatcttgcagcactccaaactctccagaggactattacacctcgctcgataacgatctgaagatagaggtaattgagaaactgtttgccatggataccgaggccaaggaccagtgctcaacccagacagacttcaacgagctggatctggagaccctggccccatacatccctatggatggagaggattttcagcttagccctatctgcccagaagaaagactacttgctgaaaacccccagtccacaccgcagcactgctttagcgccatgaccaacatttttcagccccttgccccagtggcaccacatagccccttcctgctggacaaatttcagcagcagctggaaagtaaaaaaactgagccagagcaccgacctatgtccagtattttttttgacgctggatctaaagcttctcttcccccttgctgtggacaggcatcaactccgctcagctcgatgggtggtcgaagcaatacacaatggcccccagatccccccctacatttcgggcctaccaagtgggccgtgggcgaccaacgcaccgagttcctgggcgcagccccactgggtccacccgtgtcccctccccacgtgtctaccttcaagacgaggtccgctaagggctttggcgcccgaggcccagatgttctgtcacctgcaatggtcgcgctcagcaacaaacttaagttgaaacgacaacttgagtatgaggagcaggcctttcaggatctgtcagggggcgatcctcctggtgggtccacaagccacctgatgtggaagagaatgaagaaccttcgcggcggatcgtgcccactgatgcccgataaaccgttaagcgccaacgtcccaaatgacaaattcacccagaaccctatgagaggactgggccacccactgcggcacctgcccctgccacagccgccatccgccatctcccctggggaaaactctaaatcgaggttcccgccccagtgctatgcgactcagtatcaggactactccctaagctctgcccacaaagttagtggaatggcttctcgcctgttgggccctagcttcgaatcatatctcctgcccgagctgactcgttacgactgtgaagtgaacgtacctgtactgggaagcagtactctcttgcaaggcggggaccttctgcgagccctggaccaagccacctag

SEQ ID NO: 117728 - DNA, 780 bp, Artificial Sequence
  derived and/or modified sequence
atgaccgctgacaaggagaagaaaaggagctcttctgaaaggaggaaagagaaaagtcgggacgcagctcgttgcagaaggagcaaggaaacggaagtcttttacgaactcgcgcacgagctgcccctaccccactcggtgtccagccatctcgacaaggcgtcgataatgcgattggccatttctttcctcaggacccacaaactgctgagctcggtgtgcagcgagaatgagagcgaggccgaagctgaccagcaaatggataatctctacctgaaagccctggagggcttcattgctgtggtgactcaggacggcgacatgatctttctgtccgaaaacatttctaaatttatgggcctaacccaggtggaattaacgggccattccatcttcgattttactcatccttgtgatcacgaggaaattagagagaatctcagcctgaagaacggatctgggtttggtaaaaagagcaaagacatgagcaccgaaagggatttcttcatgagaatgaagtgtacagtgaccaaccgaggcaggacagtgaacctcaaatctgccacttggaaggttttgcactgcaccggacaggttaaggtctataataactgccccccccataactctctgtgtgggtacaaagaacccctgctgtcctgccttatcattatgtgcgaacctatccagcatccttcacacatggacattcctctggatagtaagacgttcttgtctcggcatagcatggatatgaaattcacttattgtgatgactag

SEQ ID NO: 117729 - DNA, 2613 bp, Artificial Sequence
  derived and/or modified sequence
atgacagctgacaaggagaagaagaggagcagcagcgagaggaggaaggagaagagcagagatgctgcccgctgccgccgcagcaaggagacagaggtgttctatgagctggcccacgagctgcccctgccccacagcgtgagcagccacctggacaaggccagcatcatgaggctggccatctccttcctgcggacccacaagctgctgagctctgtgtgcagtgaaaatgaaagtgaagctgaggccgaccagcagatggacaacctgtacctgaaggccctggagggcttcatcgctgtggtgacccaggatggagacatgatcttcctgtctgagaacatcagcaagttcatgggcctgacccaggtggagctgaccggccacagcatctttgacttcacccacccctgtgaccacgaggagatccgggagaacctgagcctgaagaatggaagtggctttgggaagaagagcaaggacatgagcacagagcgggacttcttcatgaggatgaagtgcaccgtgaccaacagaggaagaacagtgaacctgaagagcgccacctggaaggtgctgcactgcaccggccaggtgaaggtgtacaacaactgccccccccacaacagcctgtgtggctacaaggagcccctgctgagctgcctgatcatcatgtgtgagcccatccagcaccccagccacatggacatccccctggacagcaagaccttcctgagccgccacagcatggacatgaagttcacctactgtgatgaccgcatcacagagctgattggctaccaccctgaggagctgctgggccgcagcgcctatgagttctaccacgccctggacagcgagaacatgaccaagagccaccagaacctgtgcaccaagggccaggtggtgtctggccagtacaggatgctggccaagcatggaggctacgtgtggctggagacccagggcaccgtcatctacaaccccaggaacctgcagccccagtgcatcatgtgtgtgaactacgtgctgtctgaaattgagaagaatgatgtggtgttctccatggaccagacagagagcctcttcaagccccacctgatggccatgaacagcatctttgacagcagtggaaaaggagctgtgtctgagaagagcaacttcctgttcaccaagctgaaggaggagcctgaggagctggcccagctggcccccaccccaggagatgccatcatcagcctggactttggaaaccagaactttgaggagagcagcgcctacggcaaggccatcctgccccccagccagccctgggccacagagctgcggagccacagcacccagagcgaggccggcagcctgcctgccttcaccgtgccccaggccgccgcccctggcagcaccaccccatctgccaccagcagcagcagcagctgcagcacccccaacagccctgaggactactacaccagcctggacaatgacctgaagattgaggtgattgagaagctgtttgccatggacacagaggccaaggaccagtgcagcacccagacagacttcaatgagctggacctggagaccctggccccctacatccccatggatggagaggacttccagctgagccccatctgcccagaggagcggctgctggccgagaacccccagagcaccccccagcactgcttcagcgccatgaccaacatcttccagcccctggcccctgtggccccccacagccccttcctgctggacaagttccagcagcagctggagagcaagaagacagagcctgagcaccggcccatgagcagcatcttctttgatgctggcagcaaggccagcctgcccccctgctgcggccaggccagcacccccctgagctccatgggcggccgcagcaacacccagtggcccccagacccccccctgcacttcggccccaccaagtgggccgtgggggaccagaggacagagttcctgggcgccgcccccctgggcccccctgtgtccccacctcatgtgtccaccttcaagaccaggtctgccaagggctttggagcccggggcccagatgtgctgagccctgccatggtggccctgagcaacaagctgaagctgaagaggcagctggagtatgaggagcaggccttccaggacctgtctggaggagaccccccaggcggcagcaccagccacctgatgtggaagaggatgaagaacctgcggggcggcagctgccccctgatgccagacaagcccctgagcgccaacgtgcccaatgacaagttcacccagaaccccatgaggggcctgggccaccccctgcggcacctgcccctgccccagcccccatctgccatcagccctggagagaacagcaagagccgcttccccccccagtgctacgccacccagtaccaggactacagcctgagcagcgcccacaaggtgtctggcatggccagccggctgctgggccccagctttgagagctacctgctgcctgagctgaccaggtatgactgtgaggtgaatgtgcctgtgctgggcagcagcaccctgctgcagggcggggacctgctgcgggccctggaccaggccacctag

SEQ ID NO: 117730 - DNA, 780 bp, Artificial Sequence
  derived and/or modified sequence
atgacagctgacaaggagaagaagaggagcagcagcgagaggaggaaggagaagagcagagatgctgcccgctgccgccgcagcaaggagacagaggtgttctatgagctggcccacgagctgcccctgccccacagcgtgagcagccacctggacaaggccagcatcatgaggctggccatctccttcctgcggacccacaagctgctgagctctgtgtgcagtgaaaatgaaagtgaagctgaggccgaccagcagatggacaacctgtacctgaaggccctggagggcttcatcgctgtggtgacccaggatggagacatgatcttcctgtctgagaacatcagcaagttcatgggcctgacccaggtggagctgaccggccacagcatctttgacttcacccacccctgtgaccacgaggagatccgggagaacctgagcctgaagaatggaagtggctttgggaagaagagcaaggacatgagcacagagcgggacttcttcatgaggatgaagtgcaccgtgaccaacagaggaagaacagtgaacctgaagagcgccacctggaaggtgctgcactgcaccggccaggtgaaggtgtacaacaactgccccccccacaacagcctgtgtggctacaaggagcccctgctgagctgcctgatcatcatgtgtgagcccatccagcaccccagccacatggacatccccctggacagcaagaccttcctgagccgccacagcatggacatgaagttcacctactgtgatgactag

SEQ ID NO: 117731 - DNA, 2613 bp, Artificial Sequence
  derived and/or modified sequence
atgaccgccgacaaggagaagaagcggagcagcagcgagcggcggaaagaaaagagcagagatgctgcgcgctgtaggagaagcaaggagactgaagtgttctacgaacttgcccacgaactgccattaccacatagcgtgtcctctcacttagacaaggcctctattatgcgattggctatcagctttcttcgcacacacaagctgctaagctctgtgtgttcagaaaatgagagtgaggcagaagcggaccagcagatggacaatctgtaccttaaagccctcgagggatttatcgccgtggtcactcaggatggcgacatgatcttcttgtcagagaatatcagcaagtttatgggactcacgcaggtagaactaaccggacattcaattttcgacttcactcatccctgtgaccatgaagaaatccgggagaacctgagcctcaagaatgggagtgggtttgggaagaaatccaaggacatgagcactgagcgcgacttttttatgagaatgaaatgcaccgtaactaaccgcggaagaacagtgaatctgaagagcgcgacatggaaggtgcttcactgcacgggccaagtgaaggtgtataataactgccctccgcacaactctctttgtgggtataaagaacctctgctgtcctgtctgattatcatgtgcgagcctatccagcatccctcacacatggatatacctttggactccaaaactttcctctccaggcacagcatggatatgaagtttacatactgcgacgatagaataacagaactcattggatatcatcccgaggagcttctgggccgctctgcatacgaattctaccacgcccttgattcagagaatatgacaaagtcccaccagaacctttgtaccaaagggcaggtggtgagcggacagtatcgtatgctcgcgaagcacggagggtatgtttggcttgaaactcaggggaccgttatttataatccccgcaatctgcagccacagtgcattatgtgcgtaaactacgtcctaagcgagatcgaaaagaatgacgtcgtgttcagcatggaccagaccgagagtctgttcaagccccacttgatggcaatgaattccatatttgactctagcggcaagggagccgtgtcagaaaagagtaactttctttttacaaaattgaaggaagagccggaagagctcgcccaacttgcgccgacccctggggatgctattatttccctcgacttcggcaaccaaaactttgaggaatccagcgcgtatggaaaggctatcttacctccatcacagccctgggccacagagcttcgcagccatagtacacaaagcgaggctggctctctccctgcttttacagtcccacaggcagctgcacctggatctaccaccccatccgccacctctagcagctccagttgcagcacacctaattctcctgaggattattatacctccctggacaacgatctgaaaatagaggtgatcgagaagcttttcgcgatggatactgaagcgaaagaccagtgttccacacagacagatttcaacgagctggaccttgaaacattagccccatatataccgatggacggagaggattttcagcttagtcccatttgcccagaagagaggcttttagccgagaacccccagtcaacgccccagcactgttttagcgccatgactaatatcttccagccattggcccctgtggctcctcatagccctttcctgctggacaagttccagcagcagctggagtccaagaagactgagcccgaacatcgcccaatgtcttctatcttttttgatgccggctctaaagctagccttcccccctgctgtggacaggcttccactccactgagcagcatgggtggcagaagcaatacccagtggccccctgaccctcccctgcacttcggaccgacgaagtgggccgtcggcgatcagaggacagaatttctaggcgctgccccattaggacccccagttagccctccccatgtgtccacctttaagactcggtctgccaaaggtttcggtgccaggggccctgacgtgctgagccccgctatggtggccctctcaaacaagctgaagctgaagcgacagttggaatacgaggagcaggcttttcaggatctgtctggaggggacccccctggtggcagtacatctcacttgatgtggaaaaggatgaagaatcttaggggggggtcctgtccattgatgcctgataaacccctatccgcaaacgtccccaacgacaagttcacacagaatccaatgcggggactcggtcatccccttagacatctcccactcccacagccccccagcgcgatcagccccggagagaactcaaaatcgcgttttcccccacagtgctatgctacacagtaccaggactattcgctgagctccgctcacaaggttagcggtatggcctcccgattgctggggccctcctttgagtcttacctgctgcccgaactgaccaggtacgactgcgaggtgaacgtccctgtgcttggcagttctaccctgctgcaggggggggaccttttgagggcattggatcaggcgacgtag

SEQ ID NO: 117732 - DNA, 780 bp, Artificial Sequence
  derived and/or modified sequence
atgaccgccgacaaggagaagaagcggagcagcagcgagcggcggaaggagaagtctcgcgatgcagcaagatgccggcgaagtaaagagacagaggtcttttacgaactggcacacgagctccctctcccgcatagcgtctcttcacatctcgacaaagccagtatcatgcggttggccattagttttctgcgaacccacaaactgctttccagcgtctgctccgaaaatgagtcagaggcagaggccgaccagcagatggataacttgtacctcaaagccctggaaggctttattgcagtcgtgactcaggacggggatatgattttcctttccgagaacatatctaagttcatggggctcacacaggtcgaactaaccggacactctattttcgacttcactcacccttgtgaccacgaggaaatcagagagaatctctcactgaagaacgggagcggctttggcaagaagtccaaagatatgtccactgagagagatttttttatgcggatgaaatgtacagtaaccaatcgggggcgaactgtcaacctgaagagcgctacatggaaggtcctccactgcaccggccaagtgaaagtgtacaacaactgtcctccccataattctctctgcggttacaaagagccactcctatcctgtctcatcatcatgtgcgagccaatccaacacccctcccacatggatattccactagattctaagactttcctatctcggcacagtatggacatgaagtttacttattgtgacgactag

SEQ ID NO: 117733 - DNA, 2613 bp, Artificial Sequence
  derived and/or modified sequence
atgactgccgataaagagaagaagcgatctagttcagagagaagaaaagagaagtccagagacgctgcacgttgccgcaggtcaaaggagacggaagtgttttatgaactggcccacgagttaccgctgcctcactccgtgagtagccacctggacaaggcgagcatcatgaggttggccattagcttcctgaggacacacaaactgttgtcaagcgtctgttcagagaacgagtcagaggccgaggctgatcagcagatggacaatctgtacctgaaggctcttgagggtttcatcgcggtagtcactcaggatggggacatgatcttcctttctgaaaatattagtaagtttatgggcctgacccaggtggaactcactggccatagtatattcgatttcacgcatccttgcgaccatgaggagattcgcgagaacctgtcattaaagaacggatcaggctttggaaagaaaagcaaagatatgagcactgagagagactttttcatgcgcatgaagtgtacagtgactaataggggcaggacagtgaatctcaaatccgctacctggaaagtgctccattgcacaggacaggttaaggtgtacaacaactgcccgccacataactccctgtgtggctataaggaacctctgcttagctgcctcatcattatgtgcgaacctattcagcatccctcgcacatggacattcctcttgatagcaagactttcctgtctagacactcaatggatatgaaatttacttactgcgatgacagaatcaccgagctcatcgggtatcaccccgaggaattactcggccgaagtgcttacgaattctaccacgctctagactctgaaaatatgacaaagagccatcaaaacctgtgcacaaaggggcaagtggtcagcggccaatacagaatgttggctaagcacggcggatatgtgtggctggaaactcaaggcactgtcatctataatcccaggaacctgcagccacagtgcatcatgtgcgtgaattatgttctgtccgaaattgaaaagaatgacgtggtgttcagcatggaccagacagagagtctgtttaaacctcacctcatggctatgaattccattttcgattcatctgggaagggcgcagtgtctgaaaaatcaaacttcctcttcactaagcttaaagaagagcctgaggagctggcccagcttgcgcctactcctggcgatgctatcatctccctagattttgggaatcagaactttgaggaatcaagtgcatatggcaaagctatcctgccaccttctcagccatgggccaccgaacttagatctcattcgactcaatccgaagctggcagtctgccagccttcaccgtgcctcaagccgcagcccctgggagcaccacaccgtctgcaacaagcagctcttcctcgtgcagcacaccgaactcaccggaggattattatactagccttgataacgatctgaaaatcgaggtgattgagaaattgtttgcgatggatacagaggccaaggatcaatgctctacacagactgatttcaatgaactggacctggagacactagcaccgtacattcccatggatggagaggacttccaactgagtcctatctgtcccgaggagaggcttctggccgagaacccacagagtactcctcagcactgcttttccgccatgaccaatatttttcagcctctggcccctgtggcccctcactctccgttcctactggacaagtttcaacagcaactcgagtcaaaaaagaccgaaccagaacacaggcccatgtcttccattttttttgatgccggatctaaagcaagccttcctccctgctgcggacaggctagcactcctctgagctcaatggggggtcggtccaatacccagtggccaccggacccgccattgcactttggccctaccaagtgggctgtaggtgaccaacgaaccgagttcctgggagcagccccactggggcctccagtgtccccaccacacgtctcaacgtttaagacgcgaagtgctaagggatttggtgccagaggcccagatgtgctgtcccctgccatggtcgcactgagcaataagctgaagttaaagcgccagctggagtacgaagagcaggcgttccaggatctgtctggaggagatcccccaggcggttcaacgagtcacttaatgtggaaacgcatgaaaaacttacgaggcggaagttgtccccttatgccggacaaacctttatccgccaatgtccccaacgataagtttacgcagaaccctatgaggggactagggcatcctctccgccatctcccactgccccaaccaccttctgcaattagcccgggtgagaacagcaaatctcgtttcccaccccaatgctacgctacacagtatcaagattactctttatcctccgcacacaaggtgagcggaatggcttcccgtctactagggccttcatttgagagctatctgctgccggagctgacaagatacgactgtgaggtgaacgtgcccgttctaggtagctccacgctattgcagggaggtgacttgctccgggctttggaccaagctacttag

SEQ ID NO: 117734 - DNA, 780 bp, Artificial Sequence
  derived and/or modified sequence
atgactgcagacaaggaaaaaaaaagaagcagcagcgaacggagaaaagagaaaagcagggatgccgcacgctgtcgaaggagtaaggagacagaggtcttctatgagctggctcatgaactgcctctcccacatagcgtgtcctctcacctggacaaagcgagcattatgcgtttggcgatctcgtttctgcgaacccacaaattgttgagtagcgtgtgcagcgagaacgaatcagaagccgaagctgaccaacagatggataacctatacctcaaagcactggaggggttcattgcagtggtcacgcaagatggagacatgatttttttgtcagagaatataagtaagtttatggggctgacccaggtagaacttacgggccacagtatatttgattttacccacccctgtgatcacgaggagattcgcgaaaatctttctttgaagaatgggtccggctttggaaaaaaaagcaaagatatgagtacagagcgggacttcttcatgcgaatgaaatgcaccgtgacaaatcgaggacgcaccgtaaatctcaagtccgctacatggaaagtactacactgtacgggacaggttaaggtgtacaataattgtccacctcataacagtctttgcggttataaggagccattgctctcttgccttatcattatgtgtgagcccatccagcatccttcacatatggacataccacttgacagtaagactttcctcagcaggcacagtatggatatgaaatttacctattgtgacgactag

SEQ ID NO: 117735 - DNA, 2613 bp, Artificial Sequence
  derived and/or modified sequence
atgaccgccgacaaggagaagaagagaagcagcagcgagagaagaaaggagaagagcagagacgccgccagatgcagaagaagcaaggagaccgaggtgttctacgagctggcccacgagctgcccctgccccacagcgtgagcagccacctggacaaggccagcatcatgagactggccatcagcttcctgagaacccacaagctgctgagcagcgtgtgcagcgagaacgagagcgaggccgaggccgaccagcagatggacaacctgtacctgaaggccctggagggcttcatcgccgtggtgacccaggacggcgacatgatcttcctgagcgagaacatcagcaagttcatgggcctgacccaggtggagctgaccggccacagcatcttcgacttcacccacccctgcgaccacgaggagatcagagagaacctgagcctgaagaacggcagcggcttcggcaagaagagcaaggacatgagcaccgagagagacttcttcatgagaatgaagtgcaccgtgaccaacagaggcagaaccgtgaacctgaagagcgccacctggaaggtgctgcactgcaccggccaggtgaaggtgtacaacaactgccccccccacaacagcctgtgcggctacaaggagcccctgctgagctgcctgatcatcatgtgcgagcccatccagcaccccagccacatggacatccccctggacagcaagaccttcctgagcagacacagcatggacatgaagttcacctactgcgacgacagaatcaccgagctgatcggctaccaccccgaggagctgctgggcagaagcgcctacgagttctaccacgccctggacagcgagaacatgaccaagagccaccagaacctgtgcaccaagggccaggtggtgagcggccagtacagaatgctggccaagcacggcggctacgtgtggctggagacccagggcaccgtgatctacaaccccagaaacctgcagccccagtgcatcatgtgcgtgaactacgtgctgagcgagatcgagaagaacgacgtggtgttcagcatggaccagaccgagagcctgttcaagccccacctgatggccatgaacagcatcttcgacagcagcggcaagggcgccgtgagcgagaagagcaacttcctgttcaccaagctgaaggaggagcccgaggagctggcccagctggcccccacccccggcgacgccatcatcagcctggacttcggcaaccagaacttcgaggagagcagcgcctacggcaaggccatcctgccccccagccagccctgggccaccgagctgagaagccacagcacccagagcgaggccggcagcctgcccgccttcaccgtgccccaggccgccgcccccggcagcaccacccccagcgccaccagcagcagcagcagctgcagcacccccaacagccccgaggactactacaccagcctggacaacgacctgaagatcgaggtgatcgagaagctgttcgccatggacaccgaggccaaggaccagtgcagcacccagaccgacttcaacgagctggacctggagaccctggccccctacatccccatggacggcgaggacttccagctgagccccatctgccccgaggagagactgctggccgagaacccccagagcaccccccagcactgcttcagcgccatgaccaacatcttccagcccctggcccccgtggccccccacagccccttcctgctggacaagttccagcagcagctggagagcaagaagaccgagcccgagcacagacccatgagcagcatcttcttcgacgccggcagcaaggccagcctgcccccctgctgcggccaggccagcacccccctgagcagcatgggcggcagaagcaacacccagtggccccccgacccccccctgcacttcggccccaccaagtgggccgtgggcgaccagagaaccgagttcctgggcgccgcccccctgggcccccccgtgagccccccccacgtgagcaccttcaagaccagaagcgccaagggcttcggcgccagaggccccgacgtgctgagccccgccatggtggccctgagcaacaagctgaagctgaagagacagctggagtacgaggagcaggccttccaggacctgagcggcggcgacccccccggcggcagcaccagccacctgatgtggaagagaatgaagaacctgagaggcggcagctgccccctgatgcccgacaagcccctgagcgccaacgtgcccaacgacaagttcacccagaaccccatgagaggcctgggccaccccctgagacacctgcccctgccccagccccccagcgccatcagccccggcgagaacagcaagagcagattccccccccagtgctacgccacccagtaccaggactacagcctgagcagcgcccacaaggtgagcggcatggccagcagactgctgggccccagcttcgagagctacctgctgcccgagctgaccagatacgactgcgaggtgaacgtgcccgtgctgggcagcagcaccctgctgcagggcggcgacctgctgagagccctggaccaggccacctag

SEQ ID NO: 117736 - DNA, 780 bp, Artificial Sequence
  derived and/or modified sequence
atgaccgccgacaaggagaagaagagaagcagcagcgagagaagaaaggagaagagcagagacgccgccagatgcagaagaagcaaggagaccgaggtgttctacgagctggcccacgagctgcccctgccccacagcgtgagcagccacctggacaaggccagcatcatgagactggccatcagcttcctgagaacccacaagctgctgagcagcgtgtgcagcgagaacgagagcgaggccgaggccgaccagcagatggacaacctgtacctgaaggccctggagggcttcatcgccgtggtgacccaggacggcgacatgatcttcctgagcgagaacatcagcaagttcatgggcctgacccaggtggagctgaccggccacagcatcttcgacttcacccacccctgcgaccacgaggagatcagagagaacctgagcctgaagaacggcagcggcttcggcaagaagagcaaggacatgagcaccgagagagacttcttcatgagaatgaagtgcaccgtgaccaacagaggcagaaccgtgaacctgaagagcgccacctggaaggtgctgcactgcaccggccaggtgaaggtgtacaacaactgccccccccacaacagcctgtgcggctacaaggagcccctgctgagctgcctgatcatcatgtgcgagcccatccagcaccccagccacatggacatccccctggacagcaagaccttcctgagcagacacagcatggacatgaagttcacctactgcgacgactag

SEQ ID NO: 117737 - DNA, 5160 bp, Artificial Sequence
  derived and/or modified sequence
gctttacactcgcgagcggaccgccacacgggtccggtgcccgctgcgcttccgccccagcgctcctgaggcggccgtacaatcctcggcagtgtcctgagactgtatggtcagctcagcccggcctccgactccttccgactcccagcattcgagccacttttttttttctttgaaaactcagaaaagtgactccttttccagggaaaaaggaacttgggttcccttctctccgtcctcttttcgggtctgacagcctccacccactccttccccggaccccgcctccgcgcgcaggttcctcccagtcacctttctccacccccgcccccgcacctagcccgccgcgcgccaccttccacctgactgcgcggggcgctcgggacctgcgcgcacctcggaccttcaccacccgcccgggccgcggggagcggacgagggccacagccccccacccgccagggagcccaggtgctcggcgtctgaacgtctcaaagggccacagcgacaatgacagctgacaaggagaagaaaaggagtagctcggagaggaggaaggagaagtcccgggatgctgcgcggtgccggcggagcaaggagacggaggtgttctatgagctggcccatgagctgcctctgccccacagtgtgagctcccatctggacaaggcctccatcatgcgactggcaatcagcttcctgcgaacacacaagctcctctcctcagtttgctctgaaaacgagtccgaagccgaagctgaccagcagatggacaacttgtacctgaaagccttggagggtttcattgccgtggtgacccaagatggcgacatgatctttctgtcagaaaacatcagcaagttcatgggacttacacaggtggagctaacaggacatagtatctttgacttcactcatccctgcgaccatgaggagattcgtgagaacctgagtctcaaaaatggctctggttttgggaaaaaaagcaaagacatgtccacagagcgggacttcttcatgaggatgaagtgcacggtcaccaacagaggccgtactgtcaacctcaagtcagccacctggaaggtcttgcactgcacgggccaggtgaaagtctacaacaactgccctcctcacaatagtctgtgtggctacaaggagcccctgctgtcctgcctcatcatcatgtgtgaaccaatccagcacccatcccacatggacatccccctggatagcaagaccttcctgagccgccacagcatggacatgaagttcacctactgtgatgacagaatcacagaactgattggttaccaccctgaggagctgcttggccgctcagcctatgaattctaccatgcgctagactccgagaacatgaccaagagtcaccagaacttgtgcaccaagggtcaggtagtaagtggccagtaccggatgctcgcaaagcatgggggctacgtgtggctggagacccaggggacggtcatctacaaccctcgcaacctgcagccccagtgcatcatgtgtgtcaactacgtcctgagtgagattgagaagaatgacgtggtgttctccatggaccagactgaatccctgttcaagccccacctgatggccatgaacagcatctttgatagcagtggcaagggggctgtgtctgagaagagtaacttcctattcaccaagctaaaggaggagcccgaggagctggcccagctggctcccaccccaggagacgccatcatctctctggatttcgggaatcagaacttcgaggagtcctcagcctatggcaaggccatcctgcccccgagccagccatgggccacggagttgaggagccacagcacccagagcgaggctgggagcctgcctgccttcaccgtgccccaggcagctgccccgggcagcaccacccccagtgccaccagcagcagcagcagctgctccacgcccaatagccctgaagactattacacatctttggataacgacctgaagattgaagtgattgagaagctcttcgccatggacacagaggccaaggaccaatgcagtacccagacggatttcaatgagctggacttggagacactggcaccctatatccccatggacggggaagacttccagctaagccccatctgccccgaggagcggctcttggcggagaacccacagtccaccccccagcactgcttcagtgccatgacaaacatcttccagccactggcccctgtagccccgcacagtcccttcctcctggacaagtttcagcagcagctggagagcaagaagacagagcccgagcaccggcccatgtcctccatcttctttgatgccggaagcaaagcatccctgccaccgtgctgtggccaggccagcacccctctctcttccatggggggcagatccaatacccagtggcccccagatccaccattacattttgggcccacaaagtgggccgtcggggatcagcgcacagagttcttgggagcagcgccgttggggccccctgtctctccaccccatgtctccaccttcaagacaaggtctgcaaagggttttggggctcgaggcccagacgtgctgagtccggccatggtagccctctccaacaagctgaagctgaagcgacagctggagtatgaagagcaagccttccaggacctgagcgggggggacccacctggtggcagcacctcacatttgatgtggaaacggatgaagaacctcaggggtgggagctgccctttgatgccggacaagccactgagcgcaaatgtacccaatgataagttcacccaaaaccccatgaggggcctgggccatcccctgagacatctgccgctgccacagcctccatctgccatcagtcccggggagaacagcaagagcaggttccccccacagtgctacgccacccagtaccaggactacagcctgtcgtcagcccacaaggtgtcaggcatggcaagccggctgctcgggccctcatttgagtcctacctgctgcccgaactgaccagatatgactgtgaggtgaacgtgcccgtgctgggaagctccacgctcctgcaaggaggggacctcctcagagccctggaccaggccacctgagccaggccttctacctgggcagcacctctgccgacgccgtcccaccagcttcactctctccgtctgtttttgcaactaggtatttctaacgccagcacactatttacaagatggacttacctggcagacttgcccaggtcaccaagcagtggcctttttctgagatgctcactttattatccctatttttaaagtacacaattgttttacctgttctgaaatgttcttaaattttgtaggatttttttcctccccaccttcaatgacttctaatttatattatccataggtttctctccctccttctccttctcacacacaactgtccatactaacaagtttggtgcatgtctgttcttctgtagggagaagctttagcttcattttactaaaaagattcctcgttattgttgttgccaaagagaaacaaaaatgattttgctttccaagcttggtttgtggcgtctccctcgcagagcccttctcgtttcttttttaaactaatcaccatattgtaaatttcagggtttttttttttttgtttaagctgactctttgctctaattttggaaaaaaagaaatgtgaagggtcaactccaacgtatgtggttatctgtgaaagttgcacagcgtggcttttcctaaactggtgtttttcccccgcatttggtggattttttattattattcaaaaacataactgagttttttaaaagaggagaaaatttatatctgggttaagtgtttatcatatatatgggtactttgtaatatctaaaaacttagaaacggaaatggaatcctgctcacaaaatcactttaagatcttttcgaagctgttaatttttcttagtgttgtggacactgcagacttgtccagtgctcccacggcctgtacggacactgtggaaggcctccctctgtcggctttttgccatctgtgatatgccataggtgtgacaatccgagcagtggagtcattcagcgggagcactgcgcgctatcccctcacattctctatgtactatgtatgtatgtattattattattgctgccaagagggtctgatggcacgttgtggggtcggggggtggggcggggaagtgctctaacttttcttaaggttttgttgctagcccttcaagtgcactgagctatgtgactcggatggtctttcacacggcacatttggacatttccagaactaccatgagatggtttagacgggaattcatgcaaatgaggggtcaaaaatggtatagtgaccccgtccacgtcctccaagctcacgaccttggagccccgtggagctggactgaggaggaggctgcacagcgggagagcagctggtccagaccagccctgcagcccccactcagccggcagccagatggccccgcaaggcctccagggatggcccctagccacaggccctggctgaggtctctgggtcggtcagtgacatgtaggtaggaagcactgaaaatagtgttcccagagcactttgcaactccctgggtaagagggacgacacctctggtttttcaataccaattacatggaacttttctgtaatgggtacaatgaagaagtttctaaaaacacacacaaagcacattgggccaactatttagtaagcccggatagacttattgccaaaaacaaaaaatagctttcaaaagaaatttaagttctatgagaaattccttagtcatggtgttgcgtaaatcatattttagctgcacggcattaccccacacagggtggcagaacttgaagggttactgacgtgtaaatgctggtatttgatttcctgtgtgtgttgccctggcattaagggcattttacccttgcagttttactaaaacactgaaaaatattccaagcttcatattaaccctacctgtcaacgtaacgatttcatgaacgttattatattgtcgaattcctactgacaacattataactgtatgggagcttaactttataaggaaatgtattttgacactggtatcttattaaagtattctgatccta

SEQ ID NO: 117738 - DNA, 1067 bp, Artificial Sequence
  derived and/or modified sequence
agatcacactggggaaccagactgacttctccaattctgaactcgccccggcctcgggcggctcaaagggcctcctctgccgcatccccgccaaaaccaaaccgcctggcacaagccgcccgccgcgcgccaccttccacctgactgcgcggggcgctcgggacctgcgcgcacctcggaccttcaccacccgcccgggccgcggggagcggacgagggccacagccccccacccgccagggagcccaggtgctcggcgtctgaacgtctcaaagggccacagcgacaatgacagctgacaaggagaagaaaaggagtagctcggagaggaggaaggagaagtcccgggatgctgcgcggtgccggcggagcaaggagacggaggtgttctatgagctggcccatgagctgcctctgccccacagtgtgagctcccatctggacaaggcctccatcatgcgactggcaatcagcttcctgcgaacacacaagctcctctcctcagtttgctctgaaaacgagtccgaagccgaagctgaccagcagatggacaacttgtacctgaaagccttggagggtttcattgccgtggtgacccaagatggcgacatgatctttctgtcagaaaacatcagcaagttcatgggacttacacaggtggagctaacaggacatagtatctttgacttcactcatccctgcgaccatgaggagattcgtgagaacctgagtctcaaaaatggctctggttttgggaaaaaaagcaaagacatgtccacagagcgggacttcttcatgaggatgaagtgcacggtcaccaacagaggccgtactgtcaacctcaagtcagccacctggaaggtcttgcactgcacgggccaggtgaaagtctacaacaactgccctcctcacaatagtctgtgtggctacaaggagcccctgctgtcctgcctcatcatcatgtgtgaaccaatccagcacccatcccacatggacatccccctggatagcaagaccttcctgagccgccacagcatggacatgaagttcacctactgtgatgacag

SEQ ID NO: 117739 - protein, 1005 aa, Artificial Sequence
  derived and/or modified sequence
MTTEVGSVSEVKKDSSQLGTDATKEKPKEVAENQQNQSSDPEEEKGSQPPPAAESQSSLRRQKREKETSESRGISRFIPPWLKKQKSYTLVVAKDGGDKKEPTQAVVEEQVLDKEEPLPEEQRQAKGDAEEMAQKKQEIKVEVKEEKPSVSKEEKPSVSKVEMQPTELVSKEREEKVKETQEDKLEGGAAKRETKEVQTNELKAEKASQKVTKKTKTVQCKVTLLDGTEYSCDLEKHAKGQVLFDKVCEHLNLLEKDYFGLLFQESPEQKNWLDPAKEIKRQLRNLPWLFTFNVKFYPPDPSQLTEDITRYFLCLQLRQDIASGRLPCSFVTHALLGSYTLQAELGDYDPEEHGSIDLSEFQFAPTQTKELEEKVAELHKTHRGLSPAQADSQFLENAKRLSMYGVDLHHAKDSEGVDIKLGVCANGLLIYKDRLRINRFAWPKILKISYKRSNFYIKVRPAELEQFESTIGFKLPNHRAAKRLWKVCVEHHTFYRLVSPEQPPKAKFLTLGSKFRYSGRTQAQTRQASTLIDRPAPHFERTSSKRVSRSLDGAPIGVMDQSLMKDFPGAAGEISAYGPGLVSIAVVQDGDGRREVRSPTKAPHLQLIEGKKNSLRVEGDNIYVRHSNLMLEELDKAQEDILKHQASISELKRNFMESTPEPRPNEWEKRRITPLSLQTQGSSHETLNIVEEKKRAEVGKDERVITEEMNGKEISPGSGPGEIRKVEPVTQKDSTSLSSESSSSSSESEEEDVGEYRPHHRVTEGTIREEQEYEEEVEEEPRPAAKVVEREEAVPEASPVTQAGASVITVETVIQENVGAQKIPGEKSVHEGALKQDMGEEAEEEPQKVNGEVSHVDIDVLPQIICCSEPPVVKTEMVTISDASQRTEISTKEVPIVQTETKTITYESPQIDGGAGGDSGTLLTAQTITSESVSTTTTTHITKTVKGGISETRIEKRIVITGDGDIDHDQALAQAIREAREQHPDMSVTRVVVHKETELAEEGED

SEQ ID NO: 117740 - protein, 383 aa, Artificial Sequence
  derived and/or modified sequence
MEEEETQLEEELDKAQEDILKHQASISELKRNFMESTPEPRPNEWEKRRITPLSLQTQGSSHETLNIVEEKKRAEVGKDERVITEEMNGKEISPGSGPGEIRKVEPVTQKDSTSLSSESSSSSSESEEEDVGEYRPHHRVTEGTIREEQEYEEEVEEEPRPAAKVVEREEAVPEASPVTQAGASVITVETVIQENVGAQKIPGEKSVHEGALKQDMGEEAEEEPQKVNGEVSHVDIDVLPQIICCSEPPVVKTEMVTISDASQRTEISTKEVPIVQTETKTITYESPQIDGGAGGDSGTLLTAQTITSESVSTTTTTHITKTVKGGISETRIEKRIVITGDGDIDHDQALAQAIREAREQHPDMSVTRVVVHKETELAEEGED

SEQ ID NO: 117741 - DNA, 3018 bp, Artificial Sequence
  derived and/or modified sequence
atgacaactgaggtcggctctgtgagcgaagtgaaaaaggattcatctcagttaggcacagatgcaaccaaggaaaagccgaaggaggtcgccgaaaatcagcaaaaccaaagcagtgaccccgaggaagaaaagggtagtcagcctccacccgcagccgaaagtcaatcaagcctcaggaggcagaagcgggagaaggagaccagtgagagccgcggcatttccaggtttattccaccgtggctgaagaaacagaagagttacaccctcgttgtagcaaaggatggaggcgacaaaaaagaacccacacaggccgtggtggaggaacaggtcttggataaagaggagcccctgcctgaagaacaacgacaggccaaaggcgatgccgaggaaatggcccagaaaaagcaggagatcaaagtcgaagtgaaagaagagaagcccagtgtctccaaggaagagaaaccatccgtaagtaaggtcgagatgcagcctacagaactggttagtaaggaaagagaagagaaggtaaaggaaacccaagaggacaaactggagggcggcgcggctaagagagaaactaaggaagttcagacaaacgagcttaaggccgagaaggcaagccagaaggtgacaaagaaaacaaagacagttcaatgtaaggtcaccctgctggatggaaccgagtattcgtgtgacctggagaaacatgccaaaggccaggtgctcttcgacaaagtctgtgaacacctgaacctgttggagaaagactatttcggcctgctttttcaggagtccccagagcagaaaaattggcttgaccccgccaaagagattaagagacagctcaggaacctcccatggctgttcacctttaatgtgaagttctatccgcctgatccctcgcagttgactgaagacattacgcgatactttctctgcctccagttgcggcaggatatcgctagtggcaggctgccctgctccttcgtgactcatgcactcctcggtagttataccctacaggctgagcttggggactatgatcccgaggagcacggtagcattgacctctccgagttccaattcgcaccaacccaaacgaaggagctggaagagaaagttgcggagcttcataagactcaccgaggcttgagtcccgcacaggccgactcccagtttctggaaaacgcaaaaaggctcagcatgtatggcgtggatctccaccacgccaaggatagtgagggagtggatatcaaactcggcgtgtgcgcaaacggattactgatatacaaagataggctgcgaattaaccgctttgcatggcccaaaattctgaagatctcatataaacgcagcaacttttatatcaaagtacgtcccgcagaactggagcagttcgagagtaccattgggtttaagctaccgaaccatcgcgccgcaaaaagactgtggaaggtttgtgtcgaacaccatactttttaccgccttgtgtcgcccgagcagcctccaaaggccaagttcctgacactgggcagtaagtttaggtactcgggtcgcactcaggctcagactcgacaggcatccactttgatagatcggcctgccccccactttgaacgaacctcatctaagagagtcagtaggagcctggatggagcgccaatcggcgtcatggaccagtcgctcatgaaagactttccgggagcggcaggggaaattagtgcctacggacctggcctcgtatccatagcagtggtccaagacggggatggacgaagagaggtaagatccccaacgaaggcaccacacctgcagctaatcgaagggaaaaagaatagccttcgggtggagggcgataatatctatgtgcgacattcaaatctgatgctagaagagctggacaaagcacaggaagacatcctaaagcaccaggccagtatatcagagttgaagagaaactttatggaatcaacccccgaaccgaggcctaatgaatgggagaaacggaggattacccccctatctttacaaacacaaggctccagtcacgagaccctgaatattgtcgaagagaagaaaagagctgaagtcgggaaggatgaaagagtcattaccgaggagatgaatggcaaagagatatcaccgggatccggtcctggggagatcagaaaagtggagcccgtgacccagaaagattccacctctctgagttctgagagctcctcatcgtccagcgagtccgaggaagaagatgttggggaataccgaccgcatcacagggtcaccgaagggactattagggaggaacaagagtatgaggaagaggtggaggaggagcccaggcccgcggctaaggtggtggagagggaggaagccgtgccggaggctagtcctgtcacacaggccggagcaagtgtcatcaccgttgaaaccgtcattcaggaaaacgtgggggcacagaagattcctggagagaagagcgtgcatgagggggcactgaaacaggatatgggtgaagaggctgaggaggaaccacagaaggttaatggtgaagtgtcacacgtcgacatagacgtgctgccacagattatctgctgcagcgagccccccgtcgttaaaactgaaatggttactatcagcgatgcctctcagcgtaccgagatctctactaaggaggttcccattgtccagaccgaaaccaaaactataacctatgaatcaccccagatcgatggaggggcgggaggagatagtgggactctcttaaccgcccagactattacctccgaatccgtatccaccacgaccactacgcacataaccaagaccgttaaaggggggatcagcgagacgaggattgaaaaaagaatcgttattacaggagacggcgatatcgaccacgaccaggctctggcccaagccatccgggaggcacgggagcagcatcccgacatgagtgtcacccgcgttgtggttcataaggaaactgagctggccgaggagggcgaggactag

SEQ ID NO: 117742 - DNA, 3018 bp, Artificial Sequence
  derived and/or modified sequence
atgaccactgaagtagggtcagtttctgaagtgaaaaaagattccagccagctcgggacagatgccaccaaagagaaacctaaggaggttgccgagaaccagcaaaatcaaagcagcgaccctgaggaggagaaaggctctcagcccccccctgccgccgaatcgcagagtagtctgaggcgccagaagagagagaaagagacctctgagagccggggaatctctagattcatacccccctggctaaaaaagcagaagtcctacacacttgtggtagcaaaggacggcggcgataagaaggagcctactcaggctgtcgtggaggaacaggtgctggataaggaggagcccctgccagaggagcagaggcaggcgaagggggacgccgaggagatggcccaaaaaaagcaggaaatcaaggtggaggtgaaggaggagaaaccttcggttagtaaagaagaaaagcctagtgtctcgaaagtggaaatgcagccaaccgagctggtgagcaaagaacgtgaagagaaagtaaaagagactcaggaggacaaactcgagggcggagcagccaagcgggagaccaaggaagttcagacaaatgagcttaaagcagaaaaagcgtcccaaaaagtgactaagaaaacaaaaacagtgcagtgtaaagtcacactgctcgacgggacagaatattcttgcgacctcgaaaagcacgccaaaggacaggtcctgtttgataaagtgtgcgaacatctgaaccttttagaaaaagactactttggcctgctcttccaagagtcccccgagcaaaagaattggctggaccctgcaaaggaaatcaagcgccagttgaggaacctgccttggctgttcacctttaatgtgaagttctacccccccgacccttcacagctgactgaggacattacccgttatttcctgtgtctgcaactccggcaggatattgcctctggacgcctcccatgtagctttgttacccacgccttactcggaagctacacattacaggcagagctgggcgactatgatcctgaggagcacggatccatcgatctctccgaatttcagttcgctcccacccagacaaaagagctggaggaaaaagtggcggaactccacaagacccatcgtgggctgtcccctgcccaagcagacagtcaattcctcgaaaacgcaaagcgactcagtatgtatggggtagacttgcaccacgctaaggattctgaaggtgtggacatcaagctcggggtctgtgccaacggcctcctgatttataaagatagacttcgaataaatcggtttgcttggccaaaaatacttaagatttcctacaaacggtcaaatttttatattaaggtgcgcccagcagagttggaacagtttgaatcaaccatagggttcaagctgccgaatcatagggccgccaagagactgtggaaagtgtgcgtggagcaccacaccttctatcggctagtgtctcctgaacagccacctaaagcgaaatttttaaccctgggaagcaaattcaggtatagcggccggacccaggcccagacccgacaggcttctacactcattgaccggcccgcgccccacttcgagcgcacttcctccaaacgagtgagcagatcgctggatggcgcccctatcggggtgatggaccagtcactcatgaaggatttccctggcgccgcgggtgaaatctccgcatatgggccaggactggttagcatagcggtcgtgcaggacggtgatggaaggcgagaggtgaggtccccaacaaaagcccctcacttacagctgattgaggggaagaaaaactccttgcgggtcgagggggataatatatatgtgaggcattccaatttaatgttggaggaactggacaaagctcaggaggacatactcaagcaccaggcgagtattagcgaactcaaaagaaattttatggagtccacacctgaacccaggccaaatgagtgggagaaaaggagaatcacccctctctctctccaaactcaaggcagctctcatgaaacactgaacattgttgaagaaaaaaagagggcagaggtggggaaagacgagcgagtaatcaccgaagagatgaacggcaaggaaattagccccggcagcggccccggggagatacggaaagttgaaccagtaacgcagaaggattcgacttcactcagcagcgaatcaagttcctcaagcagtgagagtgaggaggaagacgtcggggagtaccggccccaccacagggtaacagaaggcactatccgcgaagagcaagagtatgaggaagaggtcgaagaagagccgcgccctgctgctaaagtggtcgagcgggaggaggcggttccagaggcctctccagtgacgcaggcgggagcctccgtcatcacagttgaaaccgttattcaggagaatgtgggggcccagaagattccaggagagaaatcagtccacgagggtgcactgaagcaggacatgggcgaggaagcagaggaggaaccgcagaaagtgaatggggaagtttcccatgtagatattgatgtcctgccccagattatttgctgctcggaaccccctgtggtgaagacagagatggtcacgattagcgacgcctctcaaaggaccgaaatatcaacgaaagaagtgcccatcgtacagacggaaaccaagacgattacatatgagagcccacagatcgacggaggagctggcggagacagtggaacactactgacagctcaaactattacttcagagagtgtgagtacaactacaacaactcacattactaaaaccgtcaaggggggaatttctgaaacccgcattgagaaaaggattgtcatcacaggagacggagacattgatcatgaccaggcactcgcccaggcaatccgggaggctagggaacagcacccagacatgtctgtgactcgggtagtcgtccacaaggaaactgagctggccgaggaaggcgaggattag

SEQ ID NO: 117743 - DNA, 1152 bp, Artificial Sequence
  derived and/or modified sequence
atggaagaagaggaaacacagcttgaagaggagctagacaaggcacaggaggacattctaaaacatcaggcatcaatatctgagctcaaacgaaactttatggagtcgactccggagccccggcctaatgaatgggaaaaacgccggattacccctctctcactccagacccaaggaagtagccatgaaactctcaatatcgtcgaagagaaaaagcgagctgaagtcggcaaggatgaacgtgtgataacagaggaaatgaacgggaaggagatatccccaggatcaggcccaggtgaaatccgcaaggtcgagcccgtgacacaaaaggattcaacttctctatcttcagagtcatcttcatcgagctcggagtccgaagaagaagatgtgggggagtatcggccccaccaccgagtcactgagggtaccattcgggaagagcaagagtatgaggaagaggtggaggaggaacctagaccagcagcaaaagtggtggagcgggaagaagcagtgcccgaggccagtcccgttacccaagcaggtgcaagcgtaatcacagttgaaacagtcatccaagagaacgtcggagcacagaagatcccaggagaaaagtctgtgcacgagggcgcactgaaacaggatatgggcgaggaagcggaagaggaaccacaaaaggtcaatggagaggtaagtcacgtggatatagacgttctcccacagattatttgctgtagtgagccacccgtggtcaagacggagatggtgacaattagcgacgcttcccagaggacagaaatctccacaaaggaagtgcccattgtacagacagaaactaagacaattacctacgagagcccccaaattgacggtggggctggcggtgattctggcacactgcttaccgcacagactatcacatctgaaagcgtatcgacaactacgaccactcatattacgaagactgtgaagggcggaatttccgagacccggatcgagaagcggattgtcattacaggagatggggatatagatcatgatcaggccttagcccaggccatccgcgaggcgagggagcagcatcctgacatgagtgtcactagggtggttgtgcacaaggaaacagaactggccgaggagggcgaggactag

SEQ ID NO: 117744 - DNA, 3018 bp, Artificial Sequence
  derived and/or modified sequence
atgaccacagaggtgggctctgtgtctgaggtgaagaaggacagcagccagctgggcacagatgccaccaaggagaagcccaaggaggtggccgagaaccagcagaaccagagcagtgaccctgaggaggagaagggcagccagcccccacctgctgctgagagccagagcagcctgcggcggcagaagcgggagaaggagaccagcgagagccggggcatcagccgcttcatccccccctggctgaagaagcagaagagctacaccctggtggtggccaaggatggaggagacaagaaggagcccacccaggccgtggtggaggagcaggtgctggacaaggaggagcccctgcctgaggagcagaggcaggccaagggagatgctgaggagatggcccagaagaagcaggagatcaaggtggaggtgaaggaggagaagcccagcgtgtccaaggaggagaagcccagcgtgtccaaggtggagatgcagcccacagagctggtgtccaaggagcgggaggagaaggtgaaggagacccaggaggacaagctggagggcggggccgccaagcgggagaccaaggaggtgcagaccaatgagctgaaggccgagaaggccagccagaaggtgaccaagaagaccaagacagtgcagtgcaaggtgaccctgctggatggaacagagtacagctgtgacctggagaagcacgccaagggccaggtgctgtttgacaaggtgtgtgagcacctgaacctgctggagaaggactacttcggcctgctcttccaggagagccctgagcagaagaactggctggaccctgccaaggagatcaagaggcagctgaggaacctgccctggctgttcaccttcaacgtgaagttctaccccccagaccccagccagctgacagaggacatcacccgctacttcctgtgcctgcagctgcggcaggacatcgccagcggccgcctgccctgcagctttgtgacccacgccctgctgggcagctacaccctgcaggccgagctgggggactatgaccctgaggagcacggcagcattgacctgtctgagttccagtttgcccccacccagaccaaggagctggaggagaaggtggccgagctgcacaagacccaccggggcctgagccctgcccaggccgacagccagttcctggagaatgccaagaggctgtccatgtatggagtggacctgcaccacgccaaggacagcgagggcgtggacatcaagctgggcgtgtgtgccaacggcctgctgatctacaaggaccggctgcgcatcaacagatttgcctggcccaagatcctgaagatctcctacaagaggagcaacttctacatcaaggtgcggcctgctgagctggagcagtttgagagcaccatcggcttcaagctgcccaaccaccgggccgccaagaggctgtggaaggtgtgtgtggagcaccacaccttctaccgcctggtgtccccagagcagccccccaaggccaagttcctgaccctgggcagcaagttccgctacagcggccgcacccaggcccagacccggcaggccagcaccctgattgacaggcctgccccccactttgagaggaccagcagcaagagggtgagccgcagcctggatggagcccccatcggcgtgatggaccagagcctgatgaaggacttccctggagctgctggggagatcagcgcctacggccctggcctggtgtccattgctgtggtgcaggatggagatggaagaagagaggtgcgcagccccaccaaggccccccacctgcagctgattgagggcaagaagaacagcctgcgggtggagggggacaacatctacgtgcgccacagcaacctgatgctggaggagctggacaaggcccaggaggacatcctgaagcaccaggccagcatcagcgagctgaagaggaacttcatggagagcaccccagagccccggcccaatgagtgggagaagaggcgcatcacccccctgagcctgcagacccagggcagcagccatgagaccctgaacatcgtggaggagaagaagagagctgaggtgggcaaggatgagagggtcatcacagaggagatgaatggcaaggagatcagccctggcagcggccctggagagatcaggaaggtggagcctgtgacccagaaggacagcaccagcctgagcagcgagagcagcagcagcagcagcgagagcgaggaggaggatgtgggggagtaccggccccaccaccgggtgacagagggcaccatccgggaggagcaggagtatgaggaggaggtggaggaggagcccaggcctgctgccaaggtggtggagcgggaggaggccgtgcctgaggccagccctgtgacccaggccggggccagcgtcatcaccgtggagaccgtcatccaggagaatgtgggcgcccagaagatccctggagagaagtctgtgcatgagggcgccctgaagcaggacatgggagaggaggccgaggaggagccccagaaggtgaatggagaggtgagccacgtggacattgatgtgctgccccagatcatctgctgcagcgagccccctgtggtgaagacagagatggtgaccatcagtgatgccagccagaggacagagatcagcaccaaggaggtgcccatcgtgcagacagagaccaagaccatcacctatgagagcccccagattgatggaggagctggaggagacagcggcaccctgctgacagcccagaccatcaccagcgagagcgtgtccaccaccaccaccacccacatcaccaagacagtgaagggcggcatcagcgagacccgcatcgagaagagaattgtcatcactggagatggagacatcgaccatgaccaggccctggcccaggccatccgggaggcccgggagcagcacccagacatgtctgtgaccagggtggtggtgcacaaggagacagagctggccgaggagggggaggactag

SEQ ID NO: 117745 - DNA, 1152 bp, Artificial Sequence
  derived and/or modified sequence
atggaggaggaggagacccagctggaggaggagctggacaaggcccaggaggacatcctgaagcaccaggccagcatcagcgagctgaagaggaacttcatggagagcaccccagagccccggcccaatgagtgggagaagaggcgcatcacccccctgagcctgcagacccagggcagcagccatgagaccctgaacatcgtggaggagaagaagagagctgaggtgggcaaggatgagagggtcatcacagaggagatgaatggcaaggagatcagccctggcagcggccctggagagatcaggaaggtggagcctgtgacccagaaggacagcaccagcctgagcagcgagagcagcagcagcagcagcgagagcgaggaggaggatgtgggggagtaccggccccaccaccgggtgacagagggcaccatccgggaggagcaggagtatgaggaggaggtggaggaggagcccaggcctgctgccaaggtggtggagcgggaggaggccgtgcctgaggccagccctgtgacccaggccggggccagcgtcatcaccgtggagaccgtcatccaggagaatgtgggcgcccagaagatccctggagagaagtctgtgcatgagggcgccctgaagcaggacatgggagaggaggccgaggaggagccccagaaggtgaatggagaggtgagccacgtggacattgatgtgctgccccagatcatctgctgcagcgagccccctgtggtgaagacagagatggtgaccatcagtgatgccagccagaggacagagatcagcaccaaggaggtgcccatcgtgcagacagagaccaagaccatcacctatgagagcccccagattgatggaggagctggaggagacagcggcaccctgctgacagcccagaccatcaccagcgagagcgtgtccaccaccaccaccacccacatcaccaagacagtgaagggcggcatcagcgagacccgcatcgagaagagaattgtcatcactggagatggagacatcgaccatgaccaggccctggcccaggccatccgggaggcccgggagcagcacccagacatgtctgtgaccagggtggtggtgcacaaggagacagagctggccgaggagggggaggactag

SEQ ID NO: 117746 - DNA, 3018 bp, Artificial Sequence
  derived and/or modified sequence
atgaccaccgaggtgggcagcgtgagcgaggtgaagaaggacagctctcagctgggcacagatgctacaaaggagaagcccaaggaggtcgccgagaaccaacaaaaccagagtagcgatcctgaggaggaaaagggcagccaacctcctcccgctgccgagtctcagagctcactgaggagacagaaaagggagaaagaaacatccgagtctcgagggatctccaggttcatccccccttggctcaagaagcagaagtcctatactttggtggttgccaaagatggcggggataaaaaagagcctactcaagctgtggttgaggagcaggtgctggacaaggaagagcctctccctgaggagcaacgtcaagcaaaaggcgatgccgaggagatggcccaaaagaaacaagagattaaagttgaggtcaaggaggaaaagccaagtgtgagcaaagaagaaaagcccagcgtctccaaggttgagatgcagccaacggagttggtcagtaaggaacgagaagagaaggttaaggaaacacaggaggacaagctcgagggtggcgcagctaagcgcgagactaaggaagtgcagactaatgaactgaaagccgaaaaagcttctcagaaagtgacgaagaagactaaaacagtacagtgcaaagtgacattgctggacgggacagagtactcatgcgacctcgagaaacacgccaagggacaggttcttttcgacaaagtttgcgagcacttgaacctcttggagaaggactacttcgggcttcttttccaggaatcccctgagcagaaaaattggcttgatccagctaaagagatcaagcgccagctacgaaacctcccctggttatttacctttaatgtcaagttctaccccccagacccatctcaattgactgaagacatcaccagatacttcctctgcctccagctgagacaggacatagccagcggaagacttccctgttcctttgtcacacacgctctcttgggctcctacacactccaggctgaactcggagattatgaccccgaggagcatggaagcatcgatttgtccgaatttcagttcgccccgacacagaccaaagagctggaagaaaaagtggccgaattgcataagacacatcgaggactgagtcctgctcaggccgatagtcaatttctggagaacgcaaaaagactttcaatgtacggcgttgatctccatcacgcaaaagactctgagggcgtagacattaagctcggggtgtgtgccaatggattactcatctacaaggaccgcctgagaatcaaccgattcgcctggcccaaaatcctgaaaatcagctacaagcggtcaaatttctatataaaggtgaggccagccgagctggagcagtttgaatctactatcggatttaaattgccaaatcaccgcgccgctaaacgactatggaaggtgtgtgtcgaacatcatactttctatagactggtctcaccggagcaacctcctaaagccaagtttttgaccttgggttcaaagttcaggtactccggcagaacccaagcacaaacgaggcaagcttcaacactcatcgatcggcccgcaccacatttcgaacgaacctcgagcaagcgtgtgtcgagatccttggatggcgctcctattggcgtcatggaccaaagcctaatgaaagattttccaggggccgcgggcgaaatatccgcatatggcccagggcttgtgtctatcgcagtagtgcaggatggggatggacggcgggaggtgagatcgcccactaaggcaccccatctccagcttatcgagggaaaaaagaatagtctgagggtggagggtgacaatatttacgtccgtcatagtaatcttatgctcgaggagctggacaaagcgcaggaggacatcctcaagcatcaagccagtatttctgagctgaaaagaaacttcatggagtctactccagaacccaggccaaacgagtgggagaagcgacggatcacacccctgtctcttcaaactcagggatccagccatgagactttaaacattgtggaggaaaagaagagggccgaggtgggtaaagatgagcgagttatcacagaggaaatgaatgggaaggagattagccccggatccggaccgggtgaaattaggaaggtggagccagtgacccaaaaagactccacaagtctttcctcggaatcttcaagcagcagtagcgagtctgaagaggaagatgttggagaatacagacctcatcatagagtcaccgaaggcaccatcagagaggaacaagagtacgaggaagaggtggaagaggaacccagacccgctgctaaggtggtggagcgggaagaggcggtccctgaagcaagcccagtgacccaggcgggagcttccgtgataaccgtcgagactgttatccaggagaatgtcggggcacaaaagatcccaggggaaaaaagcgtacatgaaggagcactcaagcaggatatgggggaggaagcagaggaagagccccagaaggtgaatggagaagtctcacatgtagatatcgatgtgctaccgcagatcatttgctgctccgaaccccccgtggtcaaaacagagatggtaacaattagcgacgctagccaacgcaccgaaatcagtacaaaagaggtgcctatagtccagacagaaacaaagacgataacttatgagtctcctcagatcgacggtggagcgggtggggatagcggcacactgctgaccgcccagaccatcacgtctgagtcagtgagcaccacaaccactacacacatcaccaagaccgttaaaggcggaatcagcgagacccgaatagaaaagcgcattgtgattacaggtgacggcgatattgatcacgaccaagcactggctcaggccatcagggaggctcgagagcagcaccccgacatgtctgtcacacgtgtcgtggtccacaaggagaccgaactggctgaggagggtgaggattag

SEQ ID NO: 117747 - DNA, 3018 bp, Artificial Sequence
  derived and/or modified sequence
atgaccaccgaggtgggcagcgtgagcgaggtgaagaaggacagcagtcagctcggtacagacgcaaccaaagaaaagccaaaagaagtcgccgaaaatcagcagaaccagtcatccgatccagaggaagaaaaaggcagtcagccaccaccggctgctgaatctcagtccagtctacgcaggcaaaagcgtgaaaaggaaacatctgagtcgcgtggaatctcccggtttatacctccctggcttaagaagcaaaaatcatacactcttgtggttgctaaggatggtggggataagaaggagccaactcaggcagtggtggaggaacaggtcctggacaaagaggagcccttgcctgaggaacagagacaggctaagggcgatgctgaagaaatggcacaaaaaaagcaggagatcaaggtggaagtaaaagaagaaaagccgagcgttagcaaagaagagaagcccagtgtcagcaaggttgagatgcaacccaccgagcttgtttctaaagaaagagaagagaaggtgaaggaaacgcaggaggacaaattagaggggggtgccgcgaagagggagaccaaagaggtgcagactaatgaactgaaagctgagaaggcctcccaaaaggtgactaagaaaacgaagacagttcaatgcaaggtgacgttgctcgatggcactgaatattcttgtgacctggagaagcatgctaaggggcaggttctgtttgacaaggtgtgtgaacatttgaacctgttagaaaaggattatttcggtctactttttcaagagtcccccgagcagaagaattggctcgatccagccaaagagattaaacgccagctgaggaacctgccctggctttttaccttcaatgtgaagttctacccacctgatccctctcaattgacggaggatataactagatatttcctgtgcctccagctgcgacaggatatcgctagcgggcgcctaccttgctcctttgttacccacgccctgttggggagttatacactgcaggcagaattaggggactatgatcctgaggagcatggttctatcgatctcagtgagtttcagttcgcgcctacacagactaaggaactggaggagaaggtcgccgagctccacaaaacccaccgaggcctctcgcctgcacaggctgatagtcagttcttggagaacgctaaaagactgtccatgtacggagtggatctccaccacgctaaagactctgagggcgtagatattaagctcggcgtgtgtgccaatggactgttgatttataaggacagactccggattaatcggttcgcgtggccaaagatcctgaaaattagctacaagagatcgaacttctatatcaaggtaagacccgccgaactggagcagttcgaaagcaccatcggctttaaacttcctaatcaccgcgctgcaaagcggctgtggaaggtgtgtgtcgaacatcacacattctaccgcctcgtctcgcccgagcaaccacccaaagcaaaattcctaaccttaggctccaaattcagatactccggccgcacccaggctcagacccggcaagcgagcaccctaatcgatcgtcccgccccccacttcgagagaaccagttctaagcgggtgtcaaggagcctggatggagcgcccataggagtgatggaccagagcttaatgaaagactttccgggcgcggccggcgagatctccgcgtatggaccaggtcttgtctccatcgcagtagtccaggatggggatggtcgcagggaggtaagatccccaaccaaagcaccacatcttcagctaatcgagggcaaaaagaacagcctgcgagtcgagggagataatatctacgtgcggcattcaaacctgatgctggaggaactggacaaggcccaggaagacatccttaaacatcaagcaagcatatcagagttgaagcgcaattttatggagtccactcccgaaccacgcccgaacgagtgggagaaacgtagaattacccccctcagcctccagacccagggtagttcgcacgaaacccttaatatcgtggaagagaagaaacgagccgaagtgggcaaggacgagcgggtgatcactgaagagatgaatggtaaggaaatcagccctgggtccggacctggagaaatacgcaaggtggaacctgtgacccagaaggactccacgagtttaagctctgaaagttcttcatcgtcctctgaaagtgaagaggaagacgtgggcgagtacaggcctcatcaccgggtcaccgaaggaaccatcagagaggagcaggagtatgaggaagaggtggaggaggagcctagaccggccgctaaggtggtcgagagggaggaggcagttcctgaggcttcccccgtgacccaggccggagcgtctgtcataaccgtggaaaccgtaatccaagagaatgtaggtgcccagaaaatcccgggcgagaagtccgtccatgaaggcgccttgaagcaggatatgggcgaagaagccgaagaggagcctcagaaagttaatggtgaggtgtctcacgtagatattgacgttttaccccaaataatttgctgttctgaacctcccgtcgtgaagactgaaatggttacgatctccgatgcatcacagaggaccgagatctccacaaaggaggtacctatcgtccagaccgagacaaagaccattacctacgagagcccccagattgacggaggggctggaggtgactccggaacattgctcacggcacagacaattacatcagagtccgtaagtaccactactactacacatattacaaagacggtgaaaggtgggataagtgaaactcggatcgagaagcgcattgtaataactggcgacggcgacattgaccacgatcaagccctggctcaggccattcgagaggcccgcgagcagcatcctgacatgtctgtaacccgcgtggtggtccataaggagactgaactggcggaagagggggaagactag

SEQ ID NO: 117748 - DNA, 1152 bp, Artificial Sequence
  derived and/or modified sequence
atggaggaggaggagacccagctggaggaggagctggacaaggcccaggaagacatcctgaaacaccaggctagtatcagtgaactcaagcgcaactttatggagtctactcccgaaccccgacccaacgaatgggaaaaacgcagaatcacaccacttagcctgcagacacagggatcgtcgcatgaaacactgaacattgtggaagagaaaaaacgtgccgaggtgggaaaggatgagagagttatcacggaggaaatgaatggcaaagagatatccccgggttcaggacccggagagatcaggaaagtggaaccggttacgcaaaaggactctacgtcgctaagcagcgagagctcatcgtccagctcggaaagcgaggaggaggacgtgggcgaatatagaccgcatcatagggtgaccgaggggacgatccgggaggagcaggaatacgaggaggaggtggaagaggagccgagaccggccgccaaggtggtggaaagagaggaggcggttcctgaagcttctcccgtgacgcaggccggggccagtgtgattacagtcgagacggtaattcaggagaatgtgggggcccagaagatcccgggcgaaaagtccgtccatgaaggtgccctgaagcaggacatgggcgaagaggccgaggaggaacctcaaaaagtcaacggtgaagtttctcatgttgacattgatgtgttgccccaaatcatctgttgtagcgaaccgcccgtggtgaaaaccgagatggtaactatttcagacgcatcccagcgcactgagatatctaccaaagaagtccccatcgtccagacagaaacaaagactattacttacgagagcccacagattgatgggggagctggaggagattccggtaccctcctgacggcacagacaatcactagcgagagtgtgagcacaaccacgaccacccacattaccaaaactgtgaaaggggggatcagcgagacacgcatcgagaagcgaatcgtaatcacgggagacggcgacatagaccatgatcaggcgctggcgcaggcaatacgcgaggccagagagcagcacccagacatgtctgtgacccgggtagtcgtacacaaggagaccgaattagctgaggagggcgaggactag

SEQ ID NO: 117749 - DNA, 3018 bp, Artificial Sequence
  derived and/or modified sequence
atgactactgaggtcggaagcgtgtctgaagtgaagaaggacagctcacagttgggcacagacgccactaaagaaaagcctaaggaagtggcagaaaaccaacagaatcagtcctctgatcccgaagaggagaaagggagccaaccaccccctgccgctgagtctcagagcagcctgcggagacagaaaagggaaaaggaaaccagcgaaagcagaggcatctcgagatttatacccccatggctcaagaaacaaaaatcatataccctggttgtggctaaggacggtggcgataagaaggagcctactcaggccgtggtggaggagcaagtgctggacaaggaagaacccctccccgaagagcagcgtcaggcgaagggcgacgctgaagagatggcccagaaaaagcaggagattaaggtggaggtgaaggaagagaagccaagcgtgtcaaaggaggagaaaccctccgtttcaaaggtggagatgcagccaaccgagctagttagtaaagaacgggaggagaaggtgaaggaaacgcaggaagataagctggaaggcggagctgcgaaacgagagaccaaagaagtgcagaccaacgaattaaaagccgagaaggcatctcagaaggttacgaagaagaccaaaaccgttcaatgcaaggtgactctgctggatggcacagaatattcttgtgatctggaaaaacacgccaaagggcaggtcctcttcgacaaagtctgcgagcacttaaacttgttggagaaagattatttcggcctattgttccaggagtcccctgaacagaaaaactggctcgaccccgcaaaggagataaaaaggcagctgcgaaatttgccatggctcttcacattcaacgtgaagttctatcctcctgatccttctcagttgactgaggacattacacgctactttctctgcctgcagctccgacaggatattgccagtggtcgcctgccatgctcattcgtgacacatgcccttctcggttcctacactctgcaggctgagctgggcgactatgatcccgaggagcatggtagcattgatttatctgaattccagtttgctccaacccagaccaaggaactggaagagaaagtggccgagctccataaaacacaccggggactgtcaccagcccaggccgactcgcagttcctcgagaacgccaaacggttgagcatgtacggagtagatctgcaccatgctaaggacagcgaaggagtggacattaaactgggtgtgtgtgcgaatgggctcctcatctataaggatcgcttgaggatcaatcgcttcgcctggcccaagatactcaagatctcctacaagaggagcaacttttacattaaagtacgccctgctgagctggagcaattcgaaagcacaatcggatttaaattacctaaccatagagccgctaaaagactgtggaaggtttgcgtagagcaccatacattctatcgattggtaagtccagagcagccaccaaaggctaagtttttgactttgggctccaaattccgctactctgggcgtacccaggctcagacccgacaggcgagcacgctgattgataggcccgcaccacattttgaacgcaccagcagtaaacgtgtctccagatcgctcgacggggctccaataggagttatggatcaatcattgatgaaggattttcccggtgctgccggagaaatctcagcctatggaccaggattagtctccattgctgttgtgcaggacggcgacggaaggcgggaggtcaggagtcccaccaaggcccctcacctccagctcattgaaggaaaaaaaaatagcctcagagtcgagggcgataacatctatgtgcgccatagcaacctcatgctggaagagctggataaagctcaggaggacatcctcaagcaccaggcctctataagtgaactgaagcggaattttatggagagcacgcccgagccgagaccgaacgagtgggaaaaaaggcgaattacacccctctccttgcagacacagggcagctcgcatgagaccctgaacatagtagaagagaaaaagagggcagaagtgggcaaggacgaaagggtcatcacagaggaaatgaacggaaaggaaatttcacctggcagcggcccaggtgagatccgcaaagttgagcctgtcacacaaaaggactctacatcactgtcttctgagagttcctcatcttcttctgagtcagaggaggaggatgtgggagagtacaggccacaccaccgcgtgaccgaagggaccatccgagaggagcaggaatatgaggaagaagtggaagaagagccccgtcccgcagctaaagttgtagagagggaagaggccgtcccagaggcttcaccagtgacccaagccggagcctccgtcattacagtggagaccgtgatccaggaaaacgtgggcgctcaaaaaattccaggcgagaagtccgttcacgagggagctctgaagcaggacatgggcgaggaggcagaggaggagcctcagaaggttaatggcgaagtgagtcacgtggacattgatgtccttccacagattatctgctgctcggagccacccgtcgtaaaaactgaaatggtcaccataagtgacgcctcacagcgtactgagattagtacgaaggaggtccccatcgtacagacagagaccaagacaattacctatgagtcacctcagattgacgggggagcaggcggtgattctggcacactcttaaccgctcaaacaattactagtgaatccgtgagcactacaacaaccacacacatcacaaagactgttaaaggaggaatatcagaaacgcgcattgagaaaagaatcgtgattactggggacggagacatcgatcatgatcaggcccttgcccaggccatccgggaggccagagagcagcatcccgatatgtcagttacaagagttgtcgtacacaaggaaactgaactggcagaggagggcgaggattag

SEQ ID NO: 117750 - DNA, 3018 bp, Artificial Sequence
  derived and/or modified sequence
atgaccaccgaagttggaagcgtgagtgaagtcaagaaggatagttcacagctcggcactgatgctaccaaggaaaaaccaaaagaagtggccgagaatcagcagaaccagtcgagcgatcccgaggaagagaagggaagtcagccacctccggctgctgagtcgcagagctcgctgcggaggcaaaaaagggagaaggagacctccgagtctcgtggaatctcccggtttatcccgccatggctgaagaagcaaaagtcatacacactggtggtagcaaaggatggtggcgacaagaaagagcccactcaagcagtagtcgaggagcaggtcctggataaggaggaacccctgcctgaagagcagaggcaggccaaaggagatgccgaggaaatggcacaaaaaaagcaggagattaaggtggaagttaaggaagagaaaccgagcgtgtccaaggaggagaagcctagcgtatcgaaagtggagatgcaaccgacggagcttgtgtctaaggagagggaagaaaaggtcaaagagacacaggaagacaagctggagggcggagccgctaagcgtgagaccaaggaagtgcagactaatgaactgaaagccgagaaggcgtcacaaaaggtgactaaaaagaccaagactgtccagtgcaaagtcacgttactggacggtactgagtattcttgcgacctcgagaaacacgcaaaaggacaggtgctattcgacaaagtgtgtgaacaccttaacctgcttgaaaaggactattttgggcttctgttccaagagtcacctgaacagaagaactggcttgatccagccaaagaaatcaagcggcagctccgtaatctaccatggttgttcacctttaacgtaaagttctatccccctgacccaagccaactcaccgaggatatcacacgctactttctgtgtttgcaactccgacaggatatcgcctctggccgtctcccttgcagtttcgttacacacgctctcctcggctcctacacccttcaggccgagttgggtgattatgatccagaggagcatgggtcaattgacctgtccgagttccagtttgccccaactcagaccaaggaactcgaagagaaggtggctgagttgcataaaactcaccgcggactgtcccccgctcaggccgacagccaattcctggaaaacgcaaaacggctaagcatgtatggggttgacctccaccacgccaaagactcagagggcgtggacatcaaactaggggtatgcgctaacgggctgctgatatataaggacaggttgcgtattaaccgctttgcttggccaaagatcctgaagatcagttataagcgatccaacttctacattaaggttcgtccagctgaactcgaacaattcgaaagcacgatcggatttaagctcccaaaccatagggctgccaagaggctatggaaggtgtgcgttgagcatcataccttttaccgcctagtgtctccggaacaaccccctaaggccaaattcctgacattgggctctaaattcaggtactccggtagaactcaggctcagactaggcaagccagtaccttaatagacagacccgcaccacattttgagagaaccagctcaaaaagggtttccaggagcttagatggcgctcccatcggcgtgatggatcagagtctaatgaaagactttccaggggcagccggagagatctctgcttatggacccggactggtcagtatagccgtcgtccaggacggggacgggcgtagagaggtaagatctcctactaaggccccacacctccagctgatcgaaggtaaaaagaatagtctccgtgtagaaggtgacaatatctacgtcagacattccaaccttatgcttgaggagctggataaggcccaagaggatatcctcaaacaccaggcaagcatttcagaactgaagcgaaacttcatggaaagcactccagaacccagaccaaatgagtgggagaagcgtcgtatcacccccctgtccctgcagacccaggggagcagtcatgagacactcaatatagtcgaagagaagaagcgggctgaggtggggaaggatgaacgggtgatcaccgaggagatgaatggcaaagagatcagccctggctctggtcccggagaaatccggaaagtagaacctgtgacgcagaaggattctacctccctcagttcagagtcttcttcttcgtcaagtgagtcagaggaggaagacgtgggagagtatcgccctcaccacagggttacagagggcactattagggaggagcaggaatatgaagaggaagtcgaggaagagcccagacctgctgccaaggtggtggagcgcgaagaggccgttcccgaggctagcccagtcacacaggccggagctagtgtgattacagtggagacggtaatccaggagaacgtaggggctcaaaaaataccgggagagaagtctgtacacgaaggggctctaaaacaggacatgggcgaggaagccgaggaggagccacagaaggtcaatggagaagtgtctcacgtggacatcgatgtgctcccacagataatctgttgcagtgagccgcctgttgtgaaaacagaaatggtaaccatctccgatgcatctcagcggactgagatcagtacaaaagaagtaccaatcgtgcaaactgaaactaaaacaattacgtatgaatccccacagattgatgggggagccggtggtgactctggcaccctgctgaccgcacagaccattacatctgaatcagtgtccaccaccaccaccactcacattacaaagactgtaaagggcggaatcagtgagacccgcattgagaagcgaatcgtgattaccggtgacggcgacatcgatcatgaccaggctctggctcaagcaattcgtgaggcacgagaacagcatccagacatgtccgtgacacgggtggtggtgcataaagaaacagagttggccgaggaaggagaggattag

SEQ ID NO: 117751 - DNA, 1152 bp, Artificial Sequence
  derived and/or modified sequence
atggaagaggaagaaactcagcttgaagaggaattggacaaagctcaggaggacatcctgaaacaccaggcctctatctctgagctgaaaaggaatttcatggaatcgacgccggaaccaaggccaaacgagtgggaaaaaagaaggatcactccactttccctccagacccagggatcaagccacgagacactgaacatcgtggaagaaaaaaaaagagctgaggtcgggaaggacgaacgggttattactgaggagatgaatgggaaagagatttccccaggcagcgggccaggagaaatacgtaaggtcgaaccagtgacccaaaaagactccaccagtttgagcagcgaaagcagtagctcttcttctgagagtgaagaagaggatgtgggtgaatatagaccccaccacagggtcacagagggaaccatccgagaggagcaggagtatgaagaggaagttgaggaagaaccaaggcctgctgctaaagtggtggaacgcgaggaagcggtccccgaagcctcaccagttacccaggcaggggcttccgttatcaccgtcgaaacagtcatccaggaaaacgttggggcacagaagatccccggagagaagagcgtgcatgaaggtgctttaaaacaagatatgggtgaggaggcagaagaagaaccacagaaggtgaacggagaagtgtctcatgtggacatcgacgttctgccacagatcatctgctgctccgaacccccagtggtgaagacagagatggttactatctcggacgcctctcagcggaccgagatctctaccaaagaggtcccaattgtccaaacagaaacaaagacaatcacatatgaaagtccgcagatcgacggcggagcaggaggggatagcgggacgctgctcacagcccagacaatcacctctgagtccgtgtccacaaccacaactacccacattacaaaaacagtaaagggtggaatctccgagacgaggatcgaaaagaggatagttattactggcgatggggacattgatcacgaccaggctcttgcacaggcaattcgcgaggccagagagcagcacccggatatgtccgtgaccagagtggtagtgcacaaggagacagagttggccgaggaaggcgaggattag

SEQ ID NO: 117752 - DNA, 3018 bp, Artificial Sequence
  derived and/or modified sequence
atgaccaccgaggtgggcagcgtgagcgaggtgaagaaggacagcagccagctgggcaccgacgccaccaaggagaagcccaaggaggtggccgagaaccagcagaaccagagcagcgaccccgaggaggagaagggcagccagcccccccccgccgccgagagccagagcagcctgagaagacagaagagagagaaggagaccagcgagagcagaggcatcagcagattcatccccccctggctgaagaagcagaagagctacaccctggtggtggccaaggacggcggcgacaagaaggagcccacccaggccgtggtggaggagcaggtgctggacaaggaggagcccctgcccgaggagcagagacaggccaagggcgacgccgaggagatggcccagaagaagcaggagatcaaggtggaggtgaaggaggagaagcccagcgtgagcaaggaggagaagcccagcgtgagcaaggtggagatgcagcccaccgagctggtgagcaaggagagagaggagaaggtgaaggagacccaggaggacaagctggagggcggcgccgccaagagagagaccaaggaggtgcagaccaacgagctgaaggccgagaaggccagccagaaggtgaccaagaagaccaagaccgtgcagtgcaaggtgaccctgctggacggcaccgagtacagctgcgacctggagaagcacgccaagggccaggtgctgttcgacaaggtgtgcgagcacctgaacctgctggagaaggactacttcggcctgctgttccaggagagccccgagcagaagaactggctggaccccgccaaggagatcaagagacagctgagaaacctgccctggctgttcaccttcaacgtgaagttctacccccccgaccccagccagctgaccgaggacatcaccagatacttcctgtgcctgcagctgagacaggacatcgccagcggcagactgccctgcagcttcgtgacccacgccctgctgggcagctacaccctgcaggccgagctgggcgactacgaccccgaggagcacggcagcatcgacctgagcgagttccagttcgcccccacccagaccaaggagctggaggagaaggtggccgagctgcacaagacccacagaggcctgagccccgcccaggccgacagccagttcctggagaacgccaagagactgagcatgtacggcgtggacctgcaccacgccaaggacagcgagggcgtggacatcaagctgggcgtgtgcgccaacggcctgctgatctacaaggacagactgagaatcaacagattcgcctggcccaagatcctgaagatcagctacaagagaagcaacttctacatcaaggtgagacccgccgagctggagcagttcgagagcaccatcggcttcaagctgcccaaccacagagccgccaagagactgtggaaggtgtgcgtggagcaccacaccttctacagactggtgagccccgagcagccccccaaggccaagttcctgaccctgggcagcaagttcagatacagcggcagaacccaggcccagaccagacaggccagcaccctgatcgacagacccgccccccacttcgagagaaccagcagcaagagagtgagcagaagcctggacggcgcccccatcggcgtgatggaccagagcctgatgaaggacttccccggcgccgccggcgagatcagcgcctacggccccggcctggtgagcatcgccgtggtgcaggacggcgacggcagaagagaggtgagaagccccaccaaggccccccacctgcagctgatcgagggcaagaagaacagcctgagagtggagggcgacaacatctacgtgagacacagcaacctgatgctggaggagctggacaaggcccaggaggacatcctgaagcaccaggccagcatcagcgagctgaagagaaacttcatggagagcacccccgagcccagacccaacgagtgggagaagagaagaatcacccccctgagcctgcagacccagggcagcagccacgagaccctgaacatcgtggaggagaagaagagagccgaggtgggcaaggacgagagagtgatcaccgaggagatgaacggcaaggagatcagccccggcagcggccccggcgagatcagaaaggtggagcccgtgacccagaaggacagcaccagcctgagcagcgagagcagcagcagcagcagcgagagcgaggaggaggacgtgggcgagtacagaccccaccacagagtgaccgagggcaccatcagagaggagcaggagtacgaggaggaggtggaggaggagcccagacccgccgccaaggtggtggagagagaggaggccgtgcccgaggccagccccgtgacccaggccggcgccagcgtgatcaccgtggagaccgtgatccaggagaacgtgggcgcccagaagatccccggcgagaagagcgtgcacgagggcgccctgaagcaggacatgggcgaggaggccgaggaggagccccagaaggtgaacggcgaggtgagccacgtggacatcgacgtgctgccccagatcatctgctgcagcgagccccccgtggtgaagaccgagatggtgaccatcagcgacgccagccagagaaccgagatcagcaccaaggaggtgcccatcgtgcagaccgagaccaagaccatcacctacgagagcccccagatcgacggcggcgccggcggcgacagcggcaccctgctgaccgcccagaccatcaccagcgagagcgtgagcaccaccaccaccacccacatcaccaagaccgtgaagggcggcatcagcgagaccagaatcgagaagagaatcgtgatcaccggcgacggcgacatcgaccacgaccaggccctggcccaggccatcagagaggccagagagcagcaccccgacatgagcgtgaccagagtggtggtgcacaaggagaccgagctggccgaggagggcgaggactag

SEQ ID NO: 117753 - DNA, 1152 bp, Artificial Sequence
  derived and/or modified sequence
atggaggaggaggagacccagctggaggaggagctggacaaggcccaggaggacatcctgaagcaccaggccagcatcagcgagctgaagagaaacttcatggagagcacccccgagcccagacccaacgagtgggagaagagaagaatcacccccctgagcctgcagacccagggcagcagccacgagaccctgaacatcgtggaggagaagaagagagccgaggtgggcaaggacgagagagtgatcaccgaggagatgaacggcaaggagatcagccccggcagcggccccggcgagatcagaaaggtggagcccgtgacccagaaggacagcaccagcctgagcagcgagagcagcagcagcagcagcgagagcgaggaggaggacgtgggcgagtacagaccccaccacagagtgaccgagggcaccatcagagaggagcaggagtacgaggaggaggtggaggaggagcccagacccgccgccaaggtggtggagagagaggaggccgtgcccgaggccagccccgtgacccaggccggcgccagcgtgatcaccgtggagaccgtgatccaggagaacgtgggcgcccagaagatccccggcgagaagagcgtgcacgagggcgccctgaagcaggacatgggcgaggaggccgaggaggagccccagaaggtgaacggcgaggtgagccacgtggacatcgacgtgctgccccagatcatctgctgcagcgagccccccgtggtgaagaccgagatggtgaccatcagcgacgccagccagagaaccgagatcagcaccaaggaggtgcccatcgtgcagaccgagaccaagaccatcacctacgagagcccccagatcgacggcggcgccggcggcgacagcggcaccctgctgaccgcccagaccatcaccagcgagagcgtgagcaccaccaccaccacccacatcaccaagaccgtgaagggcggcatcagcgagaccagaatcgagaagagaatcgtgatcaccggcgacggcgacatcgaccacgaccaggccctggcccaggccatcagagaggccagagagcagcaccccgacatgagcgtgaccagagtggtggtgcacaaggagaccgagctggccgaggagggcgaggactag

SEQ ID NO: 117754 - DNA, 4457 bp, Artificial Sequence
  derived and/or modified sequence
gtcgcgggaggggcttccgccgcgagggggcggggccggccctcagagtcctctgacggccccagtcagggaatttcaatttgaaacctagcggagggaggaggcaggcgcggctgccggcggctgggactgaagagggacgggtcccgcggcgagcgagctcctgagcataagctgtggccatgactactgaagtaggctctgtgtctgaagtgaagaaggactctagccagttaggaacagatgcaaccaaggaaaaacctaaagaagtagcagaaaatcagcagaatcagtcttccgatccagaggaggaaaaaggttcccagccacctcctgcagctgaaagccaaagtagtctacgccgccagaagagagagaaggaaacatcggagagcaggggtatttctcggttcataccgccatggcttaagaagcaaaagtcatataccttagtagtggccaaagatggaggagataaaaaagagcctacccaagctgttgttgaagaacaggtcttagataaagaggaaccccttccagaagaacagagacaggctaagggtgatgctgaagaaatggctcagaagaaacaagagattaaagttgaagtcaaggaagaaaaaccctcagtgagcaaggaagaaaaaccctcagtgagcaaagtggagatgcagcctactgaattagtaagtaaggagagagaagagaaggtaaaagaaacacaggaagacaaattagaaggaggagcagcaaaaagggagaccaaggaagtgcagaccaatgagctgaaagcagagaaggcatctcaaaaagtcaccaagaagaccaaaactgtccagtgtaaagtgaccctcttagatggcaccgaatacagctgtgacctggagaaacatgccaagggacaagtgttatttgacaaagtgtgtgaacacctcaatctcttggagaaagactactttggacttttgtttcaggaaagccctgagcagaaaaactggttagatcctgctaaagaaataaagagacaactgagaaaccttccatggctattcacttttaatgtgaagttttatcctcctgatccttctcaattgactgaagatatcaccagatacttcttgtgccttcagctccggcaggacattgcctctggccgcctgccctgctcttttgtgactcatgctctcctgggatcctacaccctgcaggctgaacttggtgactatgacccagaagaacatggcagcatcgacctcagtgaattccagtttgcccctactcagactaaggagctggaagagaaggtggcagagctgcacaaaacccacaggggcttatcgccagcacaagctgattcccagttcttagaaaatgcaaagaggctttccatgtatggtgttgacctacatcatgccaaggactcagaaggtgtggacatcaagctgggcgtgtgtgctaatggacttctcatttacaaagacagactgcgaatcaatcgttttgcttggccgaaaatcttaaaaatttcctataaacgcagtaacttctacattaaagtcagaccggcagagctggaacagtttgagagtaccattggattcaaactgccaaaccaccgggcagcgaaaagactatggaaagtgtgcgtggagcatcatactttctacaggcttgtttctccagagcagccaccaaaagccaagttcctgaccttggggtccaaatttcgctatagtggccgcacccaagcacagacccgccaggccagcaccctcatagataggccagcaccacactttgagcgcacttctagtaaacgggtctccaggagtctagatggagctccgattggtgtcatggaccaaagtcttatgaaggattttcctggcgctgctggggagatttcagcctatggacctggacttgtcagcattgccgtggtacaagatggggacggcaggagggaagtgagaagcccaactaaagccccacatttgcagctcattgaaggaaagaaaaattccttgagagtagaaggggataatatttatgtcagacatagcaatttaatgttggaggaactggataaggcccaggaggacatactgaaacatcaggctagcattagtgaactcaagcgcaattttatggaatccacacctgagccgcgccctaatgaatgggaaaaacgacgtatcacacctctgtccctacagacacaagggagttcacatgagactctgaatatagtggaggagaagaagcgggcagaggttgggaaagacgaaagagtaatcacagaagaaatgaatggtaaagagatatcacctgggagtggtcctggggagattcgtaaggtggagcctgtgacacaaaaagactccacctccctgtcttctgagagcagcagcagcagcagtgagagtgaggaggaagacgtgggagagtaccgtccccaccaccgagtgaccgagggcaccatcagggaggaacaggagtatgaagaagaggtggaggaagaaccccgcccggcagccaaggtagtagagagggaggaagcagtgcccgaagccagcccagtcacacaagcaggtgccagtgtaatcacagtagaaacagtgatccaggaaaatgtaggtgcccaaaagatacccggagagaagagtgtacacgaaggcgctcttaagcaagacatgggagaagaagcagaggaagagccacagaaagttaacggagaggtgtcccatgttgacattgatgttttgccacaaattatttgttgttcagagccaccagtggtaaaaacagagatggtaacaatttctgatgcctcacaaaggacagaaatctccaccaaggaagtccccattgtccaaactgagaccaaaaccatcacatatgagtctccacagattgatggcggggctggtggtgattcgggcacgttactgaccgcacaaaccatcacatctgagtccgtgtcaacaacgacaaccacacacatcaccaagactgtaaaaggtggaatttctgaaacaagaattgagaaacgcattgtgatcacaggagatggagatattgatcatgaccaggcactggctcaggcgatcagggaagccagagagcagcaccctgacatgtcggtcacaagagtggtggtacacaaagaaacagagttggctgaggaaggggaagattaagtaagaaagtcattttttaaacaacactcaactttgtgaacccctgaagattttttgaccgttccaagtcttaatgccacaccactattccagcgaatttatgctacaactggtaacaatgaccagaagcctgaagaattaaaatgccaacaccaaacctttccttaccagctctggtctatattgctcccatgcatttaatatattattttgttttataaccacttctaaatattctcagttctttctttttgttgttgttaattaaggggttttggttttgttttctgtttactttgtgtgcaactacctgcttttaatgactcactttgatcaaatgacagtgaacaaagccagcccaagctggtaaggtgctgttcacttgaacaggtgctgttgcgcagaaaggaaactctgtgactaatttagatagtggctttccttcttctggattcttttcattgaattctcacagtaaatatttacggagttttcaaattgcagcaaatatactgtatgagaaaatattaatacagattaaaagcctttcttacatcttgaaaattttctaatatttgagaatttcacagggatgttttttatattggacccttttgactttccagtcctgtgactttctacttttagtagagagtcagaatctctggactggagaataatgaagaagttcactgactgtgcactgtgcttagagaccctgccgcaccacagtgccaatgcttgtcagacacatgcccttcggcagcattccagaacaggagggaagagaaagagaaaactttcttcccttctactaaaagattcaggcagcttaaaaccttagtgctttctttcttaacatacccacatttcaattctttccattatttgaacacttgggtagaactcttgctttgtattaaacctctttgtctacacatgtaaaacttaccttttgttattgagcaggcctatctctttcagatagttttatgattcacacaggtttgaggatgctggggagagggggagggggctgtggtggtgttctgttggttacaagaaagttataccatttaaagctggcaccagagacccgatagggacttattaactatattgaacattttttcctttgcctttgaccctatgtatagttacgatgccagattagatttatagcagcctcaagttgtattaaatgatattttgcttcctgtaatactattataaaataaagtttgtttattctctaaa

SEQ ID NO: 117755 - DNA, 4456 bp, Artificial Sequence
  derived and/or modified sequence
cgggaggggcttccgccgcgagggggcggggccggccctcagagtcctctgacggccccagtcagggaatttcaatttgaaacctagcggagggaggaggcaggcgcggctgccggcggctgggactgaagagggacgggtcccgcggcgagcgagctcctgaggtacggcgtcgggcataagctgtggccatgactactgaagtaggctctgtgtctgaagtgaagaaggactctagccagttaggaacagatgcaaccaaggaaaaacctaaagaagtagcagaaaatcagcagaatcagtcttccgatccagaggaggaaaaaggttcccagccacctcctgcagctgaaagccaaagtagtctacgccgccagaagagagagaaggaaacatcggagagcaggggtatttctcggttcataccgccatggcttaagaagcaaaagtcatataccttagtagtggccaaagatggaggagataaaaaagagcctacccaagctgttgttgaagaacaggtcttagataaagaggaaccccttccagaagaacagagacaggctaagggtgatgctgaagaaatggctcagaagaaacaagagattaaagttgaagtcaaggaagaaaaaccctcagtgagcaaggaagaaaaaccctcagtgagcaaagtggagatgcagcctactgaattagtaagtaaggagagagaagagaaggtaaaagaaacacaggaagacaaattagaaggaggagcagcaaaaagggagaccaaggaagtgcagaccaatgagctgaaagcagagaaggcatctcaaaaagtcaccaagaagaccaaaactgtccagtgtaaagtgaccctcttagatggcaccgaatacagctgtgacctggagaaacatgccaagggacaagtgttatttgacaaagtgtgtgaacacctcaatctcttggagaaagactactttggacttttgtttcaggaaagccctgagcagaaaaactggttagatcctgctaaagaaataaagagacaactgagaaaccttccatggctattcacttttaatgtgaagttttatcctcctgatccttctcaattgactgaagatatcaccagatacttcttgtgccttcagctccggcaggacattgcctctggccgcctgccctgctcttttgtgactcatgctctcctgggatcctacaccctgcaggctgaacttggtgactatgacccagaagaacatggcagcatcgacctcagtgaattccagtttgcccctactcagactaaggagctggaagagaaggtggcagagctgcacaaaacccacaggggcttatcgccagcacaagctgattcccagttcttagaaaatgcaaagaggctttccatgtatggtgttgacctacatcatgccaaggactcagaaggtgtggacatcaagctgggcgtgtgtgctaatggacttctcatttacaaagacagactgcgaatcaatcgttttgcttggccgaaaatcttaaaaatttcctataaacgcagtaacttctacattaaagtcagaccggcagagctggaacagtttgagagtaccattggattcaaactgccaaaccaccgggcagcgaaaagactatggaaagtgtgcgtggagcatcatactttctacaggcttgtttctccagagcagccaccaaaagccaagttcctgaccttggggtccaaatttcgctatagtggccgcacccaagcacagacccgccaggccagcaccctcatagataggccagcaccacactttgagcgcacttctagtaaacgggtctccaggagtctagatggagctccgattggtgtcatggaccaaagtcttatgaaggattttcctggcgctgctggggagatttcagcctatggacctggacttgtcagcattgccgtggtacaagatggggacggcaggagggaagtgagaagcccaactaaagccccacatttgcagctcattgaaggaaagaaaaattccttgagagtagaaggggataatatttatgtcagacatagcaatttaatgttggaggaactggataaggcccaggaggacatactgaaacatcaggctagcattagtgaactcaagcgcaattttatggaatccacacctgagccgcgccctaatgaatgggaaaaacgacgtatcacacctctgtccctacagacacaagggagttcacatgagactctgaatatagtggaggagaagaagcgggcagaggttgggaaagacgaaagagtaatcacagaagaaatgaatggtaaagagatatcacctgggagtggtcctggggagattcgtaaggtggagcctgtgacacaaaaagactccacctccctgtcttctgagagcagcagcagcagcagtgagagtgaggaggaagacgtgggagagtaccgtccccaccaccgagtgaccgagggcaccatcagggaggaacaggagtatgaagaagaggtggaggaagaaccccgcccggcagccaaggtagtagagagggaggaagcagtgcccgaagccagcccagtcacacaagcaggtgccagtgtaatcacagtagaaacagtgatccaggaaaatgtaggtgcccaaaagatacccggagagaagagtgtacacgaaggcgctcttaagcaagacatgggagaagaagcagaggaagagccacagaaagttaacggagaggtgtcccatgttgacattgatgttttgccacaaattatttgttgttcagagccaccagtggtaaaaacagagatggtaacaatttctgatgcctcacaaaggacagaaatctccaccaaggaagtccccattgtccaaactgagaccaaaaccatcacatatgagtctccacagattgatggcggggctggtggtgattcgggcacgttactgaccgcacaaaccatcacatctgagtccgtgtcaacaacgacaaccacacacatcaccaagactgtaaaaggtggaatttctgaaacaagaattgagaaacgcattgtgatcacaggagatggagatattgatcatgaccaggcactggctcaggcgatcagggaagccagagagcagcaccctgacatgtcggtcacaagagtggtggtacacaaagaaacagagttggctgaggaaggggaagattaaaaagtcattttttaaacaacactcaactttgtgaacccctgaagattttttgaccgttccaagtcttaatgccacaccactattccagcgaatttatgctacaactggtaacaatgaccagaagcctgaagaattaaaatgccaacaccaaacctttccttaccagctctggtctatattgctcccatgcatttaatatattattttgttttataaccacttctaaatattctcagttctttctttttgttgttgttaattaaggggttttggttttgttttctgtttactttgtgtgcaactacctgcttttaatgactcactttgatcaaatgacagtgaacaaagccagcccaagctggtaaggtgctgttcacttgaacaggtgctgttgcgcagaaaggaaactctgtgactaatttagatagtggctttccttcttctggattcttttcattgaattctcacagtaaatatttacggagttttcaaattgcagcaaatatactgtatgagaaaatattaatacagattaaaagcctttcttacatcttgaaaattttctaatatttgagaatttcacagggatgttttttatattggacccttttgactttccagtcctgtgactttctacttttagtagagagtcagaatctctggactggagaataatgaagaagttcactgactgtgcactgtgcttagagaccctgccgcaccacagtgccaatgcttgtcagacacatgcccttcggcagcattccagaacaggagggaagagaaagagaaaactttcttcccttctactaaaagattcaggcagcttaaaaccttagtgctttctttcttaacatacccacatttcaattctttccattatttgaacacttgggtagaactcttgctttgtattaaacctctttgtctacacatgtaaaacttaccttttgttattgagcaggcctatctctttcagatagttttatgattcacacaggtttgaggatgctggggagagggggagggggctgtggtggtgttctgttggttacaagaaagttataccatttaaagctggcaccagagacccgatagggacttattaactatattgaacattttttcctttgcctttgaccctatgtatagttacgatgccagattagatttatagcagcctcaagttgtattaaatgatattttgcttcctgtaatactattataaaataaagtttgtttattct

SEQ ID NO: 117756 - DNA, 3090 bp, Artificial Sequence
  derived and/or modified sequence
agaattccttagtactgttatttctcttgttggaaacccaagtgtgttctagcatctatgaggatgtatctgtaacctttactcctgacatttgtaagtctaatctcaaaagctccttatctccctattattgtagtatttggagaccagatgaattttagctagtttttttttctaaccttaaattatgtaattatatataagagtcactatagggtattttataaggaaggtactattctgttgtctttaacaaatgtatgtgaaaagtgaaacatggctttttgaaaatttagactatataacactaagattgggcctcatagtgctcctttatttaaaattaggtgtttggtttgaggatttttacccctatataaggcaaatttttttcaagtatcctacctctgtgctactaagtcagcattaacatgtacaatatatttttgattattttgttaaatgtggcctggtgatttagtgcctcatattctatggatcctaccaatacatacagtaaatcacaaaatttagagcaaacctaaagaaaaatgtaaagataattgcagtgagtatgcattgtaggacaattgttaaaagtttacctgaggaatgtcaaagatcaacattttagggaattaaatgttgaccaaggagttggaagatgtttcttaacagattattgaatgtctgtgtctcatttttcacatctgataaagactctgagctccttgcttacctctgaaaaatactatgaatggttaaaaaggtaagccgtttgaactctcagatttgacactatcatcctaattaagaaggaaaaggatatatattaggaattaacctataaaggttaaatgatttgcctttgataagggagtcaatatttttattctcaccattttttcccttgagtcaaaattcagtcagtatttgttagttttaaacttctacattcattcttttgaatcatcagatattgagaaatgtccaactatgaaaaactgttcttatttaaagaattttatgtaagtggttatatttcaaagattatttttaaatacccaccattttaatatgaaactagttaaataagccaatccccctcccccagccagaaaagaaatccatatttaacaaactgaatcataggttgaacatttgttccccaatataaagctaaaaacgaattttacatcattatactttaccccatcactagttgctttagacatttcaaattagaacagattgaattatgccatttttgcactctcatattcttgttcctgagtacaaaatattcaaaagcagagcataatctagggactgagaaagagtgaagcttccatcctccattccacctttgcaaaggatcatttccatcattcgtacaacactgtaggtgaagaaagaccaaagaggcttaatattctgcatcttctgagggcctcacagtaaaggcgaagatggaagaagaggaaacgcagctggaagaggaactggataaggcccaggaggacatactgaaacatcaggctagcattagtgaactcaagcgcaattttatggaatccacacctgagccgcgccctaatgaatgggaaaaacgacgtatcacacctctgtccctacagacacaagggagttcacatgagactctgaatatagtggaggagaagaagcgggcagaggttgggaaagacgaaagagtaatcacagaagaaatgaatggtaaagagatatcacctgggagtggtcctggggagattcgtaaggtggagcctgtgacacaaaaagactccacctccctgtcttctgagagcagcagcagcagcagtgagagtgaggaggaagacgtgggagagtaccgtccccaccaccgagtgaccgagggcaccatcagggaggaacaggagtatgaagaagaggtggaggaagaaccccgcccggcagccaaggtagtagagagggaggaagcagtgcccgaagccagcccagtcacacaagcaggtgccagtgtaatcacagtagaaacagtgatccaggaaaatgtaggtgcccaaaagatacccggagagaagagtgtacacgaaggcgctcttaagcaagacatgggagaagaagcagaggaagagccacagaaagttaacggagaggtgtcccatgttgacattgatgttttgccacaaattatttgttgttcagagccaccagtggtaaaaacagagatggtaacaatttctgatgcctcacaaaggacagaaatctccaccaaggaagtccccattgtccaaactgagaccaaaaccatcacatatgagtctccacagattgatggcggggctggtggtgattcgggcacgttactgaccgcacaaaccatcacatctgagtccgtgtcaacaacgacaaccacacacatcaccaagactgtaaaaggtggaatttctgaaacaagaattgagaaacgcattgtgatcacaggagatggagatattgatcatgaccaggcactggctcaggcgatcagggaagccagagagcagcaccctgacatgtcggtcacaagagtggtggtacacaaagaaacagagttggctgaggaaggggaagattaagtaagaaagtcattttttaaacaacactcaactttgtgaacccctgaagattttttgaccgttccaagtcttaatgccacaccactattccagcgaatttatgctacaactggtaacaatgaccagaagcctgaagaattaaaatgccaacaccaaacctttccttaccagctctggtctatattgctcccatgcatttaatatattattttgttttataaccacttctaaatattctcagttctttctttttgttgttgttaattaaggggttttggttttgttttctgtttactttgtgtgcaactacctgcttttaatgactcactttgatcaaatgacagtgaacaaagccagcccaagctggtaaggtgctgttcacttgaacaggtgctgttgcgcagaaaggaaactctgtgactaatttagatagtggctttccttcttctggattcttttcattgaattc

SEQ ID NO: 117757 - protein, 169 aa, Artificial Sequence
  derived and/or modified sequence
MTAGRRMEMLCAGRVPALLLCLGFHLLQAVLSTTVIPSCIPGESSDNCTALVQTEDNPRVAQVSITKCSSDMNGYCLHGQCIYLVDMSQNYCRCEVGYTGVRCEHFFLTVHQPLSKEYVALTVILIILFLITVVGSTYYFCRWYRNRKSKEPKKEYERVTSGDPELPQV

SEQ ID NO: 117758 - DNA, 510 bp, Artificial Sequence
  derived and/or modified sequence
atgaccgcaggcaggcgcatggagatgttgtgcgctggtagggttcctgcactgctcctttgtctgggttttcatttgctgcaggccgtcctttctacaaccgtgatcccaagctgcatccctggcgaatccagcgataactgcaccgctcttgtgcagactgaagacaaccccagggttgctcaagtgagtataacgaaatgctcttccgatatgaatggatactgcctgcatgggcagtgtatatacctggtcgatatgtcacagaactactgtcggtgtgaggtgggctacaccggggttagatgtgagcattttttcctgactgtgcatcagccgctgtcaaaagagtacgttgccctgactgttatcctgatcattcttttcctgattaccgtagtgggctccacatactatttttgcagatggtatcgcaatcgcaagtcaaaggagcctaagaaggagtacgagcgcgtcacgagcggggatcccgagctcccgcaggtatag

SEQ ID NO: 117759 - DNA, 510 bp, Artificial Sequence
  derived and/or modified sequence
atgacagcgggtcggcggatggaaatgttgtgcgctgggcgtgtgcctgccctcctcctgtgcctggggtttcatctgctgcaagccgtcctttcaactaccgttatcccgtcctgtattccaggtgagagcagcgataactgtacagccctggtgcagacagaagacaacccccgagttgcccaggtttcaattacgaagtgtagctcagatatgaatgggtattgtttgcatggccagtgcatctatttagttgacatgtctcagaattattgtcggtgtgaggtgggttacactggggtcagatgtgagcatttcttcctgactgtgcatcagccattatccaaagagtacgtagctctgacagtgatcttaatcatcctgttcctcataactgtagtgggatctacgtattatttttgccggtggtatagaaataggaagagcaaagaaccaaaaaaggagtacgagcgtgtcaccagcggcgacccagagcttccccaggtgtag

SEQ ID NO: 117760 - DNA, 510 bp, Artificial Sequence
  derived and/or modified sequence
atgaccgcaggaaggcgaatggagatgctctgcgccggaagggtgcccgcattgcttctttgcctgggcttccaccttctccaagccgttctaagtaccacggttatcccctcatgtatcccgggcgagtcttccgataactgtactgctttggtgcagaccgaagataatcccagagtcgcgcaggtgtcaatcactaaatgtagctccgatatgaatggctattgtttgcacggccagtgtatttacctagtggacatgagtcagaattactgtagatgcgaagtgggctataccggggttaggtgtgagcactttttcctgaccgtccaccaaccactgtctaaggagtatgtcgctttaaccgttattctcataatactgttcctcataaccgtggtcggctctacatattatttttgccggtggtacagaaataggaagtccaaagagccaaaaaaagaatacgaacgagtcacaagtggtgatccagagctgccccaagtgtag

SEQ ID NO: 117761 - DNA, 4619 bp, Artificial Sequence
  derived and/or modified sequence
tcacttgcctgatatttccagtgtcagagggacacagccaacgtggggtcccttctaggctgacagccgctctccagccactgccgcgagcccgtctgctcccgccctgcccgtgcactctccgcagccgccctccgccaagccccagcgcccgctcccatcgccgatgaccgcggggaggaggatggagatgctctgtgccggcagggtccctgcgctgctgctctgcctgggtttccatcttctacaggcagtcctcagtacaactgtgattccatcatgtatcccaggagagtccagtgataactgcacagctttagttcagacagaagacaatccacgtgtggctcaagtgtcaataacaaagtgtagctctgacatgaatggctattgtttgcatggacagtgcatctatctggtggacatgagtcaaaactactgcaggtgtgaagtgggttatactggtgtccgatgtgaacacttctttttaaccgtccaccaacctttaagcaaagaatatgtggctttgaccgtgattcttattattttgtttcttatcacagtcgtcggttccacatattatttctgcagatggtacagaaatcgaaaaagtaaagaaccaaagaaggaatatgagagagttacctcaggggatccagagttgccgcaagtctgaatggcgccatcaaacttatgggcagggataacagtgtgcctggttaatattaatattcccattttattaataatatttatgttgggtcaagtgttaggtcaataacactgtattttaatgtacttgaaaaatgtttttatttttgttttatttttgacagactatttgctaatgtataatgtgcagaaaatatttaatatcaaaagaaaattgatatttttatacaagtaatttcctgagctaaatgcttcattgaaagcttcaaagtttatatgcctggtgcacagtgcttagaagtaagcaattcccaggtcatagctcaagaattgttagcaaatgacagatttctgtaagcctatatatatagtcaaatcgatttagtaagtatgttttttatgttcctcaaatcagtgataattggtttgactgtaccatggtttgatatgtagttggcaccatggtatcatatattaaaacaataatgcaattagaatttgggagaagcaaatataggtcctgtgttaaacactacacatttgaaacaagctaaccctggggagtctatggtctcttcactcaggtctcagctataattctgttatatgaggggcagtggacagttccctatgccaactcacgactcctacaggtactagtcactcatctaccagattctgcctatgtaaaatgaattgaaaaacaattttctgtaatcttttatttaagtagtgggcatttcatagcttcacaatgttccttttttgtatattacaacatttatgtgaggtaattattgctcaacagacaattagaaaaaagtccacacttgaagcctaaatttgtgctttttaagaatatttttagactatttctttttataggggctttgctgaattctaacattaaatcacagcccaaaatttgatggactaattattattttaaaatatatgaagacaataattctacatgttgtcttaagatggaaatacagttatttcatcttttattcaaggaagttttaactttaatacagctcagtaaatggcttcttctagaatgtaaagttatgtatttaaagttgtatcttgacacaggaaatgggaaaaaacttaaaaattaatatggtgtatttttccaaatgaaaaatctcaattgaaagcttttaaaatgtagaaacttaaacacaccttcctgtggaggctgagatgaaaactagggctcattttcctgacatttgtttattttttggaagagacaaagatttcttctgcactctgagcccataggtctcagagagttaataggagtatttttgggctattgcataaggagccactgctgccaccacttttggattttatgggaggctccttcatcgaatgctaaacctttgagtagagtctccctggatcacataccaggtcagggaggatctgttcttcctctacgtttatcctggcatgtgctagggtaaacgaaggcataataagccatggctgacctctggagcaccaggtgccaggacttgtctccatgtgtatccatgcattatataccctggtgcaatcacacgactgtcatctaaagtcctggccctggcccttactattaggaaaataaacagacaaaaacaagtaaatatatatggtcatatacatattgtatatatattcatatacaaacatgtatgtatacatgaccttaatggatcatagaattgcagtcatttggtgctctgctaaccatttatataaaacttaaaaacaagagaaaagaaaaatcaattagatctaaacagttatttctgtttcctatttaatacagctgaagtcaaaatatgtaagaacacattttaaatactctacttacagttggccctctgtggttagttccacatctgtggattcaaccaaccaaggacggaaaatgcttaaaaaataatacaacaacaacaaaaaatacattataacaactatttacttttttttttttctttttgagatggagtctcgctctgttgcccaggttggagtgcagtggcacgatctcggctcactgcaacctcacctcccgggttcaagagatcctcctgcctcagcctcctgagcagctgggactacaggcgcatgccaccatgcccagctaatttttgtatttttagtagaggcggggtttcaccatgttggccaggatggtctcaatctcctaaccttgagatccaccctccacagcctcccaaactgctgggattacaggtgtgagccaccgcacgtagcatttacattaggtattacaagtaatgtaaagatgatttaagtatacaggaggatgtgaataggttatatgcaagcactatgcccttttatataagtgacttgaacatctgtgcccgattttagtatgtgcaggggggcgatctgggaatcagtcccctgtggataccaaggtacaactgtatttattaacgcttactagatgtgaggagagtctgaatattttcagtgatcttggctgtttcaaaaaaatctattgacttttcaataaatcagctgcaatccatttatttcatttacaaaagatttattgtaagcatctcaatcttggtttgtcagtttatcttaagcatgtcaattcataaaaacaagtcatttttgtatttttcatctttaagaatgcttaaaaaagctaatccctaaaatagttagatctttgtaaatgcatattaaataataaagtatgacccacattactttttatgggtgaaaataagacaaaaataatagttttagtgaggatggtgctgagtaaacataaaaactgatttgctctcagctgatgtgtcctgtacacagtgggaagattttagttcacacttagtctaactcccccattttacagatttctcactatatatatttctagaaggggctatgcatattcaatgtattgagaaccaaagcaaccacaaatgcataaatgcataatttatggtcttcaaccaaggccacataataacccagttaacttactctttaaccaggaatattaagttctataactagtactcaaggtttaaccttaaaattaagatttccttaaccttaaccttaaaattgatattatattaaacatacataatacaatgtaactccactgttctcctgaatattttttgctctaatctctctgccgaaagtcaaagtgatgggagaattggtatactggtatgactacgtcttaagtcagatttttatttatgagtctttgagactaaattcaatcaccaccaggtatcaaatcaacttttatgcagcaaatatatgattctagtgtctgacttttgttaaattcagtaatgcagtttttaaaaacctgtatctgacccactttgtaatttttgctccaatatccattctgtagacttttgaaaaaaaagtttttaatttgatgcccaatatattctgaccgttaaaaaattcttgttcatatgggagaagggggagtaatgacttgtacaaacagtatttctggtgtatattttaatgtttttaaaaagagtaatttcatttaaatatctgttattcaaatttgatgatgttaaatgtaatataatgtattttctttttattttgcactctgtaattgcactttttaagtttgaagagccattttggtaaacggtttttattaaagatgctatggaacataaagttgtattgcatgcaatttgaagtaacttatttgactatgaatgttatcggattactgaattgtatcaatttgtttgtgttcaatatcagctttgataattgtgtaccttaagatattgaaggagaaaatagataatttacaagatattattaatttttatttatttttcttgggaattgaaaaaaattgaaataaataaaaatgcattgaacatcttgcattcaaaatc

SEQ ID NO: 117762 - DNA, 510 bp, Artificial Sequence
  derived and/or modified sequence
atgaccgccggcagaagaatggagatgctgtgcgccggcagagtgcccgccctgctgctgtgcctgggcttccacctgctgcaggccgtgctgagcaccaccgtgatccccagctgcatccccggcgagagcagcgacaactgcaccgccctggtgcagaccgaggacaaccccagagtggcccaggtgagcatcaccaagtgcagcagcgacatgaacggctactgcctgcacggccagtgcatctacctggtggacatgagccagaactactgcagatgcgaggtgggctacaccggcgtgagatgcgagcacttcttcctgaccgtgcaccagcccctgagcaaggagtacgtggccctgaccgtgatcctgatcatcctgttcctgatcaccgtggtgggcagcacctactacttctgcagatggtacagaaacagaaagagcaaggagcccaagaaggagtacgagagagtgaccagcggcgaccccgagctgccccaggtgtag

SEQ ID NO: 117763 - DNA, 510 bp, Artificial Sequence
  derived and/or modified sequence
atgaccgctggtcgcaggatggagatgctctgcgcggggcgcgttcccgcactgctcctgtgcttgggctttcatctgcttcaggcggtgctgagtacaacagtgatcccctcttgcataccgggcgagagttcggacaactgtaccgcactggtgcaaacagaggataacccaagggtggctcaggtctccataacgaagtgctcttccgacatgaatgggtactgtctccatggtcaatgcatatacttggtggacatgtcacagaattattgtcgttgtgaggtcgggtacacaggggtaagatgtgaacatttttttttaactgtgcaccagccattatcaaaagaatacgtggccctgaccgtcattttgataattctgtttctgattactgtggtcggctctacatattatttttgccggtggtaccgcaatcgtaaatcaaaggaacctaagaaagaatatgagcgggtgactagtggtgaccccgagctcccacaggtatag

SEQ ID NO: 117764 - DNA, 510 bp, Artificial Sequence
  derived and/or modified sequence
atgacagctggaagaaggatggagatgctgtgtgccggccgggtgcctgccctgctgctgtgcctgggcttccacctgctgcaggccgtgctgagcaccaccgtcatccccagctgcatccctggagagagcagtgacaactgcacagccctggtgcagacagaggacaacccccgggtggcccaggtgtccatcaccaagtgcagcagtgacatgaatggctactgcctgcacggccagtgcatctacctggtggacatgagccagaactactgccgctgtgaggtgggctacacaggagtgcgctgtgagcacttcttcctgactgtgcaccagcccctgagcaaggagtatgtggccctgaccgtcatcctgatcatcctcttcctgatcaccgtggtgggcagcacctactacttctgccgctggtacagaaacaggaagagcaaggagcccaagaaggagtatgaaagagtgaccagcggggaccctgagctgccccaggtgtag

SEQ ID NO: 117765 - DNA, 510 bp, Artificial Sequence
  derived and/or modified sequence
atgaccgccggccggcggatggagatgctgtgcgccggccgggtgcctgctttactgctgtgtctggggtttcatcttttacaggccgtcttgagcactacagtgatcccatcttgcattccaggagaatcctctgataactgcaccgcactggtgcagactgaagacaacccccgagttgcccaggtgtctatcactaaatgttcatctgacatgaacggctattgtctgcatgggcagtgcatctatcttgtcgatatgtcccagaattattgcaggtgcgaagtgggatacacaggggtgagatgcgaacatttttttttgactgtgcaccagccattaagcaaggagtacgtagcgctgactgtgatcctgattatcctgttcctgatcacggttgtgggttctacttactatttctgcaggtggtaccgtaacaggaaatccaaggagcccaagaaggaatatgaacgagtgacctcgggagatcctgagcttcctcaggtctag

SEQ ID NO: 117766 - RNA, 510 nt, Artificial Sequence
  derived and/or modified sequence
augacagcgggucggcggauggaaauguugugcgcugggcgugugccugcccuccuccugugccugggguuucaucugcugcaagccguccuuucaacuaccguuaucccguccuguauuccaggugagagcagcgauaacuguacagcccuggugcagacagaagacaacccccgaguugcccagguuucaauuacgaaguguagcucagauaugaauggguauuguuugcauggccagugcaucuauuuaguugacaugucucagaauuauugucggugugagguggguuacacuggggucagaugugagcauuucuuccugacugugcaucagccauuauccaaagaguacguagcucugacagugaucuuaaucauccuguuccucauaacuguagugggaucuacguauuauuuuugccggugguauagaaauaggaagagcaaagaaccaaaaaaggaguacgagcgugucaccagcggcgacccagagcuuccccagguguag

SEQ ID NO: 117767 - RNA, 510 nt, Artificial Sequence
  derived and/or modified sequence
augaccgcaggaaggcgaauggagaugcucugcgccggaagggugcccgcauugcuucuuugccugggcuuccaccuucuccaagccguucuaaguaccacgguuauccccucauguaucccgggcgagucuuccgauaacuguacugcuuuggugcagaccgaagauaaucccagagucgcgcaggugucaaucacuaaauguagcuccgauaugaauggcuauuguuugcacggccaguguauuuaccuaguggacaugagucagaauuacuguagaugcgaagugggcuauaccgggguuaggugugagcacuuuuuccugaccguccaccaaccacugucuaaggaguaugucgcuuuaaccguuauucucauaauacuguuccucauaaccguggucggcucuacauauuauuuuugccggugguacagaaauaggaaguccaaagagccaaaaaaagaauacgaacgagucacaaguggugauccagagcugccccaaguguag

SEQ ID NO: 117768 - protein, 977 aa, Artificial Sequence
  derived and/or modified sequence
MPARRLLLLLTLLLPGLGIFGSTSTVTLPETLLFVSTLDGSLHAVSKRTGSIKWTLKEDPVLQVPTHVEEPAFLPDPNDGSLYTLGSKNNEGLTKLPFTIPELVQASPCRSSDGILYMGKKQDIWYVIDLLTGEKQQTLSSAFADSLCPSTSLLYLGRTEYTITMYDTKTRELRWNATYFDYAASLPEDDVDYKMSHFVSNGDGLVVTVDSESGDVLWIQNYASPVVAFYVWQREGLRKVMHINVAVETLRYLTFMSGEVGRITKWKYPFPKETEAKSKLTPTLYVGKYSTSLYASPSMVHEGVAVVPRGSTLPLLEGPQTDGVTIGDKGECVITPSTDVKFDPGLKSKNKLNYLRNYWLLIGHHETPLSASTKMLERFPNNLPKHRENVIPADSEKKSFEEVINLVDQTSENAPTTVSRDVEEKPAHAPARPEAPVDSMLKDMATIILSTFLLIGWVAFIITYPLSMHQQQQLQHQQFQKELEKIQLLQQQQQQLPFHPPGDTAQDGELLDTSGPYSESSGTSSPSTSPRASNHSLCSGSSASKAGSSPSLEQDDGDEETSVVIVGKISFCPKDVLGHGAEGTIVYRGMFDNRDVAVKRILPECFSFADREVQLLRESDEHPNVIRYFCTEKDRQFQYIAIELCAATLQEYVEQKDFAHLGLEPITLLQQTTSGLAHLHSLNIVHRDLKPHNILISMPNAHGKIKAMISDFGLCKKLAVGRHSFSRRSGVPGTEGWIAPEMLSEDCKENPTYTVDIFSAGCVFYYVISEGSHPFGKSLQRQANILLGACSLDCLHPEKHEDVIARELIEKMIAMDPQKRPSAKHVLKHPFFWSLEKQLQFFQDVSDRIEKESLDGPIVKQLERGGRAVVKMDWRENITVPLQTDLRKFRTYKGGSVRDLLRAMRNKKHHYRELPAEVRETLGSLPDDFVCYFTSRFPHLLAHTYRAMELCSHERLFQPYYFHEPPEPQPPVTPDAL

SEQ ID NO: 117769 - DNA, 2934 bp, Artificial Sequence
  derived and/or modified sequence
atgcccgccagaagactgctgctgctgctgaccctgctgctgcccggcctgggcatcttcggcagcaccagcaccgtgaccctgcccgagaccctgctgttcgtgagcaccctggacggcagcctgcacgccgtgagcaagagaaccggcagcatcaagtggaccctgaaggaggaccccgtgctgcaggtgcccacccacgtggaggagcccgccttcctgcccgaccccaacgacggcagcctgtacaccctgggcagcaagaacaacgagggcctgaccaagctgcccttcaccatccccgagctggtgcaggccagcccctgcagaagcagcgacggcatcctgtacatgggcaagaagcaggacatctggtacgtgatcgacctgctgaccggcgagaagcagcagaccctgagcagcgccttcgccgacagcctgtgccccagcaccagcctgctgtacctgggcagaaccgagtacaccatcaccatgtacgacaccaagaccagagagctgagatggaacgccacctacttcgactacgccgccagcctgcccgaggacgacgtggactacaagatgagccacttcgtgagcaacggcgacggcctggtggtgaccgtggacagcgagagcggcgacgtgctgtggatccagaactacgccagccccgtggtggccttctacgtgtggcagagagagggcctgagaaaggtgatgcacatcaacgtggccgtggagaccctgagatacctgaccttcatgagcggcgaggtgggcagaatcaccaagtggaagtaccccttccccaaggagaccgaggccaagagcaagctgacccccaccctgtacgtgggcaagtacagcaccagcctgtacgccagccccagcatggtgcacgagggcgtggccgtggtgcccagaggcagcaccctgcccctgctggagggcccccagaccgacggcgtgaccatcggcgacaagggcgagtgcgtgatcacccccagcaccgacgtgaagttcgaccccggcctgaagagcaagaacaagctgaactacctgagaaactactggctgctgatcggccaccacgagacccccctgagcgccagcaccaagatgctggagagattccccaacaacctgcccaagcacagagagaacgtgatccccgccgacagcgagaagaagagcttcgaggaggtgatcaacctggtggaccagaccagcgagaacgcccccaccaccgtgagcagagacgtggaggagaagcccgcccacgcccccgccagacccgaggcccccgtggacagcatgctgaaggacatggccaccatcatcctgagcaccttcctgctgatcggctgggtggccttcatcatcacctaccccctgagcatgcaccagcagcagcagctgcagcaccagcagttccagaaggagctggagaagatccagctgctgcagcagcagcagcagcagctgcccttccacccccccggcgacaccgcccaggacggcgagctgctggacaccagcggcccctacagcgagagcagcggcaccagcagccccagcaccagccccagagccagcaaccacagcctgtgcagcggcagcagcgccagcaaggccggcagcagccccagcctggagcaggacgacggcgacgaggagaccagcgtggtgatcgtgggcaagatcagcttctgccccaaggacgtgctgggccacggcgccgagggcaccatcgtgtacagaggcatgttcgacaacagagacgtggccgtgaagagaatcctgcccgagtgcttcagcttcgccgacagagaggtgcagctgctgagagagagcgacgagcaccccaacgtgatcagatacttctgcaccgagaaggacagacagttccagtacatcgccatcgagctgtgcgccgccaccctgcaggagtacgtggagcagaaggacttcgcccacctgggcctggagcccatcaccctgctgcagcagaccaccagcggcctggcccacctgcacagcctgaacatcgtgcacagagacctgaagccccacaacatcctgatcagcatgcccaacgcccacggcaagatcaaggccatgatcagcgacttcggcctgtgcaagaagctggccgtgggcagacacagcttcagcagaagaagcggcgtgcccggcaccgagggctggatcgcccccgagatgctgagcgaggactgcaaggagaaccccacctacaccgtggacatcttcagcgccggctgcgtgttctactacgtgatcagcgagggcagccaccccttcggcaagagcctgcagagacaggccaacatcctgctgggcgcctgcagcctggactgcctgcaccccgagaagcacgaggacgtgatcgccagagagctgatcgagaagatgatcgccatggacccccagaagagacccagcgccaagcacgtgctgaagcaccccttcttctggagcctggagaagcagctgcagttcttccaggacgtgagcgacagaatcgagaaggagagcctggacggccccatcgtgaagcagctggagagaggcggcagagccgtggtgaagatggactggagagagaacatcaccgtgcccctgcagaccgacctgagaaagttcagaacctacaagggcggcagcgtgagagacctgctgagagccatgagaaacaagaagcaccactacagagagctgcccgccgaggtgagagagaccctgggcagcctgcccgacgacttcgtgtgctacttcaccagcagattcccccacctgctggcccacacctacagagccatggagctgtgcagccacgagagactgttccagccctactacttccacgagccccccgagccccagccccccgtgacccccgacgccctgtag

SEQ ID NO: 117770 - DNA, 4005 bp, Artificial Sequence
  derived and/or modified sequence
tgcctagtcagttctgcgtccgctgaggctcggtcaccgcctcgctgtcgtcgcggcgcccccgccccgtcctctgtccgtaccgcccccggagccagggccgagtcctcgccatgccggcccggcggctgctgctgctgctgacgctgctgctgcccggcctcgggatttttggaagtaccagcacagtgacgcttcctgaaaccttgttgtttgtgtcaacgctggatggaagtttgcatgctgtcagcaagaggacaggctcaatcaaatggactttaaaagaagatccagtcctgcaggtcccaacacatgtggaagagcctgcctttctcccagatcctaatgatggcagcctgtatacgcttggaagcaagaataatgaaggcctgacgaaacttccttttaccatcccagaattggtgcaggcatccccatgccgaagttcagatggaatcctctacatgggtaaaaagcaggacatctggtatgttattgacctcctgaccggagagaagcagcagactttgtcatcggcctttgcagatagtctctgcccatcaacctctcttctgtatcttgggcgaacagaatacaccatcaccatgtacgacaccaaaacccgagagctccggtggaatgccacctactttgactatgcggcctcactgcctgaggacgacgtggactacaagatgtcccactttgtgtccaatggtgatgggctggtggtgactgtggacagtgaatctggggacgtcctgtggatccaaaactacgcctcccctgtggtggccttttatgtctggcagcgggagggtctgaggaaggtgatgcacatcaatgtcgctgtggagaccctgcgctatctgaccttcatgtctggggaggtggggcgcatcacaaagtggaagtacccgttccccaaggagacagaggccaagagcaagctgacgcccactctgtatgttgggaaatactctaccagcctctatgcctctccctcaatggtacacgagggggttgctgtcgtgccccgcggcagcacacttcctttgctggaagggccccagactgatggcgtcaccattggggacaagggggagtgtgtgatcacgcccagcacggacgtcaagtttgatcccggactcaaaagcaagaacaagctcaactacttgaggaattactggcttctgataggacaccatgaaaccccactgtctgcgtctaccaagatgctggagagatttcccaacaatctacccaaacatcgggaaaatgtgattcctgctgattcagagaaaaagagctttgaggaagttatcaacctggttgaccagacttcagaaaacgcacctaccaccgtgtctcgggatgtggaggagaagcccgcccatgcccctgcccggcccgaggcccccgtggactccatgcttaaggacatggctaccatcatcctgagcaccttcctgctgattggctgggtggccttcatcatcacctatcccctgagcatgcatcagcagcagcagctccagcaccagcagttccagaaggaactggagaagatccagctcctgcagcagcagcagcagcagctgcccttccacccacctggagacacggctcaggacggcgagctcctggacacgtctggcccgtactcagagagctcgggcaccagcagccccagcacgtcccccagggcctccaaccactcgctctgctccggcagctctgcctccaaggctggcagcagcccctccctggaacaagacgatggagatgaggaaaccagcgtggtgatagttgggaaaatttccttctgtcccaaggatgtcctgggccatggagctgagggcacaattgtgtaccggggcatgtttgacaaccgcgacgtggccgtgaagaggatcctccccgagtgttttagcttcgcagaccgtgaggtccagctgttgcgagaatcggatgagcacccgaacgtgatccgctacttctgcacggagaaggaccggcaattccagtacattgccatcgagctgtgtgcagccaccctgcaagagtatgtggagcagaaggactttgcgcatctcggcctggagcccatcaccttgctgcagcagaccacctcgggcctggcccacctccactccctcaacatcgttcacagagacctaaagccacacaacatcctcatatccatgcccaatgcacacggcaagatcaaggccatgatctccgactttggcctctgcaagaagctggcagtgggcagacacagtttcagccgccgatctggggtgcctggcacagaaggctggatcgctccagagatgctgagcgaagactgtaaggagaaccctacctacacggtggacatcttttctgcaggctgcgtcttttactacgtaatctctgagggcagccacccttttggcaagtccctgcagcggcaggccaacatcctcctgggtgcctgcagccttgactgcttgcacccagagaagcacgaagacgtcattgcacgtgaattgatagagaagatgattgcgatggatcctcagaaacgcccctcagcgaagcatgtgctcaaacacccgttcttctggagcctagagaagcagctccagttcttccaggacgtgagcgacagaatagaaaaggaatccctggatggcccgatcgtgaagcagttagagagaggcgggagagccgtggtgaagatggactggcgggagaacatcactgtccccctccagacagacctgcgtaaattcaggacctataaaggtggttctgtcagagatctcctccgagccatgagaaataagaagcaccactaccgggagctgcctgcagaggtgcgggagacgctggggtccctccccgacgacttcgtgtgctacttcacatctcgcttcccccacctcctcgcacacacctaccgggccatggagctgtgcagccacgagagactcttccagccctactacttccacgagcccccagagccccagcccccagtgactccagacgccctctgagcgagggcggcccctctgttctggtggccccagctgtgactgagggcctggtcaccacaattagagcttgatgcctcccggctttgcagggagaccaggcttcccaaaccaagtgccttgagctgcctgctctgcagcccacagaggacagtgctgaccccaggaagtgggagaagtggcccctcgtgacctacagggaactgggaagatgctggccccaaaagccttacggtcatgatgtctgcaaaggagggcctcagagacagcgcgagtagcacccccagccatctactggataaacttgcttcagactttttaaattcctgcttaatgtcagtctacaggcctttcaggaagggagaggagggaatcgtacattttgcttgcgtgctgggacagctaggctgagatgcaccaagtacagccttcactggagaccggaattgagaggtgggggatgctgaggagggggaggacggagttcagagggtgtcgtcctgcagtgtgagatttctcattgatcacagatgtgcccagagtagcccaggtcactgttaactagtgtttctgcagaggcagcaggagccatgagcatgaggtgtggcattagggactggtcagctatgcatgctggcaggtggggttgtgtctgcaggtctcagaaatgaagaggctgctctgttctggaggcagccgtggcccagtgccagtggccagaacagtggcctttggtgggtgtgtcccgggccatctcggggtggtgctcaggagcgcctggggcaagaggtaaagagttccctggccttcaaggagagcagcgaagacccagacaggggccagccttcaggaccagagggaggccgccgaatgggaccctcctggtcaccaggagaaagccctgggccagcgagtaggcagtcaaactccttcgtccccaaggccggtggaacaagaggct

SEQ ID NO: 117771 - DNA, 2934 bp, Artificial Sequence
  derived and/or modified sequence
atgcctgcgagacgcctgttgctcttacttactctgctgttgccaggacttgggatcttcggctctacatccactgtgacactgcccgaaactctcctgtttgtttctacacttgacgggagcctgcatgctgtttcaaaacggacaggcagcattaaatggactctgaaggaagatccggtgctgcaggtgccgacccacgtggaggagccagctttcctccccgatccaaatgacggaagcctctatacgctaggatcaaaaaataacgaaggacttacaaagttgccgttcaccattccggagctcgtgcaggctagcccttgccgctctagcgacgggattctatatatgggcaagaaacaggacatctggtatgtcatcgacttgttgacaggggaaaagcagcagacactgtcttcagcttttgccgactcgttgtgcccctcaaccagcctgctttatctggggaggacagagtacacgatcactatgtacgacacaaaaacacgggagctgcggtggaacgcaacatattttgactacgccgcgtctctacccgaagatgatgtcgattacaagatgagccattttgtctctaatggtgacggcctcgttgttaccgtggatagcgagtccggagatgtgttgtggatccagaactatgctagccctgtggttgccttttacgtgtggcaacgcgaaggcctcaggaaagtgatgcatattaatgtggcagttgagaccctccggtaccttacttttatgtccggcgaagtcggacgtataaccaagtggaaataccctttcccaaaagagaccgaagcaaagagtaagctgacacctacattgtacgtggggaaatactcaacctccctgtacgcctctcccagcatggtccatgaaggtgtcgccgtggttccacggggttccaccctgcctctgttggagggccctcagacagacggagtcacaatcggcgataaaggggaatgtgtaatcactccctccactgatgtcaaattcgatcccgggctaaaatcaaagaacaagttgaattatctgcgaaattactggcttttgataggccaccatgagaccccgctcagcgcctcgactaagatgctggagaggttccccaacaatcttcctaaacatagagagaatgtgatccccgccgactccgagaagaaatccttcgaggaggtcataaaccttgtagaccagacgtcggaaaatgcacccactactgtctcacgcgacgtggaagagaaaccagcccacgcccccgcccggccggaggcacccgtggatagcatgctgaaagacatggccacgatcatcctttctacgttcctcctcatcggctgggtcgccttcataatcacgtacccattatccatgcaccaacagcaacagctgcagcatcagcaattccagaaggagctggagaaaattcagcttctgcagcaacagcaacagcagctgcctttccatccccccggcgataccgctcaggacggagagctgctcgacacatcaggcccctacagtgaaagtagcggaacttcatcccctagtacctctccaagggctagcaaccacagcctttgctcaggcagtagtgcctctaaggcgggttcatcccctagtctggaacaggacgacggggacgaggaaactagtgtggtgatagttggaaagatctcgttctgccctaaggatgtgctggggcacggtgctgagggcacaatcgtgtatcgaggcatgttcgataatcgcgacgtggccgtgaaaagaatcctgccagaatgtttcagttttgccgatcgggaggtacagttgctacgggagagtgatgagcacccgaatgtaatcagatacttttgcaccgagaaggacagacagttccagtatatcgccatcgaactatgtgcagctaccttgcaggaatatgtggagcagaaagatttcgctcacctcggtctggaacccatcacccttctgcagcagactacaagcgggttggcacaccttcattctttaaatatcgtgcatcgggacctcaagccacacaatattcttatcagcatgcctaatgctcatggcaagataaaagctatgatctctgatttcgggctctgcaaaaaactggctgtaggaagacattccttctcacggcggtctggagtgcccgggacggaaggttggatcgctccagagatgctgtctgaagattgtaaggagaaccctacatatacagtggatatctttagcgcaggatgcgttttctattatgtgatctccgaaggcagtcacccttttggtaagtcactgcagaggcaggctaacatactactgggcgcctgtagtctagattgtctgcatcccgagaagcacgaagatgtgatcgcacgggagctgattgagaagatgattgctatggaccctcagaaacggccttctgcgaaacacgtcctgaagcacccctttttttggtccttggaaaaacaactgcaattcttccaggacgttagcgaccgaattgagaaggagtcactcgacggaccaattgtgaaacagctggagcgcggaggcagagccgtggtaaaaatggattggagggagaatataacggtgcctttacaaacggacctccgaaagtttcgcacatataagggcgggtcggttagagaccttctgagagctatgcggaataagaagcaccactaccgcgagttgccagcagaggtgcgtgagacactgggctcgctaccggacgactttgtgtgctactttacttcccgcttccctcacctgctggcccatacttatagagccatggaactatgtagtcatgagcggcttttccaaccatactattttcacgaacctccagagccccagcccccagtgacacccgacgcactgtag

SEQ ID NO: 117772 - DNA, 2934 bp, Artificial Sequence
  derived and/or modified sequence
atgcctgcccggcggctgctgctgctgctgaccctgctgctgcccggcctgggcatcttcggcagcaccagcacagtgaccctgcctgagaccctgctgtttgtgtccaccctggatggcagcctgcatgctgtgtccaagaggacaggcagcatcaagtggaccctgaaggaggaccctgtgctgcaggtgcccacccacgtggaggagcccgccttcctgcctgaccccaatgatggcagcctgtacaccctgggcagcaagaacaatgaaggcctgaccaagctgcccttcaccatccctgagctggtgcaggccagcccctgccgcagcagtgatggcatcctgtacatgggcaagaagcaggacatctggtacgtgattgacctgctgaccggggagaagcagcagaccctgagcagcgcctttgctgacagcctgtgccccagcaccagcctgctgtacctgggccgcacagagtacaccatcaccatgtatgacaccaagacccgggagctgcgctggaatgccacctactttgattatgctgccagcctgcctgaagatgatgtggactacaagatgagccactttgtgtccaatggagatggcctggtggtgacagtggacagcgagagcggagatgtgctgtggatccagaactatgccagccctgtggtggccttctacgtgtggcagcgggagggcctgaggaaggtgatgcacatcaacgtggccgtggagaccctgcgctacctgaccttcatgtctggagaggtgggccgcatcaccaagtggaagtaccccttccccaaggagacagaggccaagagcaagctgacccccaccctgtatgtgggcaagtacagcaccagcctgtatgccagccccagcatggtgcatgaaggagtggccgtggtgccccggggcagcaccctgcccctgctggagggcccccagacagatggagtgaccatcggggacaagggagaatgtgtgatcacccccagcacagatgtgaagtttgaccccggcctgaagagcaagaacaagctgaactacctgaggaactactggctgctgattggccaccacgagacccccctgagcgccagcaccaagatgctggagcgcttccccaacaacctgcccaagcaccgggagaatgtcatcccagctgacagcgagaagaagagctttgaggaggtgatcaacctggtggaccagaccagtgaaaatgcccccaccaccgtgtccagagatgtggaggagaagccagcccacgccccagcccggcctgaggcccctgtggacagcatgctgaaggacatggccaccatcatcctgagcaccttcctgctgattggctgggtggccttcatcatcacctaccccctgtccatgcaccagcagcagcagctgcagcaccagcagttccagaaggagctggagaagatccagctgctgcagcagcagcagcagcagctgcccttccaccccccaggggacacagcccaggatggagagctgctggacaccagcggcccctacagcgagagcagcggcaccagcagccccagcaccagcccccgggccagcaaccacagcctgtgcagcggcagcagcgccagcaaggccggcagcagccccagcctggagcaggatgatggagatgaggagacctctgtggtgattgtgggcaagatctccttctgccccaaggatgtgctgggccatggagctgagggcaccatcgtgtaccggggcatgtttgacaacagagatgtggccgtgaagaggatcctgcctgagtgcttctcctttgctgaccgggaggtgcagctgctgcgggagagtgatgagcaccccaacgtcatccgctacttctgcacagagaaggaccggcagttccagtacatcgccatcgagctgtgtgccgccaccctgcaggagtatgtggagcagaaggactttgcccacctgggcctggagcccatcaccctgctgcagcagaccaccagcggcctggcccacctgcacagcctgaacatcgtgcaccgggacctgaagccccacaacatcctgatctccatgcccaatgcccacggcaagatcaaggccatgatcagtgactttggcctgtgcaagaagctggccgtgggccgccacagcttcagcagaagaagtggagtgcccggcacagagggctggatcgcccctgagatgctgtctgaggactgcaaggagaaccccacctacacagtggacatcttctctgctggctgtgtgttctactacgtgatcagcgagggcagccacccctttgggaagagcctgcagaggcaggccaacatcctgctgggcgcctgcagcctggactgcctgcaccctgagaagcatgaagatgtgattgcccgggagctgattgagaagatgattgccatggacccccagaagaggcccagcgccaagcacgtgctgaagcaccccttcttctggagcctggagaagcagctgcagttcttccaggatgtgtctgacagaattgagaaggagagcctggatggccccatcgtgaagcagctggagcggggcggccgggctgtggtgaagatggactggagggagaacatcaccgtgcccctgcagacagacctgaggaagttccgcacctacaagggcggctctgtgcgggacctgctgcgggccatgaggaacaagaagcaccactaccgggagctgcctgctgaggtgcgggagaccctgggcagcctgcctgatgactttgtgtgctacttcaccagccgcttcccccacctgctggcccacacctaccgggccatggagctgtgcagccatgagcggctcttccagccctactacttccacgagcccccagagccccagccccctgtgaccccagatgccctgtag

SEQ ID NO: 117773 - DNA, 2934 bp, Artificial Sequence
  derived and/or modified sequence
atgcccgcccggcggctgctgctgctgctgaccctgctgctgcccggcctgggcatcttcgggtcaacatcaacagtgacattgccagaaacattacttttcgtgtctaccctcgacggcagcctgcacgccgtgtccaaaaggaccggaagcattaagtggacactgaaggaggaccctgttcttcaggtgcccacacatgtggaagagcccgcattcctgcccgatccaaatgacggctctttatatacgctcggaagcaagaacaacgagggcctgacaaagctgccgttcacgatccctgagctggtgcaggctagcccttgccgctcatcagatggtatcctctacatgggaaaaaaacaagatatctggtacgtgatagatctcctcacgggcgagaagcagcaaacactgtcgagcgcattcgctgatagtctttgtccgtctacttcactgctctatctgggtagaactgagtatacaattactatgtatgacaccaaaactagggaactccggtggaacgccacatatttcgactatgccgcgtctctgccggaggatgatgtcgactataagatgagccacttcgtgagcaacggcgacggacttgtggttacagtggacagtgaaagcggcgacgtgctgtggattcaaaactatgcctctccagtagtggccttttatgtctggcagcgagaaggtctacgcaaagtgatgcatatcaatgtggctgtggagacccttaggtatttgacatttatgtcaggggaagtcggacgaatcactaaatggaagtatccatttccaaaagaaacagaagccaaatcaaaactgacaccgacactctacgtgggaaaatacagcacctcactgtacgcctcgcccagcatggtgcatgagggcgttgcagtagttcctcgaggctcaacgctgcccctcctcgagggtcctcagaccgatggggtcacaatcggtgacaagggggaatgtgttattacgcccagcactgacgtgaagttcgaccccgggctgaagagcaaaaataaactgaattaccttcggaactattggttactcatcgggcatcatgagactccactgtccgcttccaccaagatgctggagagatttccaaataatctgcccaagcatagagaaaatgtgatacccgcagactccgagaaaaagtctttcgaggaggtgattaaccttgtcgatcaaacctccgagaacgcacccactaccgtaagcagggacgtcgaggaaaaacctgcacatgcacctgccagaccagaagctcctgtcgatagcatgctcaaagacatggccaccataatactctcgactttcctgctgatcggttgggtcgcgttcatcatcacgtatccactgagtatgcatcagcaacagcaactgcagcaccagcagttccagaaggagttggaaaagatccagctcctgcaacagcagcagcagcagttaccattccaccctccgggtgatacggctcaggatggagaactcctcgacacctctgggccttacagcgagagtagcggtacgagttctcctagcacaagtccacgggcttccaatcactcactttgcagtggatcaagcgcgagcaaagcggggtcctcccccagtctggagcaagacgatggtgacgaagagacctccgtcgtaatcgtaggtaagattagtttttgtcccaaggatgtgcttggacacggagctgagggtaccattgtttaccggggcatgtttgataatcgcgacgtagccgttaagcggattctgcctgagtgttttagttttgccgatcgcgaagtacagctgctccgcgagtcagacgagcaccctaacgtgattaggtatttctgcacagaaaaggatcgccagtttcagtatatcgctatcgagttgtgcgccgccaccctgcaggagtatgtggagcagaaagactttgcccatcttgggctggaacctataaccctgctccaacaaacaactagcgggcttgcacatctgcactcgttgaatatcgtgcacagggatctgaaaccccataacatcttgatttcaatgccgaatgctcacgggaagatcaaggccatgatctccgactttggtctgtgcaagaagctggctgtgggacgccattctttcagtaggaggtctggcgttcctggcactgaggggtggattgcccctgaaatgctgagcgaggactgcaaggagaaccctacctatacagttgacatcttcagtgcaggatgcgtgttttactatgtcatttccgagggaagccacccattcggaaaaagcctgcagcgccaggctaacatcctcttgggcgcatgtagcctggactgcctgcaccctgagaaacacgaggacgtcatcgcacgagaactgatagagaagatgattgcgatggaccctcaaaaacggccatcagcaaaacacgtgctgaaacacccttttttctggagcctcgagaagcaactgcagttcttccaggacgtgtccgacagaatcgagaaggagtcactcgatgggccaattgtgaagcagttagaaaggggggggcgcgccgtagtgaaaatggattggagagagaatattacggtgcctcttcagacagacctccggaaattcagaacgtataaaggaggaagcgttagagatctgcttcgagctatgcgcaacaagaagcaccactatcgcgagttgcccgccgaggtccgcgagacgctgggtagtttgcctgacgacttcgtctgttatttcaccagtaggtttcctcacttattggcacacacctaccgagcgatggaactctgctctcacgaaagactctttcagccatactactttcacgagccccccgagccccaacccccagtcaccccagatgccctctag

SEQ ID NO: 117774 - DNA, 2934 bp, Artificial Sequence
  derived and/or modified sequence
atgccagccagacgtctgctgctgctgctgactctcctattgcccggtttaggtatcttcggaagtacaagcactgtgaccttgcccgagaccctactgtttgtatctacgcttgatggtagtctgcatgccgtcagtaagcgcaccgggagcattaaatggactctgaaggaggaccccgttctgcaagttccaacacatgtggaggaacctgcattccttcccgatcccaatgacggcagtctgtacacgctcggatcaaagaacaatgaagggctgacaaaactgcctttcacaatcccagagctggtccaggccagcccctgcagaagcagcgatggcattctatatatgggaaaaaagcaagacatctggtatgtcatcgaccttctgaccggggagaaacaacaaacgctgtccagtgcgttcgccgactctctgtgtccttccaccagcctattgtatttgggcagaaccgagtacacaattacgatgtatgacacgaagactcgcgagctgaggtggaacgcgacttacttcgactacgccgcaagtttgccggaggacgatgtagactacaagatgagtcacttcgtgtcgaacggagatgggttggtggtaactgtggacagtgagtccggcgacgtcctgtggatccagaactatgcctcacctgtagtcgctttctacgtgtggcagcgcgaaggcctccgaaaagtcatgcacatcaacgtcgctgtggaaaccctgcgatacctcacctttatgagtggcgaagttggacgcatcaccaagtggaaatatccattccctaaagaaactgaggcaaaatccaaacttacgcccacgctctacgtcgggaaatatagcacttccctgtacgcaagcccctccatggtgcatgagggggttgcggtggttccgcgaggaagcacgttgcctctcttagaaggccctcagaccgacggcgtcacgatcggtgacaaaggggaatgcgttatcaccccttctacggatgtgaagttcgaccccggtctgaagtctaagaacaaattaaactacctgcggaactattggttattaattggacaccacgagacccccctgtccgcgtccactaagatgctggaacgattcccaaataacttgccaaaacatagggaaaatgtgataccagctgattctgaaaaaaaatcattcgaagaggttatcaacctggtggaccagacttcggaaaacgcacctacaacagtttcacgagacgtggaggaaaaaccagcccacgcccctgcgcgacccgaggccccagtggactcaatgctgaaagacatggcaactataattctaagcacctttctcttgattggatgggtggcctttatcataacctacccccttagtatgcaccagcagcagcagctgcagcaccaacaattccagaaggagcttgaaaaaatccaactcttgcagcagcaacagcagcagctccccttccacccaccgggagatacagcgcaggacggagagctgctggacacttccggcccatatagcgagagtagcggaacctcatcgccctccactagtcctagagcaagcaatcactccctgtgctctggctcctcggccagcaaagccggttcatccccctctcttgaacaggatgacggcgacgaagaaacgagtgttgttattgtcggcaaaatttctttttgccctaaagacgtcttaggacacggagcggaaggcactattgtctacaggggaatgtttgacaatagggacgttgcagttaaacgcattctgcctgaatgcttctccttcgcagatagagaagtccaactgctgagagagagtgacgaacatccaaatgtcattcgttatttctgtaccgagaaagaccgccagtttcagtacatcgccattgagctatgcgcagccacactccaagagtatgtcgagcagaaggacttcgcacatctgggtctggaacctatcacacttcttcagcagacgacttccgggctggcgcaccttcattcgcttaacattgtgcatagagatttaaagccgcataatatcttgatctcaatgcctaacgcccatggcaaaatcaaggcaatgatcagcgatttcggactgtgcaagaaactggccgtgggacgtcattcattctctcgtcgatctggagtgcccggtactgaggggtggatcgcgcctgagatgttaagcgaggactgcaaggaaaacccaacctacaccgtggatatcttctccgctgggtgcgtattctactacgtgattagcgaaggctcccatcccttcggtaaatccctgcagcggcaggcaaacatcctcctaggcgcatgctcactcgattgcctgcacccagaaaagcacgaagacgtcatcgccagagaactcattgaaaagatgattgccatggaccctcagaagcgccctagcgcaaagcatgtgcttaagcatcccttcttctggagcctagaaaaacagctccagttcttccaggatgtgtcagaccgcattgaaaaggagtccctcgacgggccaatcgtgaaacagctcgaaagagggggaagggcggtggtgaaaatggattggcgcgagaatattacagttccacttcagacagatctgcggaaatttcggacttataagggaggaagcgtgcgggacttgctgcgagcaatgaggaacaaaaaacatcattacagagagctgccggcagaggtcagagagaccctgggcagtttgccagatgactttgtctgctatttcacgagtcgattcccacatcttttagctcatacatatcgagcaatggaactttgtagtcacgagcgactgtttcagccatactactttcacgagcctcctgagcctcaaccacccgtgacccctgacgctctgtag

SEQ ID NO: 117775 - protein, 321 aa, Artificial Sequence
  derived and/or modified sequence
MKPGFSPRGGGFGGRGGFGDRGGRGGRGGFGGGRGRGGGFRGRGRGGGGGGGGGGGGGRGGGGFHSGGNRGRGRGGKRGNQSGKNVMVEPHRHEGVFICRGKEDALVTKNLVPGESVYGEKRVSISEGDDKIEYRAWNPFRSKLAAAILGGVDQIHIKPGAKVLYLGAASGTTVSHVSDIVGPDGLVYAVEFSHRSGRDLINLAKKRTNIIPVIEDARHPHKYRMLIAMVDVIFADVAQPDQTRIVALNAHTFLRNGGHFVISIKANCIDSTASAEAVFASEVKKMQQENMKPQEQLTLEPYERDHAVVVGVYRPPPKVKN

SEQ ID NO: 117776 - protein, 458 aa, Artificial Sequence
  derived and/or modified sequence
MDSVELCLPESFSLHYEEELLCRMSNKDRHIDSSCSSFIKTEPSSPASLTDSVNHHSPGGSSDASGSYSSTMNGHQNGLDSPPLYPSAPILGGSGPVRKLYDDCSSTIVEDPQTKCEYMLNSMPKRLCLVCGDIASGYHYGVASCEACKAFFKRTIQGNIEYSCPATNECEITKRRRKSCQACRFMKCLKVGMLKEGVRLDRVRGGRQKYKRRIDAENSPYLNPQLVQPAKKPYNKIVSHLLVAEPEKIYAMPDPTVPDSDIKALTTLCDLADRELVVIIGWAKHIPGFSTLSLADQMSLLQSAWMEILILGVVYRSLSFEDELVYADDYIMDEDQSKLAGLLDLNNAILQLVKKYKSMKLEKEEFVTLKAIALANSDSMHIEDVEAVQKLQDVLHEALQDYEAGQHMEDPRRAGKMLMTLPLLRQTSTKAVQHFYNIKLEGKVPMHKLFLEMLEAKV

SEQ ID NO: 117777 - protein, 56 aa, Artificial Sequence
  derived and/or modified sequence
MSNKDRHIDSSCSSFIKTEPSSPASLTDSVNHHSPGGSSDASGSYSSTMNGHQNGL

SEQ ID NO: 117778 - DNA, 5253 bp, Artificial Sequence
  derived and/or modified sequence
aatcggggctttaagtccttgattaggagagtgtgagagctttggtcccaactggctgtgcctataggcttgtcactaggagaacatttgtgttaattgcactgtgctctgtcaaggaaactttgatttatagctggggtgcacaaataatggttgccggtcgcacatggattcggtagaactttgccttcctgaatctttttccctgcactacgaggaagagcttctctgcagaatgtcaaacaaagatcgacacattgattccagctgttcgtccttcatcaagacggaaccttccagcccagcctccctgacggacagcgtcaaccaccacagccctggtggctcttcagacgccagtgggagctacagttcaaccatgaatggccatcagaacggacttgactcgccacctctctacccttctgctcctatcctgggaggtagtgggcctgtcaggaaactgtatgatgactgctccagcaccattgttgaagatccccagaccaagtgtgaatacatgctcaactcgatgcccaagagactgtgtttagtgtgtggtgacatcgcttctgggtaccactatggggtagcatcatgtgaagcctgcaaggcattcttcaagaggacaattcaaggcaatatagaatacagctgccctgccacgaatgaatgtgaaatcacaaagcgcagacgtaaatcctgccaggcttgccgcttcatgaagtgtttaaaagtgggcatgctgaaagaaggggtgcgtcttgacagagtacgtggaggtcggcagaagtacaagcgcaggatagatgcggagaacagcccatacctgaaccctcagctggttcagccagccaaaaagccatataacaagattgtctcacatttgttggtggctgaaccggagaagatctatgccatgcctgaccctactgtccccgacagtgacatcaaagccctcactacactgtgtgacttggccgaccgagagttggtggttatcattggatgggcgaagcatattccaggcttctccacgctgtccctggcggaccagatgagccttctgcagagtgcttggatggaaattttgatccttggtgtcgtataccggtctctttcgtttgaggatgaacttgtctatgcagacgattatataatggacgaagaccagtccaaattagcaggccttcttgatctaaataatgctatcctgcagctggtaaagaaatacaagagcatgaagctggaaaaagaagaatttgtcaccctcaaagctatagctcttgctaattcagactccatgcacatagaagatgttgaagccgttcagaagcttcaggatgtcttacatgaagcgctgcaggattatgaagctggccagcacatggaagaccctcgtcgagctggcaagatgctgatgacactgccactcctgaggcagacctctaccaaggccgtgcagcatttctacaacatcaaactagaaggcaaagtcccaatgcacaaactttttttggaaatgttggaggccaaggtctgactaaaagctccctgggccttcccatccttcatgttgaaaaagggaaaataaacccaagagtgatgtcgaagaaacttagagtttagttaacaacatcaaaaatcaacagactgcactgataatttagcagcaagactatgaagcagctttcagattcctccataggttcctgatgagtttctttctactttctccatcatcttctttcctctttcttcccacatttctctttctctttattttttctccttttcttctttcacctcccttatttctttgcttctttcattcctagttcccattctcctttattttcttcccgtctgcctgccttctttcttttctttacctactctcattcctctcttttctcatccttccccttttttctaaatttgaaatagctttagtttaaaaaaaaatcctcccttccccctttcctttccctttctttcctttttccctttccttttccctttcctttcctttcctcttgaccttctttccatctttctttttcttccttctgctgctgaacttttaaaagaggtctctaactgaagagagatggaagccagccctgccaaaggatggagatccataatatggatgccagtgaacttattgtgaaccatactgtccccaatgactaaggaatcaaagagagagaaccaacgttcctaaaagtacagtgcaacatatacaaattgactgagtgcagtattagatttcatgggagcagcctctaattagacaacttaagcaacgttgcatcggctgcttcttatcattgcttttccatctagatcagttacagccatttgattccttaattgttttttcaagtcttccaggtatttgttagtttagctactatgtaactttttcagggaatagtttaagctttattcattcatgcaatactaaagagaaataagaatactgcaattttgtgctggctttgaacaattacgaacaataatgaaggacaaatgaatcctgaaggaagatttttaaaaatgttttgtttcttcttacaaatggagatttttttgtaccagctttaccacttttcagccatttattaatatgggaatttaacttactcaagcaatagttgaagggaaggtgcatattatcacggatgcaatttatgttgtgtgccagtctggtcccaaacatcaatttcttaacatgagctccagtttacctaaatgttcactgacacaaaggatgagattacacctacagtgactctgagtagtcacatatataagcactgcacatgagatatagatccgtagaattgtcaggagtgcacctctctacttgggaggtacaattgccatatgatttctagctgccatggtggttaggaatgtgatactgcctgtttgcaaagtcacagaccttgcctcagaaggagctgtgagccagtattcatttaagaggcaataaggcaaatgccagaattaaaaaaaaaaatcatcaaagacagaaaatgcctgaccaaattctaaaacctaatccatataagtttattcatttaggaatgttcgtttaaattaatctgcagtttttaccaagagctaagccaatatatgtgcttttcaaccagtattgtcacagcatgaaagtcaagtcaggttccagactgttaagaggtgtaatctaatgaagaaatcaattagatgccccgaaatctacagtcgctgaataaccaataaacagtaacctccatcaaatgctataccaatggaccagtgttagtagctgctccctgtattatgtgaacagtcttattctatgtacacagatgtaattaaaattgtaatcctaacaaacaaaagaaatgtagttcagcttttcaatgtttcatgtttgctgtgcttttctgaattttatgttgcattcaaagactgttgtcttgttcttgtggtgtttggattcttgtggtgtgtgcttttagacacagggtagaattagagacaatattggatgtacaattcctcaggagactacagtagtatattctattccttaccagtaataaggttcttcctaataataattaagagattgaaactccaaacaagtattcattatgaacagatacacatcaaaatcataataatattttcaaaacaaggaataatttctctaatggtttattatagaataccaatgtatagcttagaaataaaactttgaatatttcaagaatatagataagtctaatttttaaatgctgtatatatggctttcactcaatcatctctcagatgttgttattaactcgctctgtgttgttgcaaaactttttggtgcagattcgtttccaaaactattgctactttgtgtgctttaaacaaaataccttgggttgatgaaacatcaacccagtgctaggaatactgtgtatctatcattagctatatgggactatattgtagattgtggtttctcagtagagaagtgactgtagtgtgattctagataaatcatcattagcaattcattcagatggtcaataacttgaaatttatagctgtgataggagttcagaaattggcacatccctttaaaaataacaacagaaaatacaactcctgggaaaaaaggtgctgattctataagattatttatatatgtaagtgtttaaaaagattattttccagaaagtttgtgcagggtttaagttgctactattcaactacactatatataaataaaatatatacaatatatacattgttttcactgtatcacattaaagtacttgggcttcagaagtaagagccaaccaactgaaaacctgagatggagatatgttcaaagaatgagatacaattttttagttttcagtttaagtaactctcagcattacaaaagagtaagtatctcacaaataggaaataaaactaaaacgtggatttaaaaagaactgcacgggctttagggtaaatgctcatcttaaacctcactagagggaagtcttctcaagtttcaagcaagaccatttacttaatgtgaagttttggaaagttataaaggtgtatgttttagccatatgattttaattttaattttgcttcttttaggttcgttcttatttaaagcaatatgattgtgtgactccttgtagttacacttgtgtttcaatcagatcagattgttgtatttattccactattttgcatttaaatgataacataaaagatataaaaaatttaaaactgctatttttcttatagaagagaaaatgggtgttggtgattgtattttaattatttaagcgtctctgtttacctgcctaggaaaacattttatggcagtcttatgtgcaaagatcgtaaaaggacaaaaaatttaaactgcttataataatccaggagttgcattatagccagtagtaaaaataataataataataataaaaccatgtctatagctgtagatgggcttcacatctgtaaagcaatcaattgtatatttttgtgatgtgtaccatactgtgtgctccagcaaatgtccatttgtgtaaatgtatttattttatattgtatatattgttaaatgcaaaaaggagatatgattctgtaactccaatcagttcagatgtgtaactcaaattattatgcctttcaggatgatggtagagcaatattaaacaagcttccacttttgactgctaaaaaaaaaaaaaaaaa

SEQ ID NO: 117779 - DNA, 1377 bp, Artificial Sequence
  derived and/or modified sequence
atggattcggtagagttgtgcctcccagaatctttcagtctgcattatgaggaagaattactgtgcaggatgtccaataaggataggcatatagactcatcatgctcaagttttattaaaaccgaacctagtagccccgcttctctaactgacagtgtcaatcaccactcacctggcgggtcttctgacgcgagcggcagctactccagtacaatgaacgggcaccagaatgggctggatagcccacccttatatccttcagcccccattttaggaggaagtggtcccgtcagaaagctctatgatgattgcagctcgactattgtggaggaccctcagactaagtgcgagtacatgctgaacagcatgccgaaacgcctttgtctggtttgtggggacattgcctccggctatcactatggtgtggctagctgcgaggcatgcaaggctttttttaagagaaccattcaggggaatatcgaatattcctgcccagccactaacgaatgcgaaatcaccaagagaagacggaagagttgtcaggcatgccgattcatgaagtgtctcaaagttggcatgctcaaagagggtgtccgcctggacagggtgagaggtggccggcagaaatataagcggcgcattgacgcagagaactctccatatctcaatccccagctggtccaacccgctaaaaagccctacaataagatcgtctcccaccttctcgtggccgagccggagaagatttatgccatgcccgaccctactgtgcccgatagtgatattaaggcactgacgactttgtgcgacctggctgacagagaactggtggtgatcataggatgggccaaacacattccaggattctccaccttgtccctggctgatcagatgagcctcttacaatctgcgtggatggagatcctgatcctaggcgtggtgtatcggagtctgtccttcgaggatgaactggtctacgcagacgattatattatggatgaagaccagtctaagctggccggactcctagacctcaacaatgctatcctccagctggtgaagaaatataaatccatgaagctcgagaaagaagagttcgtgaccctgaaagccatagcactcgccaatagtgatagcatgcacattgaggatgtggaagctgttcaaaagttacaggacgtgcttcacgaagccctgcaggattacgaggctggtcagcacatggaagacccccgtcgcgcagggaaaatgttgatgaccttacccctcctgcggcagaccagcacgaaggcggtgcagcatttttataatatcaaacttgaagggaaagtgcctatgcataagctttttctcgagatgctcgaagcgaaagtatag

SEQ ID NO: 117780 - DNA, 1377 bp, Artificial Sequence
  derived and/or modified sequence
atggattctgtggagctgtgcctgcctgagagcttcagcctgcactatgaggaggagctgctgtgcaggatgagcaacaaggacagacacatcgacagcagctgcagcagcttcatcaagacagagcccagcagccctgccagcctgacagacagcgtgaaccaccacagccctgggggcagcagtgatgccagcggcagctacagcagcaccatgaatggccaccagaatggcctggacagcccccccctgtaccccagcgcccccatcctgggcggcagcggccctgtgaggaagctgtatgatgactgcagcagcaccatcgtggaggacccccagaccaagtgtgagtacatgctgaacagcatgcccaagaggctgtgcctggtgtgtggggacatcgccagcggctaccactacggcgtggccagctgtgaggcctgcaaggccttcttcaagaggaccatccagggcaacatcgagtacagctgcccagccaccaatgaatgtgagatcaccaagagaagaaggaagagctgccaggcctgccgcttcatgaagtgcctgaaggtgggcatgctgaaggagggcgtgcggctggacagagtgcggggcggccggcagaagtacaagagaagaattgatgctgagaacagcccctacctgaacccccagctggtgcagcctgccaagaagccctacaacaagatcgtgagccacctgctggtggccgagcctgagaagatctatgccatgccagaccccaccgtgcctgacagcgacatcaaggccctgaccaccctgtgtgacctggccgaccgggagctggtggtgatcatcggctgggccaagcacatccctggcttcagcaccctgagcctggccgaccagatgagcctgctgcagagcgcctggatggagatcctgatcctgggcgtggtgtaccgcagcctgagctttgaagatgagctggtgtatgcagatgactacatcatggatgaggaccagagcaagctggccggcctgctggacctgaacaatgccatcctgcagctggtgaagaagtacaagtccatgaagctggagaaggaggagtttgtgaccctgaaggccatcgccctggccaacagcgacagcatgcacattgaagatgtggaggccgtgcagaagctgcaggatgtgctgcacgaggccctgcaggactatgaggccggccagcacatggaggacccccggcgggccggcaagatgctgatgaccctgcccctgctgcggcagaccagcaccaaggctgtgcagcacttctacaacatcaagctggagggcaaggtgcccatgcacaagctgttcctggagatgctggaggccaaggtgtag

SEQ ID NO: 117781 - DNA, 1377 bp, Artificial Sequence
  derived and/or modified sequence
atggacagcgtggagctgtgcctgcccgagagcttcagcctgcactacgaggaagaattgctttgtcgcatgtctaacaaggacagacacatcgattcatcctgcagctccttcatcaagactgagcctagcagtccagcttcacttactgattctgtcaatcaccactctcccggtggctcaagcgacgcctcaggctcatactcaagtaccatgaatggacaccagaacgggctcgattcccctcctctataccctagcgctcccatacttgggggttctggcccagttcggaagttgtatgacgactgttctagcacaatcgtcgaagatccacaaaccaaatgcgaatatatgctgaacagcatgccaaaacgcctgtgtctcgtgtgcggtgacatcgcttcaggataccactatggcgttgcctcgtgtgaggcgtgcaaagccttttttaagcggacgatccaaggcaatatagagtattcatgccctgcgaccaacgagtgcgagatcacgaagcgaagacgaaagagttgccaggcatgccgattcatgaagtgcctgaaagttgggatgttgaaggaaggagtgcgcctagatcgcgttaggggaggtagacagaagtacaaacgcagaatcgacgcggaaaatagtccatatctcaatccccagcttgtgcagcctgccaaaaagccttacaacaagattgtttcccacttgctcgttgctgagcctgagaagatttacgccatgcctgaccctactgttccagactccgatatcaaagcactcacaaccctgtgtgacctcgctgaccgcgagttggtcgtaataatcgggtgggccaagcacatccccggctttagcactctctccctcgcggatcagatgtcattactgcagtcagcttggatggaaattctcattcttggagtggtctaccgcagcttgtcttttgaagacgaactggtgtatgcagatgactatatcatggacgaagatcaaagcaaattggctggcctcttggacctgaataacgctattcttcagctcgtgaagaaatacaagagcatgaaactggaaaaggaagaattcgttacacttaaggccatagcactggccaactccgatagtatgcacattgaagatgttgaggcagtacagaagcttcaggatgtcttgcacgaggctctgcaggactacgaagctggccagcacatggaagatccaaggagggcgggtaagatgttgatgacactccccctgctgcggcagacctccaccaaagcagtccagcacttctataatattaagctagagggaaaagtgccgatgcataagctgttcctggaaatgctcgaagccaaggtgtag

SEQ ID NO: 117782 - DNA, 1377 bp, Artificial Sequence
  derived and/or modified sequence
atggacagtgtcgaactctgtctccccgaaagcttttccctgcactatgaggaggagctcctgtgcaggatgtccaataaggacagacatattgactcctcctgttccagctttataaagaccgagccctcctcccccgcttctcttacagatagtgtcaatcaccacagccctggcggaagttccgacgccagcggctcctattcgtcaactatgaatggacaccagaatggcttggactctcctcccctataccctagcgcgccaattctgggcggatctggcccagtgcgcaaactttatgatgactgttcatccactatcgtcgaagacccacagacaaagtgtgaatacatgctcaactctatgccaaagagactgtgcctggtgtgtggagacattgcgtctggatatcattacggggttgcttcttgtgaagcttgcaaggcctttttcaaacgcacaatacagggcaacattgagtattcttgtcctgccactaacgaatgcgaaataactaaacgccgaagaaagtcatgccaagcttgtaggttcatgaaatgtctcaaggttggtatgctgaaagaaggcgtgagactggaccgggtgagaggcggacgtcagaagtacaaaagacgtatcgacgctgaaaacagcccctatctgaacccacagttagtgcagccagccaaaaagccatacaacaaaatcgtttcgcacctactggttgccgagcccgagaaaatttacgctatgccagatcccaccgtgcccgactcagacatcaaagcactgaccacactatgtgacttagccgacagagagttagttgttataatcggctgggccaagcacattcccggatttagcaccctgagcctcgcagatcagatgtccctgcttcaatcagcctggatggaaattttgatcctgggcgtggtctaccggtcccttagcttcgaagacgagttagtctatgcagatgactatattatggatgaggatcagtcaaagctggcaggcttacttgatttgaacaatgccatcctccagttggtgaagaaatataaatctatgaagctggaaaaggaggagtttgtaacgttaaaggccattgctcttgccaatagcgactcaatgcatatcgaagacgtggaggctgtgcagaagctgcaggacgtattgcacgaggcactccaggattatgaagcgggacagcatatggaagaccccaggcgggcagggaagatgctcatgacattaccgctattgaggcaaaccagcactaaagctgtccagcatttctataacatcaagttggaaggtaaggtgccaatgcacaagctgtttcttgaaatgctggaggccaaagtgtag

SEQ ID NO: 117783 - DNA, 1377 bp, Artificial Sequence
  derived and/or modified sequence
atggacagcgtggagctgtgcctgcccgagagcttcagcctgcactacgaggaggagctgctgtgcagaatgagcaacaaggacagacacatcgacagcagctgcagcagcttcatcaagaccgagcccagcagccccgccagcctgaccgacagcgtgaaccaccacagccccggcggcagcagcgacgccagcggcagctacagcagcaccatgaacggccaccagaacggcctggacagcccccccctgtaccccagcgcccccatcctgggcggcagcggccccgtgagaaagctgtacgacgactgcagcagcaccatcgtggaggacccccagaccaagtgcgagtacatgctgaacagcatgcccaagagactgtgcctggtgtgcggcgacatcgccagcggctaccactacggcgtggccagctgcgaggcctgcaaggccttcttcaagagaaccatccagggcaacatcgagtacagctgccccgccaccaacgagtgcgagatcaccaagagaagaagaaagagctgccaggcctgcagattcatgaagtgcctgaaggtgggcatgctgaaggagggcgtgagactggacagagtgagaggcggcagacagaagtacaagagaagaatcgacgccgagaacagcccctacctgaacccccagctggtgcagcccgccaagaagccctacaacaagatcgtgagccacctgctggtggccgagcccgagaagatctacgccatgcccgaccccaccgtgcccgacagcgacatcaaggccctgaccaccctgtgcgacctggccgacagagagctggtggtgatcatcggctgggccaagcacatccccggcttcagcaccctgagcctggccgaccagatgagcctgctgcagagcgcctggatggagatcctgatcctgggcgtggtgtacagaagcctgagcttcgaggacgagctggtgtacgccgacgactacatcatggacgaggaccagagcaagctggccggcctgctggacctgaacaacgccatcctgcagctggtgaagaagtacaagagcatgaagctggagaaggaggagttcgtgaccctgaaggccatcgccctggccaacagcgacagcatgcacatcgaggacgtggaggccgtgcagaagctgcaggacgtgctgcacgaggccctgcaggactacgaggccggccagcacatggaggaccccagaagagccggcaagatgctgatgaccctgcccctgctgagacagaccagcaccaaggccgtgcagcacttctacaacatcaagctggagggcaaggtgcccatgcacaagctgttcctggagatgctggaggccaaggtgtag

SEQ ID NO: 117784 - DNA, 1826 bp, Artificial Sequence
  derived and/or modified sequence
aagtccttgattaggagagtgtgagagctttggtcccaactggctgtgcctataggcttgtcactaggagaacatttgtgttaattgcactgtgctctgtcaaggaaactttgatttatagctggggtgcacaaataatggttgccggtcgcacatggattcggtagaactttgccttcctgaatctttttccctgcactacgaggaagaacttgaatgagacctgcctcatcagtcatgggatcatagtgtcacagatggaaaagcaactatcagctgaattgtactgaactacacacttggctaattcatcttattgctctacacatctaaaggaaggctcattctgttcttggagtctagacagcatcaggagttgggctcagtgaacaaaactttaatgtctagagcatttatgagggttttaatgattggaaaatctatcctgagaatgtggtcaccatatgtgacagccttgctttctatcttgtcttcagtttctggggcttctctgcagaatgtcaaacaaagatcgacacattgattccagctgttcgtccttcatcaagacggaaccttccagcccagcctccctgacggacagcgtcaaccaccacagccctggtggctcttcagacgccagtgggagctacagttcaaccatgaatggccatcagaacggacttgactcgccacctctctacccttctgctcctatcctgggaggtagtgggcctgtcaggaaactgtatgatgactgctccagcaccattgttgaagatccccagaccaagtgtgaatacatgctcaactcgatgcccaagagactgtgtttagtgtgtggtgacatcgcttctgggtaccactatggggtagcatcatgtgaagcctgcaaggcattcttcaagaggacaattcaaggcaatatagaatacagctgccctgccacgaatgaatgtgaaatcacaaagcgcagacgtaaatcctgccaggcttgccgcttcatgaagtgtttaaaagtgggcatgctgaaagaaggggtgcgtcttgacagagtacgtggaggtcggcagaagtacaagcgcaggatagatgcggagaacagcccatacctgaaccctcagctggttcagccagccaaaaagccatataacaagattgtctcacatttgttggtggctgaaccggagaagatctatgccatgcctgaccctactgtccccgacagtgacatcaaagccctcactacactgtgtgacttggccgaccgagagttggtggttatcattggatgggcgaagcatattccaggcttctccacgctgtccctggcggaccagatgagccttctgcagagtgcttggatggaaattttgatccttggtgtcgtataccggtctctttcgtttgaggatgaacttgtctatgcagacgattatataatggacgaagaccagtccaaattagcaggccttcttgatctaaataatgctatcctgcagctggtaaagaaatacaagagcatgaagctggaaaaagaagaatttgtcaccctcaaagctatagctcttgctaattcagactccatgcacatagaagatgttgaagccgttcagaagcttcaggatgtcttacatgaagcgctgcaggattatgaagctggccagcacatggaagaccctcgtcgagctggcaagatgctgatgacactgccactcctgaggcagacctctaccaaggccgtgcagcatttctacaacatcaaactagaaggcaaagtcccaatgcacaaactttttttggaaatgttggaggccaaggtctgc

SEQ ID NO: 117785 - DNA, 5197 bp, Artificial Sequence
  derived and/or modified sequence
ggttttgtagactttcatagccaaagaaaccggcttcggcttctttaaaatccccgacgactcacctgattaacctgctgcagttctgaccctgccaagagctgacaatttactggttcatcaatgaaacaatattaaattatgaagatgtaaggaaaaaatcctacgctaacactgtcgcagtttgaaaggcttctctgcagaatgtcaaacaaagatcgacacattgattccagctgttcgtccttcatcaagacggaaccttccagcccagcctccctgacggacagcgtcaaccaccacagccctggtggctcttcagacgccagtgggagctacagttcaaccatgaatggccatcagaacggacttgactcgccacctctctacccttctgctcctatcctgggaggtagtgggcctgtcaggaaactgtatgatgactgctccagcaccattgttgaagatccccagaccaagtgtgaatacatgctcaactcgatgcccaagagactgtgtttagtgtgtggtgacatcgcttctgggtaccactatggggtagcatcatgtgaagcctgcaaggcattcttcaagaggacaattcaaggcaatatagaatacagctgccctgccacgaatgaatgtgaaatcacaaagcgcagacgtaaatcctgccaggcttgccgcttcatgaagtgtttaaaagtgggcatgctgaaagaaggggtgcgtcttgacagagtacgtggaggtcggcagaagtacaagcgcaggatagatgcggagaacagcccatacctgaaccctcagctggttcagccagccaaaaagccatataacaagattgtctcacatttgttggtggctgaaccggagaagatctatgccatgcctgaccctactgtccccgacagtgacatcaaagccctcactacactgtgtgacttggccgaccgagagttggtggttatcattggatgggcgaagcatattccaggcttctccacgctgtccctggcggaccagatgagccttctgcagagtgcttggatggaaattttgatccttggtgtcgtataccggtctctttcgtttgaggatgaacttgtctatgcagacgattatataatggacgaagaccagtccaaattagcaggccttcttgatctaaataatgctatcctgcagctggtaaagaaatacaagagcatgaagctggaaaaagaagaatttgtcaccctcaaagctatagctcttgctaattcagactccatgcacatagaagatgttgaagccgttcagaagcttcaggatgtcttacatgaagcgctgcaggattatgaagctggccagcacatggaagaccctcgtcgagctggcaagatgctgatgacactgccactcctgaggcagacctctaccaaggccgtgcagcatttctacaacatcaaactagaaggcaaagtcccaatgcacaaactttttttggaaatgttggaggccaaggtctgactaaaagctccctgggccttcccatccttcatgttgaaaaagggaaaataaacccaagagtgatgtcgaagaaacttagagtttagttaacaacatcaaaaatcaacagactgcactgataatttagcagcaagactatgaagcagctttcagattcctccataggttcctgatgagtttctttctactttctccatcatcttctttcctctttcttcccacatttctctttctctttattttttctccttttcttctttcacctcccttatttctttgcttctttcattcctagttcccattctcctttattttcttcccgtctgcctgccttctttcttttctttacctactctcattcctctcttttctcatccttccccttttttctaaatttgaaatagctttagtttaaaaaaaaatcctcccttccccctttcctttccctttctttcctttttccctttccttttccctttcctttcctttcctcttgaccttctttccatctttctttttcttccttctgctgctgaacttttaaaagaggtctctaactgaagagagatggaagccagccctgccaaaggatggagatccataatatggatgccagtgaacttattgtgaaccatactgtccccaatgactaaggaatcaaagagagagaaccaacgttcctaaaagtacagtgcaacatatacaaattgactgagtgcagtattagatttcatgggagcagcctctaattagacaacttaagcaacgttgcatcggctgcttcttatcattgcttttccatctagatcagttacagccatttgattccttaattgttttttcaagtcttccaggtatttgttagtttagctactatgtaactttttcagggaatagtttaagctttattcattcatgcaatactaaagagaaataagaatactgcaattttgtgctggctttgaacaattacgaacaataatgaaggacaaatgaatcctgaaggaagatttttaaaaatgttttgtttcttcttacaaatggagatttttttgtaccagctttaccacttttcagccatttattaatatgggaatttaacttactcaagcaatagttgaagggaaggtgcatattatcacggatgcaatttatgttgtgtgccagtctggtcccaaacatcaatttcttaacatgagctccagtttacctaaatgttcactgacacaaaggatgagattacacctacagtgactctgagtagtcacatatataagcactgcacatgagatatagatccgtagaattgtcaggagtgcacctctctacttgggaggtacaattgccatatgatttctagctgccatggtggttaggaatgtgatactgcctgtttgcaaagtcacagaccttgcctcagaaggagctgtgagccagtattcatttaagaggcaataaggcaaatgccagaattaaaaaaaaaaatcatcaaagacagaaaatgcctgaccaaattctaaaacctaatccatataagtttattcatttaggaatgttcgtttaaattaatctgcagtttttaccaagagctaagccaatatatgtgcttttcaaccagtattgtcacagcatgaaagtcaagtcaggttccagactgttaagaggtgtaatctaatgaagaaatcaattagatgccccgaaatctacagtcgctgaataaccaataaacagtaacctccatcaaatgctataccaatggaccagtgttagtagctgctccctgtattatgtgaacagtcttattctatgtacacagatgtaattaaaattgtaatcctaacaaacaaaagaaatgtagttcagcttttcaatgtttcatgtttgctgtgcttttctgaattttatgttgcattcaaagactgttgtcttgttcttgtggtgtttggattcttgtggtgtgtgcttttagacacagggtagaattagagacaatattggatgtacaattcctcaggagactacagtagtatattctattccttaccagtaataaggttcttcctaataataattaagagattgaaactccaaacaagtattcattatgaacagatacacatcaaaatcataataatattttcaaaacaaggaataatttctctaatggtttattatagaataccaatgtatagcttagaaataaaactttgaatatttcaagaatatagataagtctaatttttaaatgctgtatatatggctttcactcaatcatctctcagatgttgttattaactcgctctgtgttgttgcaaaactttttggtgcagattcgtttccaaaactattgctactttgtgtgctttaaacaaaataccttgggttgatgaaacatcaacccagtgctaggaatactgtgtatctatcattagctatatgggactatattgtagattgtggtttctcagtagagaagtgactgtagtgtgattctagataaatcatcattagcaattcattcagatggtcaataacttgaaatttatagctgtgataggagttcagaaattggcacatccctttaaaaataacaacagaaaatacaactcctgggaaaaaaggtgctgattctataagattatttatatatgtaagtgtttaaaaagattattttccagaaagtttgtgcagggtttaagttgctactattcaactacactatatataaataaaatatatacaatatatacattgttttcactgtatcacattaaagtacttgggcttcagaagtaagagccaaccaactgaaaacctgagatggagatatgttcaaagaatgagatacaattttttagttttcagtttaagtaactctcagcattacaaaagagtaagtatctcacaaataggaaataaaactaaaacgtggatttaaaaagaactgcacgggctttagggtaaatgctcatcttaaacctcactagagggaagtcttctcaagtttcaagcaagaccatttacttaatgtgaagttttggaaagttataaaggtgtatgttttagccatatgattttaattttaattttgcttcttttaggttcgttcttatttaaagcaatatgattgtgtgactccttgtagttacacttgtgtttcaatcagatcagattgttgtatttattccactattttgcatttaaatgataacataaaagatataaaaaatttaaaactgctatttttcttatagaagagaaaatgggtgttggtgattgtattttaattatttaagcgtctctgtttacctgcctaggaaaacattttatggcagtcttatgtgcaaagatcgtaaaaggacaaaaaatttaaactgcttataataatccaggagttgcattatagccagtagtaaaaataataataataataataaaaccatgtctatagctgtagatgggcttcacatctgtaaagcaatcaattgtatatttttgtgatgtgtaccatactgtgtgctccagcaaatgtccatttgtgtaaatgtatttattttatattgtatatattgttaaatgcaaaaaggagatatgattctgtaactccaatcagttcagatgtgtaactcaaattattatgcctttcaggatgatggtagagcaatattaaacaagcttccacttt

SEQ ID NO: 117786 - DNA, 5431 bp, Artificial Sequence
  derived and/or modified sequence
tatccacacacagcatcggaatattgctagctaactcaacaaatgtgcaaatcaggggactgttgtgtgtgtaccgattcatgtctatactgtttttattggtgaagtaggaaattagtctaaatatttgattctgcagttgcatgtcaccaaattcagtgaggttagatgttaaatcatcttgttggctttgggctgaatttgatctaagagacaaaagtctcaaacaacagactacttactgccaccacatctcgattcaaagaatagttttcacatgttcgtggtgtggaaaggactttctgtttctcactaatttcttcagctataccaagagtggtgttgtctttgaacaggaaggacagcaaaaataaacataacagttttttcataagatacacagctgcattacacatcccaaaattgcttctctgcagaatgtcaaacaaagatcgacacattgattccagctgttcgtccttcatcaagacggaaccttccagcccagcctccctgacggacagcgtcaaccaccacagccctggtggctcttcagacgccagtgggagctacagttcaaccatgaatggccatcagaacggacttgactcgccacctctctacccttctgctcctatcctgggaggtagtgggcctgtcaggaaactgtatgatgactgctccagcaccattgttgaagatccccagaccaagtgtgaatacatgctcaactcgatgcccaagagactgtgtttagtgtgtggtgacatcgcttctgggtaccactatggggtagcatcatgtgaagcctgcaaggcattcttcaagaggacaattcaaggcaatatagaatacagctgccctgccacgaatgaatgtgaaatcacaaagcgcagacgtaaatcctgccaggcttgccgcttcatgaagtgtttaaaagtgggcatgctgaaagaaggggtgcgtcttgacagagtacgtggaggtcggcagaagtacaagcgcaggatagatgcggagaacagcccatacctgaaccctcagctggttcagccagccaaaaagccatataacaagattgtctcacatttgttggtggctgaaccggagaagatctatgccatgcctgaccctactgtccccgacagtgacatcaaagccctcactacactgtgtgacttggccgaccgagagttggtggttatcattggatgggcgaagcatattccaggcttctccacgctgtccctggcggaccagatgagccttctgcagagtgcttggatggaaattttgatccttggtgtcgtataccggtctctttcgtttgaggatgaacttgtctatgcagacgattatataatggacgaagaccagtccaaattagcaggccttcttgatctaaataatgctatcctgcagctggtaaagaaatacaagagcatgaagctggaaaaagaagaatttgtcaccctcaaagctatagctcttgctaattcagactccatgcacatagaagatgttgaagccgttcagaagcttcaggatgtcttacatgaagcgctgcaggattatgaagctggccagcacatggaagaccctcgtcgagctggcaagatgctgatgacactgccactcctgaggcagacctctaccaaggccgtgcagcatttctacaacatcaaactagaaggcaaagtcccaatgcacaaactttttttggaaatgttggaggccaaggtctgactaaaagctccctgggccttcccatccttcatgttgaaaaagggaaaataaacccaagagtgatgtcgaagaaacttagagtttagttaacaacatcaaaaatcaacagactgcactgataatttagcagcaagactatgaagcagctttcagattcctccataggttcctgatgagtttctttctactttctccatcatcttctttcctctttcttcccacatttctctttctctttattttttctccttttcttctttcacctcccttatttctttgcttctttcattcctagttcccattctcctttattttcttcccgtctgcctgccttctttcttttctttacctactctcattcctctcttttctcatccttccccttttttctaaatttgaaatagctttagtttaaaaaaaaatcctcccttccccctttcctttccctttctttcctttttccctttccttttccctttcctttcctttcctcttgaccttctttccatctttctttttcttccttctgctgctgaacttttaaaagaggtctctaactgaagagagatggaagccagccctgccaaaggatggagatccataatatggatgccagtgaacttattgtgaaccatactgtccccaatgactaaggaatcaaagagagagaaccaacgttcctaaaagtacagtgcaacatatacaaattgactgagtgcagtattagatttcatgggagcagcctctaattagacaacttaagcaacgttgcatcggctgcttcttatcattgcttttccatctagatcagttacagccatttgattccttaattgttttttcaagtcttccaggtatttgttagtttagctactatgtaactttttcagggaatagtttaagctttattcattcatgcaatactaaagagaaataagaatactgcaattttgtgctggctttgaacaattacgaacaataatgaaggacaaatgaatcctgaaggaagatttttaaaaatgttttgtttcttcttacaaatggagatttttttgtaccagctttaccacttttcagccatttattaatatgggaatttaacttactcaagcaatagttgaagggaaggtgcatattatcacggatgcaatttatgttgtgtgccagtctggtcccaaacatcaatttcttaacatgagctccagtttacctaaatgttcactgacacaaaggatgagattacacctacagtgactctgagtagtcacatatataagcactgcacatgagatatagatccgtagaattgtcaggagtgcacctctctacttgggaggtacaattgccatatgatttctagctgccatggtggttaggaatgtgatactgcctgtttgcaaagtcacagaccttgcctcagaaggagctgtgagccagtattcatttaagaggcaataaggcaaatgccagaattaaaaaaaaaaatcatcaaagacagaaaatgcctgaccaaattctaaaacctaatccatataagtttattcatttaggaatgttcgtttaaattaatctgcagtttttaccaagagctaagccaatatatgtgcttttcaaccagtattgtcacagcatgaaagtcaagtcaggttccagactgttaagaggtgtaatctaatgaagaaatcaattagatgccccgaaatctacagtcgctgaataaccaataaacagtaacctccatcaaatgctataccaatggaccagtgttagtagctgctccctgtattatgtgaacagtcttattctatgtacacagatgtaattaaaattgtaatcctaacaaacaaaagaaatgtagttcagcttttcaatgtttcatgtttgctgtgcttttctgaattttatgttgcattcaaagactgttgtcttgttcttgtggtgtttggattcttgtggtgtgtgcttttagacacagggtagaattagagacaatattggatgtacaattcctcaggagactacagtagtatattctattccttaccagtaataaggttcttcctaataataattaagagattgaaactccaaacaagtattcattatgaacagatacacatcaaaatcataataatattttcaaaacaaggaataatttctctaatggtttattatagaataccaatgtatagcttagaaataaaactttgaatatttcaagaatatagataagtctaatttttaaatgctgtatatatggctttcactcaatcatctctcagatgttgttattaactcgctctgtgttgttgcaaaactttttggtgcagattcgtttccaaaactattgctactttgtgtgctttaaacaaaataccttgggttgatgaaacatcaacccagtgctaggaatactgtgtatctatcattagctatatgggactatattgtagattgtggtttctcagtagagaagtgactgtagtgtgattctagataaatcatcattagcaattcattcagatggtcaataacttgaaatttatagctgtgataggagttcagaaattggcacatccctttaaaaataacaacagaaaatacaactcctgggaaaaaaggtgctgattctataagattatttatatatgtaagtgtttaaaaagattattttccagaaagtttgtgcagggtttaagttgctactattcaactacactatatataaataaaatatatacaatatatacattgttttcactgtatcacattaaagtacttgggcttcagaagtaagagccaaccaactgaaaacctgagatggagatatgttcaaagaatgagatacaattttttagttttcagtttaagtaactctcagcattacaaaagagtaagtatctcacaaataggaaataaaactaaaacgtggatttaaaaagaactgcacgggctttagggtaaatgctcatcttaaacctcactagagggaagtcttctcaagtttcaagcaagaccatttacttaatgtgaagttttggaaagttataaaggtgtatgttttagccatatgattttaattttaattttgcttcttttaggttcgttcttatttaaagcaatatgattgtgtgactccttgtagttacacttgtgtttcaatcagatcagattgttgtatttattccactattttgcatttaaatgataacataaaagatataaaaaatttaaaactgctatttttcttatagaagagaaaatgggtgttggtgattgtattttaattatttaagcgtctctgtttacctgcctaggaaaacattttatggcagtcttatgtgcaaagatcgtaaaaggacaaaaaatttaaactgcttataataatccaggagttgcattatagccagtagtaaaaataataataataataataaaaccatgtctatagctgtagatgggcttcacatctgtaaagcaatcaattgtatatttttgtgatgtgtaccatactgtgtgctccagcaaatgtccatttgtgtaaatgtatttattttatattgtatatattgttaaatgcaaaaaggagatatgattctgtaactccaatcagttcagatgtgtaactcaaattattatgcctttcaggatgatggtagagcaatattaaacaagcttccacttt

SEQ ID NO: 117787 - DNA, 5312 bp, Artificial Sequence
  derived and/or modified sequence
ggagggcgagggcgggctcctctggaggcggcgggctccaggccgggctccctaaacgggtcagcaattggagcgggaaggccggacagagacagggtcttgctttgtcacccaggctggagtgcagtgccacaatcagagcttactcctgccttgaactcctgggcttcagggatcctgctgcctcggccctccaagcagctgagactacagagctgacaatttactggttcatcaatgaaacaatattaaattatgaagatgtaaggaaaaaatcctacgctaacactgtcgcagtttgaaaggcttctctgcagaatgtcaaacaaagatcgacacattgattccagctgttcgtccttcatcaagacggaaccttccagcccagcctccctgacggacagcgtcaaccaccacagccctggtggctcttcagacgccagtgggagctacagttcaaccatgaatggccatcagaacggacttgactcgccacctctctacccttctgctcctatcctgggaggtagtgggcctgtcaggaaactgtatgatgactgctccagcaccattgttgaagatccccagaccaagtgtgaatacatgctcaactcgatgcccaagagactgtgtttagtgtgtggtgacatcgcttctgggtaccactatggggtagcatcatgtgaagcctgcaaggcattcttcaagaggacaattcaaggcaatatagaatacagctgccctgccacgaatgaatgtgaaatcacaaagcgcagacgtaaatcctgccaggcttgccgcttcatgaagtgtttaaaagtgggcatgctgaaagaaggggtgcgtcttgacagagtacgtggaggtcggcagaagtacaagcgcaggatagatgcggagaacagcccatacctgaaccctcagctggttcagccagccaaaaagccatataacaagattgtctcacatttgttggtggctgaaccggagaagatctatgccatgcctgaccctactgtccccgacagtgacatcaaagccctcactacactgtgtgacttggccgaccgagagttggtggttatcattggatgggcgaagcatattccaggcttctccacgctgtccctggcggaccagatgagccttctgcagagtgcttggatggaaattttgatccttggtgtcgtataccggtctctttcgtttgaggatgaacttgtctatgcagacgattatataatggacgaagaccagtccaaattagcaggccttcttgatctaaataatgctatcctgcagctggtaaagaaatacaagagcatgaagctggaaaaagaagaatttgtcaccctcaaagctatagctcttgctaattcagactccatgcacatagaagatgttgaagccgttcagaagcttcaggatgtcttacatgaagcgctgcaggattatgaagctggccagcacatggaagaccctcgtcgagctggcaagatgctgatgacactgccactcctgaggcagacctctaccaaggccgtgcagcatttctacaacatcaaactagaaggcaaagtcccaatgcacaaactttttttggaaatgttggaggccaaggtctgactaaaagctccctgggccttcccatccttcatgttgaaaaagggaaaataaacccaagagtgatgtcgaagaaacttagagtttagttaacaacatcaaaaatcaacagactgcactgataatttagcagcaagactatgaagcagctttcagattcctccataggttcctgatgagtttctttctactttctccatcatcttctttcctctttcttcccacatttctctttctctttattttttctccttttcttctttcacctcccttatttctttgcttctttcattcctagttcccattctcctttattttcttcccgtctgcctgccttctttcttttctttacctactctcattcctctcttttctcatccttccccttttttctaaatttgaaatagctttagtttaaaaaaaaatcctcccttccccctttcctttccctttctttcctttttccctttccttttccctttcctttcctttcctcttgaccttctttccatctttctttttcttccttctgctgctgaacttttaaaagaggtctctaactgaagagagatggaagccagccctgccaaaggatggagatccataatatggatgccagtgaacttattgtgaaccatactgtccccaatgactaaggaatcaaagagagagaaccaacgttcctaaaagtacagtgcaacatatacaaattgactgagtgcagtattagatttcatgggagcagcctctaattagacaacttaagcaacgttgcatcggctgcttcttatcattgcttttccatctagatcagttacagccatttgattccttaattgttttttcaagtcttccaggtatttgttagtttagctactatgtaactttttcagggaatagtttaagctttattcattcatgcaatactaaagagaaataagaatactgcaattttgtgctggctttgaacaattacgaacaataatgaaggacaaatgaatcctgaaggaagatttttaaaaatgttttgtttcttcttacaaatggagatttttttgtaccagctttaccacttttcagccatttattaatatgggaatttaacttactcaagcaatagttgaagggaaggtgcatattatcacggatgcaatttatgttgtgtgccagtctggtcccaaacatcaatttcttaacatgagctccagtttacctaaatgttcactgacacaaaggatgagattacacctacagtgactctgagtagtcacatatataagcactgcacatgagatatagatccgtagaattgtcaggagtgcacctctctacttgggaggtacaattgccatatgatttctagctgccatggtggttaggaatgtgatactgcctgtttgcaaagtcacagaccttgcctcagaaggagctgtgagccagtattcatttaagaggcaataaggcaaatgccagaattaaaaaaaaaaatcatcaaagacagaaaatgcctgaccaaattctaaaacctaatccatataagtttattcatttaggaatgttcgtttaaattaatctgcagtttttaccaagagctaagccaatatatgtgcttttcaaccagtattgtcacagcatgaaagtcaagtcaggttccagactgttaagaggtgtaatctaatgaagaaatcaattagatgccccgaaatctacagtcgctgaataaccaataaacagtaacctccatcaaatgctataccaatggaccagtgttagtagctgctccctgtattatgtgaacagtcttattctatgtacacagatgtaattaaaattgtaatcctaacaaacaaaagaaatgtagttcagcttttcaatgtttcatgtttgctgtgcttttctgaattttatgttgcattcaaagactgttgtcttgttcttgtggtgtttggattcttgtggtgtgtgcttttagacacagggtagaattagagacaatattggatgtacaattcctcaggagactacagtagtatattctattccttaccagtaataaggttcttcctaataataattaagagattgaaactccaaacaagtattcattatgaacagatacacatcaaaatcataataatattttcaaaacaaggaataatttctctaatggtttattatagaataccaatgtatagcttagaaataaaactttgaatatttcaagaatatagataagtctaatttttaaatgctgtatatatggctttcactcaatcatctctcagatgttgttattaactcgctctgtgttgttgcaaaactttttggtgcagattcgtttccaaaactattgctactttgtgtgctttaaacaaaataccttgggttgatgaaacatcaacccagtgctaggaatactgtgtatctatcattagctatatgggactatattgtagattgtggtttctcagtagagaagtgactgtagtgtgattctagataaatcatcattagcaattcattcagatggtcaataacttgaaatttatagctgtgataggagttcagaaattggcacatccctttaaaaataacaacagaaaatacaactcctgggaaaaaaggtgctgattctataagattatttatatatgtaagtgtttaaaaagattattttccagaaagtttgtgcagggtttaagttgctactattcaactacactatatataaataaaatatatacaatatatacattgttttcactgtatcacattaaagtacttgggcttcagaagtaagagccaaccaactgaaaacctgagatggagatatgttcaaagaatgagatacaattttttagttttcagtttaagtaactctcagcattacaaaagagtaagtatctcacaaataggaaataaaactaaaacgtggatttaaaaagaactgcacgggctttagggtaaatgctcatcttaaacctcactagagggaagtcttctcaagtttcaagcaagaccatttacttaatgtgaagttttggaaagttataaaggtgtatgttttagccatatgattttaattttaattttgcttcttttaggttcgttcttatttaaagcaatatgattgtgtgactccttgtagttacacttgtgtttcaatcagatcagattgttgtatttattccactattttgcatttaaatgataacataaaagatataaaaaatttaaaactgctatttttcttatagaagagaaaatgggtgttggtgattgtattttaattatttaagcgtctctgtttacctgcctaggaaaacattttatggcagtcttatgtgcaaagatcgtaaaaggacaaaaaatttaaactgcttataataatccaggagttgcattatagccagtagtaaaaataataataataataataaaaccatgtctatagctgtagatgggcttcacatctgtaaagcaatcaattgtatatttttgtgatgtgtaccatactgtgtgctccagcaaatgtccatttgtgtaaatgtatttattttatattgtatatattgttaaatgcaaaaaggagatatgattctgtaactccaatcagttcagatgtgtaactcaaattattatgcctttcaggatgatggtagagcaatattaaacaagcttccactttt

SEQ ID NO: 117788 - DNA, 5216 bp, Artificial Sequence
  derived and/or modified sequence
aagtccttgattaggagagtgtgagagctttggtcccaactggctgtgcctataggcttgtcactaggagaacatttgtgttaattgcactgtgctctgtcaaggaaactttgatttatagctggggtgcacaaataatggttgccggtcgcacatggattcggtagaactttgccttcctgaatctttttccctgcactacgaggaagagcttctctgcagaatgtcaaacaaagatcgacacattgattccagctgttcgtccttcatcaagacggaaccttccagcccagcctccctgacggacagcgtcaaccaccacagccctggtggctcttcagacgccagtgggagctacagttcaaccatgaatggccatcagaacggacttgactcgccacctctctacccttctgctcctatcctgggaggtagtgggcctgtcaggaaactgtatgatgactgctccagcaccattgttgaagatccccagaccaagtgtgaatacatgctcaactcgatgcccaagagactgtgtttagtgtgtggtgacatcgcttctgggtaccactatggggtagcatcatgtgaagcctgcaaggcattcttcaagaggacaattcaaggcaatatagaatacagctgccctgccacgaatgaatgtgaaatcacaaagcgcagacgtaaatcctgccaggcttgccgcttcatgaagtgtttaaaagtgggcatgctgaaagaaggggtgcgtcttgacagagtacgtggaggtcggcagaagtacaagcgcaggatagatgcggagaacagcccatacctgaaccctcagctggttcagccagccaaaaagccatataacaagattgtctcacatttgttggtggctgaaccggagaagatctatgccatgcctgaccctactgtccccgacagtgacatcaaagccctcactacactgtgtgacttggccgaccgagagttggtggttatcattggatgggcgaagcatattccaggcttctccacgctgtccctggcggaccagatgagccttctgcagagtgcttggatggaaattttgatccttggtgtcgtataccggtctctttcgtttgaggatgaacttgtctatgcagacgattatataatggacgaagaccagtccaaattagcaggccttcttgatctaaataatgctatcctgcagctggtaaagaaatacaagagcatgaagctggaaaaagaagaatttgtcaccctcaaagctatagctcttgctaattcagactccatgcacatagaagatgttgaagccgttcagaagcttcaggatgtcttacatgaagcgctgcaggattatgaagctggccagcacatggaagaccctcgtcgagctggcaagatgctgatgacactgccactcctgaggcagacctctaccaaggccgtgcagcatttctacaacatcaaactagaaggcaaagtcccaatgcacaaactttttttggaaatgttggaggccaaggtctgactaaaagctccctgggccttcccatccttcatgttgaaaaagggaaaataaacccaagagtgatgtcgaagaaacttagagtttagttaacaacatcaaaaatcaacagactgcactgataatttagcagcaagactatgaagcagctttcagattcctccataggttcctgatgagtttctttctactttctccatcatcttctttcctctttcttcccacatttctctttctctttattttttctccttttcttctttcacctcccttatttctttgcttctttcattcctagttcccattctcctttattttcttcccgtctgcctgccttctttcttttctttacctactctcattcctctcttttctcatccttccccttttttctaaatttgaaatagctttagtttaaaaaaaaatcctcccttccccctttcctttccctttctttcctttttccctttccttttccctttcctttcctttcctcttgaccttctttccatctttctttttcttccttctgctgctgaacttttaaaagaggtctctaactgaagagagatggaagccagccctgccaaaggatggagatccataatatggatgccagtgaacttattgtgaaccatactgtccccaatgactaaggaatcaaagagagagaaccaacgttcctaaaagtacagtgcaacatatacaaattgactgagtgcagtattagatttcatgggagcagcctctaattagacaacttaagcaacgttgcatcggctgcttcttatcattgcttttccatctagatcagttacagccatttgattccttaattgttttttcaagtcttccaggtatttgttagtttagctactatgtaactttttcagggaatagtttaagctttattcattcatgcaatactaaagagaaataagaatactgcaattttgtgctggctttgaacaattacgaacaataatgaaggacaaatgaatcctgaaggaagatttttaaaaatgttttgtttcttcttacaaatggagatttttttgtaccagctttaccacttttcagccatttattaatatgggaatttaacttactcaagcaatagttgaagggaaggtgcatattatcacggatgcaatttatgttgtgtgccagtctggtcccaaacatcaatttcttaacatgagctccagtttacctaaatgttcactgacacaaaggatgagattacacctacagtgactctgagtagtcacatatataagcactgcacatgagatatagatccgtagaattgtcaggagtgcacctctctacttgggaggtacaattgccatatgatttctagctgccatggtggttaggaatgtgatactgcctgtttgcaaagtcacagaccttgcctcagaaggagctgtgagccagtattcatttaagaggcaataaggcaaatgccagaattaaaaaaaaaaatcatcaaagacagaaaatgcctgaccaaattctaaaacctaatccatataagtttattcatttaggaatgttcgtttaaattaatctgcagtttttaccaagagctaagccaatatatgtgcttttcaaccagtattgtcacagcatgaaagtcaagtcaggttccagactgttaagaggtgtaatctaatgaagaaatcaattagatgccccgaaatctacagtcgctgaataaccaataaacagtaacctccatcaaatgctataccaatggaccagtgttagtagctgctccctgtattatgtgaacagtcttattctatgtacacagatgtaattaaaattgtaatcctaacaaacaaaagaaatgtagttcagcttttcaatgtttcatgtttgctgtgcttttctgaattttatgttgcattcaaagactgttgtcttgttcttgtggtgtttggattcttgtggtgtgtgcttttagacacagggtagaattagagacaatattggatgtacaattcctcaggagactacagtagtatattctattccttaccagtaataaggttcttcctaataataattaagagattgaaactccaaacaagtattcattatgaacagatacacatcaaaatcataataatattttcaaaacaaggaataatttctctaatggtttattatagaataccaatgtatagcttagaaataaaactttgaatatttcaagaatatagataagtctaatttttaaatgctgtatatatggctttcactcaatcatctctcagatgttgttattaactcgctctgtgttgttgcaaaactttttggtgcagattcgtttccaaaactattgctactttgtgtgctttaaacaaaataccttgggttgatgaaacatcaacccagtgctaggaatactgtgtatctatcattagctatatgggactatattgtagattgtggtttctcagtagagaagtgactgtagtgtgattctagataaatcatcattagcaattcattcagatggtcaataacttgaaatttatagctgtgataggagttcagaaattggcacatccctttaaaaataacaacagaaaatacaactcctgggaaaaaaggtgctgattctataagattatttatatatgtaagtgtttaaaaagattattttccagaaagtttgtgcagggtttaagttgctactattcaactacactatatataaataaaatatatacaatatatacattgttttcactgtatcacattaaagtacttgggcttcagaagtaagagccaaccaactgaaaacctgagatggagatatgttcaaagaatgagatacaattttttagttttcagtttaagtaactctcagcattacaaaagagtaagtatctcacaaataggaaataaaactaaaacgtggatttaaaaagaactgcacgggctttagggtaaatgctcatcttaaacctcactagagggaagtcttctcaagtttcaagcaagaccatttacttaatgtgaagttttggaaagttataaaggtgtatgttttagccatatgattttaattttaattttgcttcttttaggttcgttcttatttaaagcaatatgattgtgtgactccttgtagttacacttgtgtttcaatcagatcagattgttgtatttattccactattttgcatttaaatgataacataaaagatataaaaaatttaaaactgctatttttcttatagaagagaaaatgggtgttggtgattgtattttaattatttaagcgtctctgtttacctgcctaggaaaacattttatggcagtcttatgtgcaaagatcgtaaaaggacaaaaaatttaaactgcttataataatccaggagttgcattatagccagtagtaaaaataataataataataataaaaccatgtctatagctgtagatgggcttcacatctgtaaagcaatcaattgtatatttttgtgatgtgtaccatactgtgtgctccagcaaatgtccatttgtgtaaatgtatttattttatattgtatatattgttaaatgcaaaaaggagatatgattctgtaactccaatcagttcagatgtgtaactcaaattattatgcctttcaggatgatggtagagcaatattaaacaagcttccacttt

SEQ ID NO: 117789 - DNA, 1464 bp, Artificial Sequence
  derived and/or modified sequence
ctggggtgcacaaataatggttgccggtcgcacatggattcggtagaactttgccttcctgaatctttttccctgcactacgaggaagagtagacttgaatgagacctgcctcatcagtcatgggatcatagtgtcacagatggaaaagcaactatcagctgaattgtactgaactacacacttggctaattcatcttattgctctacacatctaaaggaaggctcattctgttcttggagtctagacagcatcaggagttgggctcagtgaacaaaactttaatgtctagagcatttatgagggttttaatgattggaaaatctatcctgagaatgtggtcaccatatgtgacagccttgctttctatcttgtcttcagtttctggggcttctctgcagaatgtcaaacaaagatcgacacattgattccagctgttcgtccttcatcaagacggaaccttccagcccagcctccctgacggacagcgtcaaccaccacagccctggtggctcttcagacgccagtgggagctacagttcaaccatgaatggccatcagaacggacttgactcgccacctctctacccttctgctcctatcctgggaggtagtgggcctgtcaggaaactgtatgatgactgctccagcaccattgttgaagatccccagaccaagtgtgaatacatgctcaactcgatgcccaagagactgtgtttagtgtgtggtgacatcgcttctgggtaccactatggggtagcatcatgtgaagcctgcaaggcattcttcaagaggacaattcaaggcaatatagaatacagctgccctgccacgaatgaatgtgaaatcacaaagcgcagacgtaaatcctgccaggcttgccgcttcatgaagtgtttaaaagtgggcatgctgaaagaaggggtgcgtcttgacagagtacgtggaggtcggcagaagtacaagcgcaggatagatgcggagaacagcccatacctgaaccctcagctggttcagccagccaaaaagccatataacaagattgtctcacatttgttggtggctgaaccggagaagatctatgccatgcctgaccctactgtccccgacagtgacatcaaagccctcactacactgtgtgacttggccgaccgagagttggtggttatcattggatgggcgaagcatattccaggcttctccacgctgtccctggcggaccagatgagccttctgcagagtgcttggatggaaattttgatccttggtgtcgtataccggtctctttcgtttgaggatgaacttgtctatgcagacgattatataatggacgaagaccagtccaaattagcaggccttcttgatctaaataatgctatcctgcagctggtaaagaaatacaagagcatgaagctggaaaaagaagaatttgtcaccctcaaagctatagctcttgctaattcag

SEQ ID NO: 117790 - DNA, 2074 bp, Artificial Sequence
  derived and/or modified sequence
attctgggcaaagtgtggtgacttgtggattttcactgtgacgatgttgctacacggtccttcacttggagttagtgcaacaaggagacatctgagcttaaaatttatgaaacatctaaagaaatcaagctttatataggatcaccgttgtgggttgaattgtgtatccccaaaagatgttgaagtcctgaccacctccctataccttacaatatagccttttacggaagtagggtctttgcagaagatcaagttaagatgaaatcatttgattgggccctagttcaatatatcttatgtccttataaaaggagacaatttggacacagggacaaggggagaatgccacataaagattggaattatgctgccataagccaaggaactccaaagatcgctggcaagctgctaaaagctagcacagattcatggaacagagtctccgtcatagcctacaaaaggaatcaaccctgctgacatcttgatttcagacttctagcctccagaactagctgacaatttactggttcatcaatgaaacaatattaaattatgaagatgtaaggaaaaaatcctacgctaacactgtcgcagtttgaaaggcttctctgcagaatgtcaaacaaagatcgacacattgattccagctgttcgtccttcatcaagacggaaccttccagcccagcctccctgacggacagcgtcaaccaccacagccctggtggctcttcagacgccagtgggagctacagttcaaccatgaatggccatcagaacggacttgactcgccacctctctacccttctgctcctatcctgggaggtagtgggcctgtcaggaaactgtatgatgactgctccagcaccattgttgaagatccccagaccaagtgtgaatacatgctcaactcgatgcccaagagactgtgtttagtgtgtggtgacatcgcttctgggtaccactatggggtagcatcatgtgaagcctgcaaggcattcttcaagaggacaattcaaggcaatatagaatacagctgccctgccacgaatgaatgtgaaatcacaaagcgcagacgtaaatcctgccaggcttgccgcttcatgaagtgtttaaaagtgggcatgctgaaagaaggggtgcgtcttgacagagtacgtggaggtcggcagaagtacaagcgcaggatagatgcggagaacagcccatacctgaaccctcagctggttcagccagccaaaaagccatataacaagattgtctcacatttgttggtggctgaaccggagaagatctatgccatgcctgaccctactgtccccgacagtgacatcaaagccctcactacactgtgtgacttggccgaccgagagttggtggttatcattggatgggcgaagcatattccaggcttctccacgctgtccctggcggaccagatgagccttctgcagagtgcttggatggaaattttgatccttggtgtcgtataccggtctctttcgtttgaggatgaacttgtctatgcagacgattatataatggacgaagaccagtccaaattagcaggccttcttgatctaaataatgctatcctgcagctggtaaagaaatacaagagcatgaagctggaaaaagaagaatttgtcaccctcaaagctatagctcttgctaattcagactccatgcacatagaagatgttgaagccgttcagaagcttcaggatgtcttacatgaagcgctgcaggattatgaagctggccagcacatggaagaccctcgtcgagctggcaagatgctgatgacactgccactcctgaggcagacctctaccaaggccgtgcagcatttctacaacatcaaactagaaggcaaagtcccaatgcacaaactttttttggaaatgttggaggccaaggtctgactaaaagctccctgggccttcccatccttcatgttgaaaaagggaaaataaacccaagagtgatgtcgaagaaacttagagtttagttaacaacatcaaaaatcaacagactgcactgataatttagcagcaagactatgaagcagctttc

SEQ ID NO: 117791 - protein, 919 aa, Artificial Sequence
  derived and/or modified sequence
MTGYTMLRNGGAGNGGQTCMLRWSNRIRLTWLSFTLFVILVFFPLIAHYYLTTLDEADEAGKRIFGPRVGNELCEVKHVLDLCRIRESVSEELLQLEAKRQELNSEIAKLNLKIEACKKSIENAKQDLLQLKNVISQTEHSYKELMAQNQPKLSLPIRLLPEKDDAGLPPPKATRGCRLHNCFDYSRCPLTSGFPVYVYDSDQFVFGSYLDPLVKQAFQATARANVYVTENADIACLYVILVGEMQEPVVLRPAELEKQLYSLPHWRTDGHNHVIINLSRKSDTQNLLYNVSTGRAMVAQSTFYTVQYRPGFDLVVSPLVHAMSEPNFMEIPPQVPVKRKYLFTFQGEKIESLRSSLQEARSFEEEMEGDPPADYDDRIIATLKAVQDSKLDQVLVEFTCKNQPKPSLPTEWALCGEREDRLELLKLSTFALIITPGDPRLVISSGCATRLFEALEVGAVPVVLGEQVQLPYQDMLQWNEAALVVPKPRVTEVHFLLRSLSDSDLLAMRRQGRFLWETYFSTADSIFNTVLAMIRTRIQIPAAPIREEAAAEIPHRSGKAAGTDPNMADNGDLDLGPVETEPPYASPRYLRNFTLTVTDFYRSWNCAPGPFHLFPHTPFDPVLPSEAKFLGSGTGFRPIGGGAGGSGKEFQAALGGNVPREQFTVVMLTYEREEVLMNSLERLNGLPYLNKVVVVWNSPKLPSEDLLWPDIGVPIMVVRTEKNSLNNRFLPWNEIETEAILSIDDDAHLRHDEIMFGFRVWREARDRIVGFPGRYHAWDIPHQSWLYNSNYSCELSMVLTGAAFFHKYYAYLYSYVMPQAIRDMVDEYINCEDIAMNFLVSHITRKPPIKVTSRWTFRCPGCPQALSHDDSHFHERHKCINFFVKVYGYMPLLYTQFRVDSVLFKTRLPHDKTKCFKFI

SEQ ID NO: 117792 - protein, 535 aa, Artificial Sequence
  derived and/or modified sequence
MLHKSEEGRVLVEFTCKNQPKPSLPTEWALCGEREDRLELLKLSTFALIITPGDPRLVISSGCATRLFEALEVGAVPVVLGEQVQLPYQDMLQWNEAALVVPKPRVTEVHFLLRSLSDSDLLAMRRQGRFLWETYFSTADSIFNTVLAMIRTRIQIPAAPIREEAAAEIPHRSGKAAGTDPNMADNGDLDLGPVETEPPYASPRYLRNFTLTVTDFYRSWNCAPGPFHLFPHTPFDPVLPSEAKFLGSGTGFRPIGGGAGGSGKEFQAALGGNVPREQFTVVMLTYEREEVLMNSLERLNGLPYLNKVVVVWNSPKLPSEDLLWPDIGVPIMVVRTEKNSLNNRFLPWNEIETEAILSIDDDAHLRHDEIMFGFRVWREARDRIVGFPGRYHAWDIPHQSWLYNSNYSCELSMVLTGAAFFHKYYAYLYSYVMPQAIRDMVDEYINCEDIAMNFLVSHITRKPPIKVTSRWTFRCPGCPQALSHDDSHFHERHKCINFFVKVYGYMPLLYTQFRVDSVLFKTRLPHDKTKCFKFI

SEQ ID NO: 117793 - DNA, 6483 bp, Artificial Sequence
  derived and/or modified sequence
acaatccccggcgcccggccccgcgcccctgacccgggtgtcaccgcggagctgcgggaggcctcggcggtcttcggacgcggtcgggaaagtggcgagcgcgcgcccgcgtccgcgcccccgctcgcgaacgccggcttcggccatttccggcgcggcgcccttcggcaagttccgcagtcgcctgtcggaaatggctgccggccggcagggggagcggcggatcaggcgcggcctggaaggcgggcggccggcagccagaacggcttctgggacgccgactttcgcgcaggcggcggcggcggcggcggcgggtccctgagctggaagccggagagcaagccctggaggttcactctttcaagaagtcgtgtgctgaggtgtaatgctacacaagtcagaggaaggaagggtcctgaaacacatggcctgattgttggcaaaggcatcataagaagctggcatttatttctgttctaacctattactgtataactgtgaatagacactatgcatatttgttggtcagcaaaaccaagaaacaagagctatggcatttgaaaaagtctgtctgattccagggtgtttttcctgggtttcatcatcaggtacctcctccctttcatctcagcaagaatgtggcaccttttatcgtttgataaagattaaggacatgttctttggtcaacagccagaacttaaaatctgctggaatagggtcagagaccatttcagctgcagctgaggaaaatgaaatgttcattttatttggtgccttgtctggggagcacactaactcttctggaaacgtgtcagtgaaacagagatcgttttgtggaatagcaacccatggttatggcgagtgacccgacgtgatctggggggcaggctgcagaggactcatgacaggctataccatgctgcggaatgggggcgcggggaacggaggtcagacctgcatgctgcgctggtccaaccgcatccgcctcacgtggctcagcttcacgctctttgtcatcctggtcttcttcccgctcatcgcccactattacctcaccactctggatgaggctgatgaggcaggcaagcggatttttggtccccgggtggggaacgagctgtgcgaggtgaagcacgtgctggatctgtgccgcatccgggagtcggtgagtgaagagctcctgcagctggaggccaagcgccaagagctgaacagcgagatcgccaagctgaatctgaagatcgaagcctgtaagaagagcattgagaacgccaagcaggacctgctccagctcaagaatgtcatcagccagaccgagcattcctacaaggagctcatggcccagaaccagcccaagctgtccctgcccatccgactgctcccagagaaggacgatgccggcctccctcccccgaaggccactcggggctgccggctacacaactgctttgattattctcgttgccctctcacctctggcttcccggtctacgtctatgacagtgaccagtttgtctttggcagctacctggatcccttggtcaagcaggcttttcaggcgacagcacgagctaacgtttatgttacagaaaatgcagacatcgcctgcctttacgtgatactagtgggagagatgcaggagccggtggtgctgcggcctgctgagctggagaagcagttgtattccctgccacactggcggacggatggacacaaccatgtcatcatcaatctgtcacgtaagtcagatacacagaaccttctctataacgtcagtactggccgtgccatggtggcccagtccaccttctacactgtccagtacagacctggctttgacttggtcgtatcaccgctggtccatgccatgtctgagcccaacttcatggaaatcccaccacaggtgccggtgaagcggaaatatctcttcaccttccagggcgagaagattgagtctctgaggtctagccttcaggaggcccgctccttcgaagaggaaatggagggcgaccctcccgccgactacgatgaccggatcattgccaccctgaaggcggtgcaggacagcaagctggatcaggtcctggtggaattcacctgcaaaaaccagcccaaacccagcctgccgactgagtgggcactgtgtggagagcgggaggaccgcttggaattgctgaagctctccaccttcgccctcatcattacccccggggaccctcgcttggttatttcctctgggtgtgcaacacggctcttcgaagccctggaagtcggtgccgtcccggtggtgctgggggagcaggtccagcttccctaccaggacatgctgcagtggaacgaggcggccctggtggtgccaaagcctcgtgttaccgaggttcatttcctgctcagaagcctctccgatagtgacctcctggctatgaggcggcaaggccgctttctctgggagacttacttctccactgctgacagtatttttaataccgtgctggctatgattaggactcgcatccagatcccagccgctcccatccgggaagaggcggcagctgagatcccccaccgttcaggcaaggcggctggaactgaccccaacatggctgacaacggggacctggacctggggccagtggagacggagccgccctacgcctcacccagatacctccgcaatttcactctgactgtcactgacttttaccgcagctggaactgtgctccagggcctttccatcttttcccccacactccctttgaccctgtgttgccctcagaggccaaattcttgggctcagggactggctttcggcctattggtggtggagctgggggttctggcaaggaatttcaggcagcgcttggaggcaatgttccccgagagcagttcacggtggtgatgttgacttatgagcgggaggaagtgcttatgaactctttagagaggctgaatggcctcccttacctgaacaaggtcgtggtggtgtggaattctcccaagctgccatcagaggaccttctgtggcctgacattggcgtccccatcatggtggtccgtactgagaagaacagtttgaacaaccgattcttaccctggaatgaaattgagacagaggccatcctgtccattgatgacgatgctcacctccgccatgacgaaatcatgtttgggttccgggtgtggagagaagctcgggaccgcatcgtgggcttccctggccgttaccacgcatgggacatcccccatcagtcctggctctacaactccaactactcctgtgagctgtccatggtgctgacaggtgctgccttctttcacaagtattatgcctacctgtattcttatgtgatgccccaggccatccgggacatggtggatgaatacatcaactgtgaggacattgccatgaacttccttgtctcccacatcactcggaagccccccatcaaggtgacctcacggtggacattccgatgcccaggatgccctcaggccctgtctcatgatgactcccacttccacgagcggcacaagtgcatcaacttcttcgtgaaggtgtacggctacatgcccctcctgtacacgcagttcagggtggattctgtgctcttcaagacacgcctgccccatgacaagaccaagtgcttcaagttcatctaggggcagcgcacggtctggggaagaggatgagcagagggaggaagatggctcccaaggttcctaggcattgcaggaccttgggcacatctgctggtgggtggcccagagcctctgctggaaggggcagcaggaggagtggaaggaaaccgctgcctttatcttgaagtcagccacactgggcctggagccctgggcggagtccccggggttccccacacagggcactgactgatagcttacactgaggactgtggcgactctgcagagtcactcacaccgttcgtacgcccaggacagctggttcgtggtttttacattcaataacaactattatgattatttaaaaagagaaagtttcagatttgccattcaaggcttatttatatatatgtgtgtgtatataaatacatgcacacacttgcatacatatatatttttggctgggggagtgtgagttttgcctttctaagggagggaccgcgcaggctcctttgttctgtattctggcggagatgggtcctggccttgtgtcactggcttatccttaaagatcatctcccatcctccccagcgccatctgtgtgcagcaaccagaaagggatgaacttggccctcttgcgggcctggacaaggtctcttccttaccctttctgttgccagtcagcaacctgtaactcacattctcttcccagtgaatccctgggagcgcctgaccctggtgggctgttcagcttcctgctgctggggccagcgatttttgaggatttatctttaggccaggcttgcctccgtacttatccctgctctcccatttctctcttgtttgagagagaatgaggaagcaaagagtgagaaagaataggggctgaagacgccactcccagatggctctttctatcctgctcttctgttgaaacacacgtgctgtgggcctcaggcgtttctgaagtgctctttcttggattggacaggagatcagcagcgtgcacatctgctgtggtctgaagtggtttgcaggtcagcctcctctccctagtgtagagcaagccagtgtccttcgaggaacccacccggctggccgggaagttttacagcaaggcgcctgccttgggataattccttggtgaaattcaccttccccccgcctctgtctggagccccatcctgtgttatctgtggtttttggacccctaatgtcagcttggctgtaggactccccgaggtttggtatgtgctagaacaatgggaggctgtgatttgctgtgtaagctcacatccagccttggaatctaacgggcattcacaacccgagttaccactttccactccctgcttaggattctgttccctgggctgaaactgaaataagctaattttttgggtcacggtggcagtaggggaacctaggagggtgtgagtggcatttgtcagggatttagcccatgacgtgtttcttgaaccctactttctggaagtggagttgactctggaagttttctagcaactgaacaaaagctcaggtttgtcctggtcatgcacatgccttaagccagttccgtcttccctagaccttggcatcctgtgcttctatttcttggaatacgttctcctctgacctgcctgtaccacgtgggtcctcttcaagtactgttttgaagctgggctcttttgtgtagctcccacccacctgtagggctagctcggcttaagggaactctccccattggcaaaccggacccggccgccgccaggactgtgtttccaaaggttccccgcccccaaccccagcatcagcctgtagctcccctgctgaggcagtgtggttatgttcccagcagtgggggtcagacgcccttcctcagaactttctagttgccctctacctgactcctgacttgtattccttttagcagtagccttcttccctcggggagccaaagagtgtggtgtgtggcgctatattgtggctgctatttcatctggtttcttttaatgtgaggaactcacatactgacttcagtgggactcggtgagccggggccgtctgtgtggtgggaccccctttagcgggactcagtgagctggggccgtctgtgtggtggagccagggcctctccctttagtggagccaggttgtcgggccccgaatgtcactggtggatctaagaagggctgagtggtctgacaccaaaacatgccgcagggagggctgtggtgccggtgcttccaacaaggacagccctccttgaccctgaaaggaacactggcttgaaggactgcagacaggctctgaggggcacgccctcctcagcgagaggcagcaaggtggccacagtgtcactggtcaggtgcttctcaccacgggaaagccgccgacctgtgactcgcttgagatgggaaagcggcgccacagaccccgggtctccttggctgtctgtgggccgcccctggccaccttgtcctggctcgcagggtgcaggagcgcctcgttctctgggtggccggcttgctgctccggtttgggctgtcttaccataacaccgtcccagggctctgcaggccactgtgagcgctggctccctgggcagtgctcctccgtgtggactgtgcctcaggccagggctcaccagctggggtcctgtccggaaggatgggatctttctgggagctgcgccggacagagtggggagctcctagtttgtggggggaagctttgatatccatgccacgtccatccaccccaccccttttcgtcacgagcacaatggtcttacattggatttttgtaaaaaaataaaaataaatggagactttaactcaa

SEQ ID NO: 117794 - DNA, 1779 bp, Artificial Sequence
  derived and/or modified sequence
agagggcggggccgggccgctggcgctgtcgccggctgcagtggccgccgctggagaccgcgggacctggcgctgcagcgaggagagcaagccctggaggttcactctttcaagaagtcgtgtgctgaggtgtaatgctacacaagtcagaggaaggaagggtcctggtggaattcacctgcaaaaaccagcccaaacccagcctgccgactgagtgggcactgtgtggagagcgggaggaccgcttggaattgctgaagctctccaccttcgccctcatcattacccccggggaccctcgcttggttatttcctctgggtgtgcaacacggctcttcgaagccctggaagtcggtgccgtcccggtggtgctgggggagcaggtccagcttccctaccaggacatgctgcagtggaacgaggcggccctggtggtgccaaagcctcgtgttaccgaggttcatttcctgctcagaagcctctccgatagtgacctcctggctatgaggcggcaaggccgctttctctgggagacttacttctccactgctgacagtatttttaataccgtgctggctatgattaggactcgcatccagatcccagccgctcccatccgggaagaggcggcagctgagatcccccaccgttcaggcaaggcggctggaactgaccccaacatggctgacaacggggacctggacctggggccagtggagacggagccgccctacgcctcacccagatacctccgcaatttcactctgactgtcactgacttttaccgcagctggaactgtgctccagggcctttccatcttttcccccacactccctttgaccctgtgttgccctcagaggccaaattcttgggctcagggactggctttcggcctattggtggtggagctgggggttctggcaaggaatttcaggcagcgcttggaggcaatgttccccgagagcagttcacggtggtgatgttgacttatgagcgggaggaagtgcttatgaactctttagagaggctgaatggcctcccttacctgaacaaggtcgtggtggtgtggaattctcccaagctgccatcagaggaccttctgtggcctgacattggcgtccccatcatggtggtccgtactgagaagaacagtttgaacaaccgattcttaccctggaatgaaattgagacagaggccatcctgtccattgatgacgatgctcacctccgccatgacgaaatcatgtttgggttccgggtgtggagagaagctcgggaccgcatcgtgggcttccctggccgttaccacgcatgggacatcccccatcagtcctggctctacaactccaactactcctgtgagctgtccatggtgctgacaggtgctgccttctttcacaagtattatgcctacctgtattcttatgtgatgccccaggccatccgggacatggtggatgaatacatcaactgtgaggacattgccatgaacttccttgtctcccacatcactcggaagccccccatcaaggtgacctcacggtggacattccgatgcccaggatgccctcaggccctgtctcatgatgactcccacttccacgagcggcacaagtgcatcaacttcttcgtgaaggtgtacggctacatgcccctcctgtacacgcagttcagggtggattctgtgctcttcaagacacgcctgccccatgacaagaccaagtgcttcaagttcatctaggggcagcgcacggtctggggaagaggatgagcagagg

SEQ ID NO: 117795 - DNA, 1608 bp, Artificial Sequence
  derived and/or modified sequence
atgctccacaagtccgaagaaggacgggttctcgttgaattcacatgtaagaatcagcctaaacctagcctgccaacagaatgggccctgtgtggcgaacgtgaggacagactggagttgctgaagctcagtacattcgccttgataataacacccggtgacccacgccttgtcatatccagcgggtgtgctacaaggctctttgaggccctcgaggtgggcgcagtgcctgtggttctgggggaacaggtgcagcttccttaccaggacatgcttcagtggaatgaggcggcacttgtcgtgcccaagcctagggtgactgaggtccacttcctcttaagaagcctgagcgattcagatctgctggccatgcggaggcagggcaggttcctctgggagacatatttttctaccgccgacagtatcttcaacacagtgttagctatgattcgaaccagaatccagatccctgcagccccaatccgagaagaagcagccgccgaaatcccacatagatctggtaaggccgcaggaacagatcctaacatggccgataacggggatctcgaccttggaccggtggagacggaacccccctatgctagccccaggtacctcaggaatttcactctcacagtgaccgacttttaccgttcatggaactgcgcccctggcccgttccacctcttccctcacactccttttgatccagtgctgccttctgaagcaaagtttttaggaagcgggacaggcttccgccctattggcggcggcgcagggggatctggtaaagagttccaggcagctctagggggtaacgtgccccgcgagcaatttactgtggtcatgctgacttacgagagagaagaagtccttatgaattcacttgagcgcctcaatggactcccatacctcaataaagttgtggtcgtgtggaacagcccgaagctcccaagtgaggacctgctctggccagacatcggtgttcccataatggtcgtgagaaccgagaagaactcccttaataaccgtttcctcccctggaacgagatcgaaactgaagccatactgtctattgacgacgacgcccacttgaggcatgacgagattatgttcggttttcgagtgtggcgagaagcaagggatcgcatcgtcggttttcctggcagataccatgcttgggacatcccccaccagagttggctttacaatagtaattacagctgcgagctgagcatggtgcttaccggagcagccttttttcacaaatactatgcctacctttactcatatgtaatgcctcaggctatccgcgatatggtcgatgaatatataaactgtgaagatatcgccatgaactttctggtgagccacatcaccagaaaacctcctatcaaagtaacatcacgctggacctttaggtgcccaggctgcccgcaggcattaagtcatgacgactcccatttccatgaaagacacaaatgcataaacttctttgtcaaggtgtatggttacatgcctctcctctatacccagttccgggtggacagcgtgcttttcaagaccagactgccgcacgacaagaccaagtgtttcaaattcatctag

SEQ ID NO: 117796 - DNA, 2760 bp, Artificial Sequence
  derived and/or modified sequence
atgactggttacaccatgctgaggaatggtggagcggggaacggaggccagacctgtatgcttcggtggtctaatcgaatacgacttacatggctgtctttcaccctttttgtcatacttgtgttttttcctctgattgcccattactacttgacaactctcgatgaagccgatgaagccgggaagcggatctttggaccaagagttggcaatgaactttgtgaggtcaagcacgtcctcgatttgtgccgaattagagaaagcgtcagtgaggaactgctgcagctcgaggcaaaacgtcaagagctgaactctgaaatagccaaattgaatctgaagatcgaagcgtgcaaaaaatccatcgagaatgccaaacaagacctgctgcagttgaaaaatgttatatcacagacagaacattcgtacaaagagctgatggcccagaatcagcccaagttaagcctgccaatccggctgctgcctgaaaaagacgatgccggacttcctcccccaaaggctacccgaggctgccgacttcacaactgttttgattattctagatgcccactgacaagcggtttccccgtttatgtttacgattctgaccagtttgtgttcgggtcttatctggaccccctcgtaaaacaggcgtttcaggcaacggcacgggctaacgtatacgttactgaaaacgccgatatagcttgcttgtatgtgatcctcgtcggggagatgcaagagcccgtggtgctgcgaccagccgagctggaaaaacagctgtacagccttccccactggcgtaccgacggacacaatcacgtgataatcaatctgtcacggaagtccgacacccagaatctcctgtacaacgtctcaaccgggcgggccatggtcgcgcagagcaccttctatactgtgcagtacaggcccggctttgacctggtggtctctccactggttcatgcaatgagcgagcctaattttatggaaatcccccctcaggtcccagtcaagagaaagtatttatttacttttcaaggagagaaaatcgaaagtctgcgatccagcctgcaggaagcacggtcatttgaggaggaaatggagggcgaccctcctgcagactacgatgaccgaattatagccacgttgaaagctgtccaggatagcaaactggaccaagtgctggtggaattcacctgcaagaatcagccaaaaccgtccttaccgactgagtgggcattgtgtggcgaaagggaagataggctggaattgcttaaactgagtacatttgccttgatcatcactcccggcgatccaagattagtgatcagcagtggatgcgctacaaggctgttcgaagctctggaagttggcgccgtgcccgttgtcctcggggaacaggtgcagctgccctatcaggacatgctgcaatggaacgaggcagcattggtcgttcctaagcccagagtgaccgaggtgcattttcttctccgttctctgtccgactccgatctcctggcaatgcgcagacagggtcgtttcctgtgggagacatatttcagcactgccgattcaatatttaacactgtgttagccatgattcggacccggattcaaatacctgccgcgccaatccgtgaggaagcagctgcggagatcccacaccgctccggaaaagcagccggtacggacccaaacatggcagacaacggagatttggacctgggaccagtggaaacagaaccaccatatgcatccccaagatatctgcgcaatttcaccttgacagtgaccgacttttacagatcctggaactgcgctcccggaccatttcatctgttcccacatactccatttgaccccgttcttccctcggaggctaaattcctaggatcaggcaccggatttcggccaataggaggcggcgctggaggaagtggaaaagaattccaggccgcgctaggcggtaatgtgcctcgagagcagtttactgtggtaatgctgacttacgaacgggaggaggtcctgatgaattcattagagcggctcaatggcttaccatatctcaataaagtagtcgttgtctggaacagtcctaagttgccatctgaggacttactgtggccggatattggagtgccaattatggttgtaagaacggagaaaaactcgctgaacaacaggtttctgccatggaacgagatcgagaccgaggccatcctctctatcgatgatgacgctcaccttagacatgatgagatcatgtttggatttagagtatggagagaagcacgcgatcggatcgtgggctttccaggtaggtatcacgcatgggatatcccgcatcagtcatggttatacaattccaattactcatgcgaactaagcatggtgctgactggcgctgccttctttcacaagtactatgcctacctgtattcctatgttatgcctcaggccatcagggatatggtcgatgagtatattaactgcgaggacattgctatgaacttcctggtgagtcacattactaggaaacctcctatcaaagtcacctccaggtggactttcaggtgtccgggttgcccccaggcactctctcatgatgattcacactttcacgagaggcacaagtgcataaatttcttcgttaaagtgtatgggtatatgcctctgctgtacacccagtttagagtggatagcgttctgttcaagacacgcctgccccatgacaagaccaagtgtttcaaatttatatag

SEQ ID NO: 117797 - DNA, 1608 bp, Artificial Sequence
  derived and/or modified sequence
atgctgcacaagtctgaggagggccgggtgctggtggagttcacctgcaagaaccagcccaagcccagcctgcccacagagtgggccctgtgtggggagagagaagatcggctggagctgctgaagctgagcacctttgccctgatcatcacccctggggacccccggctggtgatcagcagcggctgtgccacccggctgtttgaggccctggaggtgggcgctgtgcctgtggtgctgggggagcaggtgcagctgccctaccaggacatgctgcagtggaatgaagctgccctggtggtgcccaagccccgggtgacagaggtgcacttcctgctgcggagcctgagtgacagcgacctgctggccatgaggcggcagggccgcttcctgtgggagacctacttcagcacagctgacagcatcttcaacacagtgctggccatgatccgcacccgcatccagatcccagctgcccccatccgggaggaggccgctgctgagatcccccacaggtctgggaaggctgctggaacagaccccaacatggctgacaacggggacctggacctgggccctgtggagacagagcccccctatgccagcccccgctacctgaggaacttcaccctgactgtgacagacttctaccgctcctggaactgtgcccctggccccttccacctgttcccccacaccccatttgatcctgtgctgcccagcgaggccaagttcctgggcagcggcaccggcttccggcccatcggcggcggggccggcggcagcggcaaggagttccaggccgccctgggcggcaatgtgccccgggagcagttcaccgtggtgatgctgacctatgaaagagaggaggtgctgatgaacagcctggagcggctgaatggcctgccctacctgaacaaggtggtggtggtgtggaacagccccaagctgcccagcgaggacctgctgtggccagacattggagtgcccatcatggtggtgaggacagagaagaacagcctgaacaaccgcttcctgccctggaatgaaattgaaacagaggccatcctgagcattgatgatgatgcccacctgcggcatgatgagatcatgtttggcttccgggtgtggagggaggcccgggaccgcatcgtgggcttccctggccgctaccacgcctgggacatcccccaccagagctggctgtacaacagcaactacagctgtgagctgtccatggtgctgaccggggccgccttcttccacaagtactatgcctacctgtacagctatgtgatgccccaggccatccgggacatggtggatgagtacatcaactgtgaggacatcgccatgaacttcctggtgagccacatcaccaggaagccacccatcaaggtgaccagccgctggaccttccgctgccccggctgcccccaggccctgagccatgatgacagccacttccacgagcggcacaagtgcatcaacttctttgtgaaggtgtatggctacatgcccctgctgtacacccagttccgggtggacagcgtgctcttcaagacccggctgccccatgacaagaccaagtgcttcaagttcatctag

SEQ ID NO: 117798 - DNA, 2760 bp, Artificial Sequence
  derived and/or modified sequence
atgacaggctacaccatgctgagaaatggaggagctggaaatggaggccagacctgcatgctgcgctggagcaaccgcatccggctgacctggctgtccttcaccctgtttgtgatcctggtgttcttccccctcatcgcccactactacctgaccaccctggatgaagcagatgaggccggcaagaggatcttcggcccccgggtgggcaatgagctgtgtgaggtgaagcacgtgctggacctgtgccgcatccgggagagcgtgtctgaggagctgctgcagctggaggccaagaggcaggagctgaacagcgagatcgccaagctgaacctgaagattgaggcctgcaagaagagcattgaaaatgccaagcaggacctgctgcagctgaagaatgtcatcagccagacagagcacagctacaaggagctgatggcccagaaccagcccaagctgagcctgcccatccggctgctgcctgagaaggatgatgctggcctgcccccacccaaggccacccggggctgccgcctgcacaactgctttgactacagccgctgccccctgaccagcggcttccctgtgtatgtgtatgacagcgaccagtttgtgtttggcagctacctggaccccctggtgaagcaggccttccaggccacagcccgggccaacgtgtatgtgacagaaaatgctgacatcgcctgcctgtatgtgatcctggtgggggagatgcaggagcctgtggtgctgcggcctgctgagctggagaagcagctgtacagcctgccccactggaggacagatggccacaaccacgtgatcatcaacctgagcaggaagagtgacacccagaacctgctgtacaacgtgtccacaggccgggccatggtggcccagagcaccttctacacagtgcagtaccggcccggctttgacctggtggtgagccccctggtgcacgccatgtctgagcccaacttcatggagatccccccccaggtgcctgtgaagaggaagtacctgttcaccttccagggcgagaagattgagagcctgcggagcagcctgcaggaggcccggagctttgaggaggagatggagggggaccccccagctgactatgatgaccgcatcatcgccaccctgaaggctgtgcaggacagcaagctggaccaggtgctggtggagttcacctgcaagaaccagcccaagcccagcctgcccacagagtgggccctgtgtggggagagagaagatcggctggagctgctgaagctgagcacctttgccctgatcatcacccctggggacccccggctggtgatcagcagcggctgtgccacccggctgtttgaggccctggaggtgggcgctgtgcctgtggtgctgggggagcaggtgcagctgccctaccaggacatgctgcagtggaatgaagctgccctggtggtgcccaagccccgggtgacagaggtgcacttcctgctgcggagcctgagtgacagcgacctgctggccatgaggcggcagggccgcttcctgtgggagacctacttcagcacagctgacagcatcttcaacacagtgctggccatgatccgcacccgcatccagatcccagctgcccccatccgggaggaggccgctgctgagatcccccacaggtctgggaaggctgctggaacagaccccaacatggctgacaacggggacctggacctgggccctgtggagacagagcccccctatgccagcccccgctacctgaggaacttcaccctgactgtgacagacttctaccgctcctggaactgtgcccctggccccttccacctgttcccccacaccccatttgatcctgtgctgcccagcgaggccaagttcctgggcagcggcaccggcttccggcccatcggcggcggggccggcggcagcggcaaggagttccaggccgccctgggcggcaatgtgccccgggagcagttcaccgtggtgatgctgacctatgaaagagaggaggtgctgatgaacagcctggagcggctgaatggcctgccctacctgaacaaggtggtggtggtgtggaacagccccaagctgcccagcgaggacctgctgtggccagacattggagtgcccatcatggtggtgaggacagagaagaacagcctgaacaaccgcttcctgccctggaatgaaattgaaacagaggccatcctgagcattgatgatgatgcccacctgcggcatgatgagatcatgtttggcttccgggtgtggagggaggcccgggaccgcatcgtgggcttccctggccgctaccacgcctgggacatcccccaccagagctggctgtacaacagcaactacagctgtgagctgtccatggtgctgaccggggccgccttcttccacaagtactatgcctacctgtacagctatgtgatgccccaggccatccgggacatggtggatgagtacatcaactgtgaggacatcgccatgaacttcctggtgagccacatcaccaggaagccacccatcaaggtgaccagccgctggaccttccgctgccccggctgcccccaggccctgagccatgatgacagccacttccacgagcggcacaagtgcatcaacttctttgtgaaggtgtatggctacatgcccctgctgtacacccagttccgggtggacagcgtgctcttcaagacccggctgccccatgacaagaccaagtgcttcaagttcatctag

SEQ ID NO: 117799 - DNA, 1608 bp, Artificial Sequence
  derived and/or modified sequence
atgctgcacaagagcgaggagggccgggtgctggtggagttcacctgcaagaatcagccaaaaccctccctgccaaccgagtgggctctgtgcggggagcgcgaggaccgtttagagctgctgaaactcagcacattcgcactgatcattacacctggcgaccctcgactggtcattagtagcggttgtgctacgagattattcgaagcgctggaagttggcgcagtgcccgttgtcttgggtgaacaggtccaactaccataccaggacatgttgcagtggaacgaggctgctctcgtggtccctaagcctcgcgttactgaggtgcacttcctgttaagatctctgtcagatagcgatctcctggccatgcgacgccaggggcgcttcctttgggagacatattttagtacagccgacagtattttcaataccgtcctggccatgatcagaacacgaatccagatacctgccgctccaatacgggaggaggccgcggcagagattccacaccgtagcgggaaggctgccggaacggaccccaacatggctgacaacggggatctcgatcttggcccagtcgagaccgagcctccatacgccagtcctaggtaccttcggaacttcaccttaaccgtgacagacttctatcggtcgtggaactgcgctcctgggccttttcacctgtttccccacactccttttgatcctgtccttccgagcgaggccaagttcctgggctccgggacaggtttcaggcccatagggggcggagctggtggcagcgggaaagaatttcaggccgccctcggcggcaatgtgccacgcgagcagttcaccgtggtcatgctgacatatgaacgtgaggaagttctgatgaacagccttgagcgacttaacgggctgccctatttgaacaaagtggtggtggtgtggaacagtcccaagcttccctcagaggatctactttggccggacatcggtgttcctatcatggtggtccgaacggaaaaaaactccctcaacaatcggtttttaccgtggaacgagatcgaaacggaggccatcctgagcattgatgatgacgctcacctgcggcatgatgagattatgttcggctttcgggtgtggcgcgaggcgcgtgatcgcattgtaggatttcccggcagataccacgcatgggacatccctcaccaatcctggctctataactctaactactcgtgcgagctttccatggtactgacaggagctgccttttttcacaagtattatgcgtacttgtatagttatgtcatgccgcaggctattagagacatggtggatgagtacataaactgtgaagatattgcaatgaatttcctggtgtcccacatcactcgtaaaccacccattaaggtgacatcaaggtggacctttagatgtcctgggtgtcctcaagcgctcagccacgacgatagtcacttccatgagcgacataagtgcatcaactttttcgtgaaggtttatgggtacatgccactgttatatacgcagttccgggtcgacagtgtgctgtttaagacccgtttacctcacgacaagacaaagtgcttcaagtttatatag

SEQ ID NO: 117800 - DNA, 2760 bp, Artificial Sequence
  derived and/or modified sequence
atgaccggctacaccatgctgcggaacggcggcgccggcaacggcgggcagacctgcatgctgcggtggtcgaataggatccggttaacctggctgagtttcacactctttgtaatcctcgtgttttttcctcttatagcacattactacttaacgacactggatgaggcagatgaggcgggaaagcggatatttggcccccgtgtgggtaacgagctctgtgaagtgaaacatgtccttgatctgtgtcggattcgagaaagtgtgagtgaagagttgcttcagctggaggccaaacgtcaggaacttaattcagaaatcgctaaactgaacctaaagatcgaggcgtgcaagaagagcattgaaaacgcaaaacaagacctgctacagctgaagaacgtgataagccagaccgaacactcctataaagagctcatggcccagaaccagccaaagttgagtcttcccattcgattgctgccggagaaggacgatgcggggctgccgccccccaaagccacacgtggctgtagactacacaactgttttgattattcccggtgccctcttaccagcggcttccctgtctatgtgtatgattcagatcagtttgtctttgggagctatctggaccctctggtgaaacaagccttccaggcaacagccagggccaacgtgtatgtgactgaaaatgcggatatagcctgcttgtacgtaattctcgttggggaaatgcaagaaccagtcgtgcttaggcctgcggagctggaaaagcagctttatagccttccacactggcggactgatggccacaaccatgtgatcatcaacttgtctagaaaatctgacacgcagaacttgctgtataatgtgagtacaggacgggccatggttgcccagagcacgttttatactgtccagtatcggcctggttttgacctcgtggtgtcgccgctagtccacgcaatgagcgagcctaactttatggaaatccctccccaggttcccgtgaaacgcaagtacctctttacattccagggcgagaagattgagtctcttcgatcctctttgcaggaagccaggtcgttcgaggaagaaatggagggagatccaccggctgattatgatgatcgcattattgctaccttgaaagcggttcaggatagcaagctggatcaagtcttagtagagtttacatgtaagaatcagcccaagccaagcctgcctacagagtgggcactttgcggcgagagagaggaccgcttggaattgttgaaacttagcacatttgcactaattattacccccggcgatcctcggctggtaatatcttctggttgcgccacccggcttttcgaggctcttgaggtcggagctgtgcctgtggtcttgggtgaacaggtccagctcccttaccaggatatgttacagtggaacgaggccgccctcgtcgtccccaaacccagagtaaccgaagtgcacttcctcttgaggagtctctctgacagcgatcttctcgctatgcgcagacagggacgttttctgtgggagacctacttctcaacagcggattcaatctttaatacagtgctcgccatgatccgcacaaggatccagatccctgcagcaccaattagggaagaggccgcggccgagattccccaccgctcaggtaaagcagccggaacagatcctaacatggctgataatggggatctcgacctgggtccggtcgagaccgagccgccgtatgctagccctcggtacctgagaaattttactcttacagttacagatttttatcgatcttggaattgcgcacctggaccattccacctatttccacacacacctttcgacccagtgcttccgagcgaggcaaagttcctgggaagcggtacgggtttccgacctatcggcggaggcgctggtggctcagggaaagagtttcaagccgctttaggaggcaacgtgccaagggagcagttcactgtcgtaatgctgacctatgagcgtgaggaggtactgatgaacagtctcgagcgtctaaacggtttaccttaccttaacaaagtggtggtcgtttggaattcgcccaagttgccttctgaagatcttttatggcctgacatcggtgtgccgatcatggtcgtgcggaccgagaaaaactccctgaataacagatttctcccatggaatgaaattgagactgaggccatcttgtctattgacgatgatgcacatctccggcacgacgaaataatgtttggatttagggtgtggcgcgaggcccgcgacagaattgtgggcttcccaggtcggtaccacgcctgggatataccgcaccagtcctggctctataactccaattattcctgcgagctctccatggtgctgacgggcgctgcctttttccacaaatactatgcgtacctgtatagttacgtgatgccccaggctatccgagatatggtggatgaatacataaattgtgaggatattgccatgaatttcctcgtgagccacatcacgagaaaacctccaataaaagtcacttctcgctggacctttcgctgcccgggttgtccccaggccctttcccatgatgactcacatttccacgaacggcacaagtgtattaatttcttcgtaaaagtgtacggttacatgccactgctctacacccagtttcgagtcgacagcgtgctgttcaaaactaggctgccgcacgataaaacgaaatgttttaaatttatttag

SEQ ID NO: 117801 - DNA, 1608 bp, Artificial Sequence
  derived and/or modified sequence
atgttgcacaagagcgaagagggcagagtattagttgagtttacctgcaagaaccagcccaaaccctctttgcccacagaatgggccctttgcggggagagggaggaccgcctggagctgctcaaactatctacattcgcgctcattattactcccggtgacccgagattggtgatttcttccggatgcgccactagactcttcgaggctctcgaggtgggggcagtacccgtggtacttggggaacaagtccagctgccctaccaagatatgctacagtggaacgaagcagcgcttgttgtgcccaaacctcgcgtgactgaagttcatttcctcctccggtcccttagcgattctgatcttctggctatgaggcgtcagggaaggttcttgtgggagacatacttcagcaccgccgacagcatttttaatacggtcctggctatgatacgaactcgcatccagattccagccgctcctatacgggaggaggcagccgcagagatcccccatcggagcgggaaagccgcaggcacggatcctaatatggccgacaacggggacttggatttgggcccagtcgaaaccgagccaccatacgcttcacctcgatacctacgcaatttcaccctaaccgttacggacttctacagaagctggaactgtgccccagggccatttcacctgtttccccacacgcccttcgaccctgtactccccagtgaggcaaaatttcttggcagcgggacagggtttcggcctatcgggggtggtgctggcggatctggcaaagaattccaggctgccctgggcggaaacgtgcctcgagagcagttcactgtggtcatgctgacttacgagcgcgaggaggttttaatgaattccctcgagcgtctgaacgggctgccatacctcaacaaagtcgtcgtggtttggaactcgcctaagctaccaagtgaggacctactgtggccagacatcggggtgcctatcatggtggtgcggactgagaaaaacagcttaaacaatcgttttctcccctggaatgaaatcgaaactgaggctattctgagcatcgacgatgatgctcatttgaggcatgacgagatcatgttcggatttcgcgtgtggcgagaggctcgggacagaatcgttggttttccgggacgttatcacgcctgggatatcccacaccaatcttggctctacaactctaattatagctgcgagctgtcgatggtgttaactggagccgctttcttccacaaatattatgcttatctctactcatacgtcatgccccaggcaataagggatatggtggatgagtatataaattgcgaagatattgcaatgaatttcttggttagtcatattacccggaaaccccctattaaagtgaccagtcggtggacgttccggtgtcctgggtgtccacaggccctgagtcatgacgactcccattttcatgaacggcataagtgcatcaacttcttcgtcaaggtatacgggtatatgccgctcctgtatactcagttccgggtggacagcgtgctgtttaaaacccggctcccgcacgataagaccaaatgctttaagtttatttag

SEQ ID NO: 117802 - DNA, 2760 bp, Artificial Sequence
  derived and/or modified sequence
atgactggatacacaatgctgcggaacggcggagctgggaacgggggacaaacttgcatgctgagatggtctaataggatccgattaacctggttgagcttcactttgtttgttattttggtgtttttccccctgatcgcgcactactacctcaccaccctcgacgaagccgatgaggccggaaagaggatttttggtcctagagtgggcaacgaattatgtgaagtgaagcacgtgctggacctttgccgtattcgggagtcagtgagcgaggaacttctccagctagaagcaaaaaggcaagaactcaacagcgaaattgcgaagctgaacctcaagatagaggcctgcaaaaagtctatcgagaatgccaagcaggaccttctgcaactgaagaacgtcatttctcagacagaacattcttataaagaactgatggcacaaaaccagccgaagcttagccttcctatcagacttctccctgagaaggatgacgccggactgccccctccaaaggcaactaggggttgtagactgcataattgtttcgactactctcgctgcccactgacatctggcttcccggtgtacgtttacgatagtgaccagttcgtattcggttcctacctggatcctttggtgaagcaggcttttcaagccacagccagagccaatgtttacgtgacagagaacgctgatatcgcctgcttgtacgtcatccttgttggtgagatgcaagaaccagttgtactgaggccagcggaactggaaaaacagctgtatagtctgccacattggagaactgatggtcacaaccacgtgattatcaacttgagtcggaagagcgatactcagaatcttctctataatgtgagcaccgggagagcaatggtggcccagagtaccttttacacagtgcagtataggccaggcttcgacttagtcgtttcaccacttgtgcatgctatgtccgagccgaatttcatggaaattcctccacaggtgccagtgaagcgaaaatatctctttacattccaaggcgagaaaatcgagtctctccgaagcagtttgcaggaggctagatctttcgaggaggagatggaaggcgaccccccagcggattacgatgaccggattatcgctaccctcaaggccgttcaagactcaaagctggaccaggtgctcgtcgaattcacctgtaagaaccagcctaagccttctttgccgaccgaatgggcactgtgtggggagcgcgaggaccggcttgaattactgaagctgagcacatttgcgctgatcattactccgggtgatccaaggcttgttatctcaagtggctgtgctaccaggctcttcgaggctctggaagtgggagccgtcccagtggtgttaggcgagcaggtgcagctaccttatcaggatatgctgcagtggaacgaggcggcactggttgtgccaaagccacgggtgaccgaggtgcattttttgctgcgatccctatctgacagtgatctgctcgctatgcggaggcaaggccgttttctctgggaaacatattttagtacagctgactccatatttaacactgtgctggccatgattaggacgagaatccaaatccctgccgcacccatacgggaagaggccgcagccgaaataccccatcgttcaggtaaggccgcagggacagatcctaatatggcggataacggggatctggacctcgggcctgtcgagaccgagcccccttatgcaagtcctcgctacctgcggaactttactctaacagttacagacttctataggagttggaactgcgcgccaggccctttccatttgtttccgcacacaccttttgatcccgtcctccctagtgaagctaaattcctaggcagtgggacaggttttagacctattggaggaggcgcaggcggatccggcaaagaattccaggcggcactggggggtaatgtgccccgtgagcagtttactgtggtgatgttgacctatgaaagagaggaggtcttgatgaactctctggaaaggctcaacgggctgccatacctgaacaaagtggtggtggtctggaatagcccgaaactgccctcagaagatctgctgtggcccgatatcggagtgccaatcatggtcgttaggaccgagaaaaacagcctgaacaaccgattcctgccctggaatgagattgagactgaagccatcctctccatcgatgacgatgcccacttacgccatgacgaaattatgtttggatttcgcgtatggcgtgaagcccgtgacaggatcgtggggttcccaggtagataccatgcatgggatatcccacaccagtcgtggctctacaattccaactattcatgtgaactatccatggtacttactggcgctgcctttttccacaagtattacgcatatctgtactcctacgttatgccgcaggcaatccgggacatggtcgacgagtacatcaactgtgaggatatcgccatgaacttcctcgtgagtcatatcacccggaagccccctatcaaagtcacaagcaggtggacattccgatgtcccggttgcccgcaggccctgtcccatgacgactcccacttccacgaaaggcataaatgcatcaattttttcgtaaaagtgtatggctatatgcctctcctttacactcagtttcgagttgatagtgtgctgtttaagaccagactacctcatgacaaaacaaaatgtttcaagttcatctag

SEQ ID NO: 117803 - DNA, 1608 bp, Artificial Sequence
  derived and/or modified sequence
atgctgcacaagagcgaggagggcagagtgctggtggagttcacctgcaagaaccagcccaagcccagcctgcccaccgagtgggccctgtgcggcgagagagaggacagactggagctgctgaagctgagcaccttcgccctgatcatcacccccggcgaccccagactggtgatcagcagcggctgcgccaccagactgttcgaggccctggaggtgggcgccgtgcccgtggtgctgggcgagcaggtgcagctgccctaccaggacatgctgcagtggaacgaggccgccctggtggtgcccaagcccagagtgaccgaggtgcacttcctgctgagaagcctgagcgacagcgacctgctggccatgagaagacagggcagattcctgtgggagacctacttcagcaccgccgacagcatcttcaacaccgtgctggccatgatcagaaccagaatccagatccccgccgcccccatcagagaggaggccgccgccgagatcccccacagaagcggcaaggccgccggcaccgaccccaacatggccgacaacggcgacctggacctgggccccgtggagaccgagcccccctacgccagccccagatacctgagaaacttcaccctgaccgtgaccgacttctacagaagctggaactgcgcccccggccccttccacctgttcccccacacccccttcgaccccgtgctgcccagcgaggccaagttcctgggcagcggcaccggcttcagacccatcggcggcggcgccggcggcagcggcaaggagttccaggccgccctgggcggcaacgtgcccagagagcagttcaccgtggtgatgctgacctacgagagagaggaggtgctgatgaacagcctggagagactgaacggcctgccctacctgaacaaggtggtggtggtgtggaacagccccaagctgcccagcgaggacctgctgtggcccgacatcggcgtgcccatcatggtggtgagaaccgagaagaacagcctgaacaacagattcctgccctggaacgagatcgagaccgaggccatcctgagcatcgacgacgacgcccacctgagacacgacgagatcatgttcggcttcagagtgtggagagaggccagagacagaatcgtgggcttccccggcagataccacgcctgggacatcccccaccagagctggctgtacaacagcaactacagctgcgagctgagcatggtgctgaccggcgccgccttcttccacaagtactacgcctacctgtacagctacgtgatgccccaggccatcagagacatggtggacgagtacatcaactgcgaggacatcgccatgaacttcctggtgagccacatcaccagaaagccccccatcaaggtgaccagcagatggaccttcagatgccccggctgcccccaggccctgagccacgacgacagccacttccacgagagacacaagtgcatcaacttcttcgtgaaggtgtacggctacatgcccctgctgtacacccagttcagagtggacagcgtgctgttcaagaccagactgccccacgacaagaccaagtgcttcaagttcatctag

SEQ ID NO: 117804 - DNA, 2760 bp, Artificial Sequence
  derived and/or modified sequence
atgaccggctacaccatgctgagaaacggcggcgccggcaacggcggccagacctgcatgctgagatggagcaacagaatcagactgacctggctgagcttcaccctgttcgtgatcctggtgttcttccccctgatcgcccactactacctgaccaccctggacgaggccgacgaggccggcaagagaatcttcggccccagagtgggcaacgagctgtgcgaggtgaagcacgtgctggacctgtgcagaatcagagagagcgtgagcgaggagctgctgcagctggaggccaagagacaggagctgaacagcgagatcgccaagctgaacctgaagatcgaggcctgcaagaagagcatcgagaacgccaagcaggacctgctgcagctgaagaacgtgatcagccagaccgagcacagctacaaggagctgatggcccagaaccagcccaagctgagcctgcccatcagactgctgcccgagaaggacgacgccggcctgcccccccccaaggccaccagaggctgcagactgcacaactgcttcgactacagcagatgccccctgaccagcggcttccccgtgtacgtgtacgacagcgaccagttcgtgttcggcagctacctggaccccctggtgaagcaggccttccaggccaccgccagagccaacgtgtacgtgaccgagaacgccgacatcgcctgcctgtacgtgatcctggtgggcgagatgcaggagcccgtggtgctgagacccgccgagctggagaagcagctgtacagcctgccccactggagaaccgacggccacaaccacgtgatcatcaacctgagcagaaagagcgacacccagaacctgctgtacaacgtgagcaccggcagagccatggtggcccagagcaccttctacaccgtgcagtacagacccggcttcgacctggtggtgagccccctggtgcacgccatgagcgagcccaacttcatggagatccccccccaggtgcccgtgaagagaaagtacctgttcaccttccagggcgagaagatcgagagcctgagaagcagcctgcaggaggccagaagcttcgaggaggagatggagggcgacccccccgccgactacgacgacagaatcatcgccaccctgaaggccgtgcaggacagcaagctggaccaggtgctggtggagttcacctgcaagaaccagcccaagcccagcctgcccaccgagtgggccctgtgcggcgagagagaggacagactggagctgctgaagctgagcaccttcgccctgatcatcacccccggcgaccccagactggtgatcagcagcggctgcgccaccagactgttcgaggccctggaggtgggcgccgtgcccgtggtgctgggcgagcaggtgcagctgccctaccaggacatgctgcagtggaacgaggccgccctggtggtgcccaagcccagagtgaccgaggtgcacttcctgctgagaagcctgagcgacagcgacctgctggccatgagaagacagggcagattcctgtgggagacctacttcagcaccgccgacagcatcttcaacaccgtgctggccatgatcagaaccagaatccagatccccgccgcccccatcagagaggaggccgccgccgagatcccccacagaagcggcaaggccgccggcaccgaccccaacatggccgacaacggcgacctggacctgggccccgtggagaccgagcccccctacgccagccccagatacctgagaaacttcaccctgaccgtgaccgacttctacagaagctggaactgcgcccccggccccttccacctgttcccccacacccccttcgaccccgtgctgcccagcgaggccaagttcctgggcagcggcaccggcttcagacccatcggcggcggcgccggcggcagcggcaaggagttccaggccgccctgggcggcaacgtgcccagagagcagttcaccgtggtgatgctgacctacgagagagaggaggtgctgatgaacagcctggagagactgaacggcctgccctacctgaacaaggtggtggtggtgtggaacagccccaagctgcccagcgaggacctgctgtggcccgacatcggcgtgcccatcatggtggtgagaaccgagaagaacagcctgaacaacagattcctgccctggaacgagatcgagaccgaggccatcctgagcatcgacgacgacgcccacctgagacacgacgagatcatgttcggcttcagagtgtggagagaggccagagacagaatcgtgggcttccccggcagataccacgcctgggacatcccccaccagagctggctgtacaacagcaactacagctgcgagctgagcatggtgctgaccggcgccgccttcttccacaagtactacgcctacctgtacagctacgtgatgccccaggccatcagagacatggtggacgagtacatcaactgcgaggacatcgccatgaacttcctggtgagccacatcaccagaaagccccccatcaaggtgaccagcagatggaccttcagatgccccggctgcccccaggccctgagccacgacgacagccacttccacgagagacacaagtgcatcaacttcttcgtgaaggtgtacggctacatgcccctgctgtacacccagttcagagtggacagcgtgctgttcaagaccagactgccccacgacaagaccaagtgcttcaagttcatctag

SEQ ID NO: 117805 - protein, 132 aa, Artificial Sequence
  derived and/or modified sequence
MCDAFVGTWKLVSSENFDDYMKEVGVGFATRKVAGMAKPNMIISVNGDVITIKSESTFKNTEISFILGQEFDEVTADDRKVKSTITLDGGVLVHVQKWDGKSTTIKRKREDDKLVVECVMKGVTSTRVYERA

SEQ ID NO: 117806 - DNA, 399 bp, Artificial Sequence
  derived and/or modified sequence
atgtgcgacgccttcgtgggcacctggaagctggtgagcagcgagaacttcgacgactacatgaaggaggtgggcgtgggcttcgccaccagaaaggtggccggcatggccaagcccaacatgatcatcagcgtgaacggcgacgtgatcaccatcaagagcgagagcaccttcaagaacaccgagatcagcttcatcctgggccaggagttcgacgaggtgaccgccgacgacagaaaggtgaagagcaccatcaccctggacggcggcgtgctggtgcacgtgcagaagtgggacggcaagagcaccaccatcaagagaaagagagaggacgacaagctggtggtggagtgcgtgatgaagggcgtgaccagcaccagagtgtacgagagagcctag

SEQ ID NO: 117807 - DNA, 399 bp, Artificial Sequence
  derived and/or modified sequence
atgtgtgatgcattcgtgggcacctggaagctagtcagtagcgaaaactttgacgattacatgaaggaggtgggcgtggggtttgcaacacgcaaggttgctggaatggcaaaacctaatatgattattagcgttaatggagatgtcataactatcaagagtgaaagcacattcaagaacaccgagattagcttcatcctcggacaggaattcgacgaagtcaccgccgacgaccgtaaagtgaagtccactattacactggacggtggcgtgctggtacacgtgcagaaatgggacggcaaatccactacgatcaagaggaaacgcgaagacgacaagctggtggtggagtgcgttatgaaaggcgttacctctacccgcgtgtatgagagggcctag

SEQ ID NO: 117808 - DNA, 941 bp, Artificial Sequence
  derived and/or modified sequence
aaaaggaagttatctggactcaagagggtcacagcaccctcctgaaaactgcagcttccttctcaccttgaagaataatcctagaaaactcacaaaatgtgtgatgcttttgtaggtacctggaaacttgtctccagtgaaaactttgatgattatatgaaagaagtaggagtgggctttgccaccaggaaagtggctggcatggccaaacctaacatgatcatcagtgtgaatggggatgtgatcaccattaaatctgaaagtacctttaaaaatactgagatttccttcatactgggccaggaatttgacgaagtcactgcagatgacaggaaagtcaagagcaccataaccttagatgggggtgtcctggtacatgtgcagaaatgggatggaaaatcaaccaccataaagagaaaacgagaggatgataaactggtggtggaatgcgtcatgaaaggcgtcacttccacgagagtttatgagagagcataagccaagggacgttgacctggactgaagttcgcattgaactctacaacattctgtgggatatattgttcaaaaagatattgttgttttccatgatttagcaagcaactaattttctcccaagctgattttattcaatatggttacgttggttaaataaactttttttagatttagaaggtgatgtaatgatgtattcattgtgcttatgatgtattcttagtcataactgagtgaaggaaatgggaaatttgcattatttctttgttctgatatgaataataacatatttcataataattcaaggtaaaaagggatatctatggatttccctaggtaggagataacaagtatgtaccattactgaatattaaatccttctttaccatagctacagttaagtaggtgtatctcagaaacctaaggtagttttaaatgtagtgaaattg

SEQ ID NO: 117809 - DNA, 399 bp, Artificial Sequence
  derived and/or modified sequence
atgtgtgatgcctttgtgggcacctggaagctggtgtccagtgaaaattttgatgactacatgaaggaggtgggcgtgggctttgccaccaggaaggtggccggcatggccaagcccaacatgatcatctctgtgaatggagatgtgatcaccatcaagtctgagagcaccttcaagaacacagagatctccttcatcctgggccaggagtttgatgaggtgacagcagatgacaggaaggtgaagagcaccatcaccctggatggcggcgtgctggtgcacgtgcagaagtgggatggcaagagcaccaccatcaagaggaagcgggaggatgacaagctggtggtggagtgtgtgatgaagggcgtgaccagcaccagggtgtatgagcgggcctag

SEQ ID NO: 117810 - DNA, 399 bp, Artificial Sequence
  derived and/or modified sequence
atgtgcgacgccttcgtgggcacctggaagctggtgagcagcgagaattttgatgactacatgaaagaagtgggggtgggctttgcaactcgaaaggtggccggaatggccaaacccaatatgataatttccgtgaacggcgacgtcattacgatcaaatccgagtccacttttaagaataccgagatctcatttattctgggtcaagagttcgacgaagtaacagcagacgacagaaaagtgaagagtacaattacattggacgggggagtcctggtgcacgtgcagaagtgggacgggaaatctactaccatcaaaaggaaaagagaggatgacaaactggttgtcgagtgtgtcatgaaaggcgtgacctccacccgcgtgtacgagagagcctag

SEQ ID NO: 117811 - DNA, 399 bp, Artificial Sequence
  derived and/or modified sequence
atgtgcgatgctttcgtggggacatggaagctggtctcttcagagaatttcgacgattatatgaaggaagtgggagtgggctttgccacacgcaaggtggccggtatggccaagccaaatatgattatcagcgtcaacggagatgtcatcacaatcaaatcagagagcaccttcaaaaataccgagatatcctttatactcggacaggagttcgacgaagtcacagctgatgaccggaaagttaagtccaccatcacattggacggcggagtgttggtccatgttcaaaagtgggatggaaagtccacaactattaaacgtaaaagagaagatgataaactcgtggtcgaatgtgtgatgaaaggagtgacatccacacgtgtgtacgagcgggcttag

SEQ ID NO: 117812 - protein, 127 aa, Artificial Sequence
  derived and/or modified sequence
MSFSGKYQLQSQENFEAFMKAIGLPEELIQKGKDIKGVSEIVQNGKHFKFTITAGSKVIQNEFTVGEECELETMTGEKVKTVVQLEGDNKLVTTFKNIKSVTELNGDIITNTMTLGDIVFKRISKRI

SEQ ID NO: 117813 - DNA, 546 bp, Artificial Sequence
  derived and/or modified sequence
tattcgaagggaagggagccccctataaaacagcctacagtggacagtctggtcggcagagccgcaggtcagtcgtgaagagggagctctattgccaccatgagtttctccggcaagtaccaactgcagagccaggaaaactttgaagccttcatgaaggcaatcggtctgccggaagagctcatccagaaggggaaggatatcaagggggtgtcggaaatcgtgcagaatgggaagcacttcaagttcaccatcaccgctgggtccaaagtgatccaaaacgaattcacggtgggggaggaatgtgagctggagacaatgacaggggagaaagtcaagacagtggttcagttggaaggtgacaataaactggtgacaactttcaaaaacatcaagtctgtgaccgaactcaacggcgacataatcaccaataccatgacattgggtgacattgtcttcaagagaatcagcaagagaatttaaacaagtctgcatttcatattattttagtgtgtaaaattaatgtaataaagtgaactttgtttt

SEQ ID NO: 117814 - DNA, 384 bp, Artificial Sequence
  derived and/or modified sequence
atgagcttttcaggtaaataccagttacagtctcaagagaactttgaggcctttatgaaggctatcggcctgccagaagaactcatacaaaagggaaaggatatcaaaggagtctccgaaatcgtccagaatggcaagcactttaagtttacaattacagccggatctaaggtcatacagaatgagtttacagtgggcgaagaatgcgagcttgagacgatgactggggagaaagtgaaaactgtggtccagctggaaggggataataagttggtgacaactttcaaaaatatcaaaagtgtgacagagctgaatggagatatcattaccaacaccatgactttaggtgacattgtgtttaagcggatatctaagcgcatttag

SEQ ID NO: 117815 - DNA, 384 bp, Artificial Sequence
  derived and/or modified sequence
atgtccttcagcggcaagtaccagctgcagagccaggagaactttgaggccttcatgaaggccatcggcctgcctgaggagctgatccagaagggcaaggacatcaagggcgtgtctgaaattgtgcagaatggcaagcacttcaagttcaccatcacagctggcagcaaggtgatccagaatgagttcaccgtgggggaggagtgtgagctggagaccatgactggagagaaggtgaagacagtggtgcagctggagggggacaacaagctggtgaccaccttcaagaacatcaagtctgtgacagagctgaatggagacatcatcaccaacaccatgaccctgggggacatcgtgttcaagaggatcagcaagaggatctag

SEQ ID NO: 117816 - DNA, 384 bp, Artificial Sequence
  derived and/or modified sequence
atgagcttcagcggcaagtaccagctgcagagccaggagaacttcgaggcttttatgaaagcaatcggtctccctgaggagctcatacagaagggtaaagacattaaaggggtcagcgaaatcgtgcagaatggtaaacacttcaagtttaccatcaccgctgggagcaaggtgattcaaaatgaatttaccgttggcgaagagtgtgaactggagaccatgaccggtgaaaaagtgaagaccgtggtgcagctggagggcgacaataaactcgtgacaaccttcaagaacatcaagagtgtgactgaacttaacggggacatcatcactaacactatgacactgggggacatagtctttaaaaggattagcaaacgcatctag

SEQ ID NO: 117817 - DNA, 384 bp, Artificial Sequence
  derived and/or modified sequence
atgagcttttctggcaaatatcaattgcaatcgcaagagaatttcgaagcatttatgaaggccattggcctgcctgaggagctgatccagaaggggaaagatattaagggtgtcagtgagatcgtgcagaacggaaagcactttaaattcactattaccgccggaagcaaggtgatccagaatgagttcaccgtgggcgaagagtgcgaactggaaactatgaccggggaaaaggttaaaaccgtcgttcagttagaaggtgacaacaaacttgtgacaaccttcaagaacattaaatctgtgacggagttgaacggagacatcatcaccaacactatgacactgggagacattgtcttcaaaaggatctcgaaacgtatctag

SEQ ID NO: 117818 - DNA, 384 bp, Artificial Sequence
  derived and/or modified sequence
atgagcttcagcggcaagtaccagctgcagagccaggagaacttcgaggccttcatgaaggccatcggcctgcccgaggagctgatccagaagggcaaggacatcaagggcgtgagcgagatcgtgcagaacggcaagcacttcaagttcaccatcaccgccggcagcaaggtgatccagaacgagttcaccgtgggcgaggagtgcgagctggagaccatgaccggcgagaaggtgaagaccgtggtgcagctggagggcgacaacaagctggtgaccaccttcaagaacatcaagagcgtgaccgagctgaacggcgacatcatcaccaacaccatgaccctgggcgacatcgtgttcaagagaatcagcaagagaatctag

SEQ ID NO: 117819 - protein, 135 aa, Artificial Sequence
  derived and/or modified sequence
MATVQQLEGRWRLVDSKGFDEYMKELGVGIALRKMGAMAKPDCIITCDGKNLTIKTESTLKTTQFSCTLGEKFEETTADGRKTQTVCNFTDGALVQHQEWDGKESTITRKLKDGKLVVECVMNNVTCTRIYEKVE

SEQ ID NO: 117820 - DNA, 851 bp, Artificial Sequence
  derived and/or modified sequence
ggccgtcgcgtaccctggcaagaggagctggttagcacctcccgaccccgagaaggcccagggggcgcccggcgggcggggcggggaccgggcgaggcccgcctcccattggccgcatagcgccgcccagcgcgggccgccgttataaagcagccgccggcgccgggtgcctcacagcacgctgccacgccgacgcagacccctctctgcacgccagcccgcccgcacccaccatggccacagttcagcagctggaaggaagatggcgcctggtggacagcaaaggctttgatgaatacatgaaggagctaggagtgggaatagctttgcgaaaaatgggcgcaatggccaagccagattgtatcatcacttgtgatggtaaaaacctcaccataaaaactgagagcactttgaaaacaacacagttttcttgtaccctgggagagaagtttgaagaaaccacagctgatggcagaaaaactcagactgtctgcaactttacagatggtgcattggttcagcatcaggagtgggatgggaaggaaagcacaataacaagaaaattgaaagatgggaaattagtggtggagtgtgtcatgaacaatgtcacctgtactcggatctatgaaaaagtagaataaaaattccatcatcactttggacaggagttaattaagagaatgaccaagctcagttcaatgagcaaatctccatactgtttctttcttttttttttcattactgtgttcaattatctttatcataaacattttacatgcagctatttcaaagtgtgttggattaattaggatcatccctttggttaataaataaatgtgtttgtgctaata

SEQ ID NO: 117821 - DNA, 408 bp, Artificial Sequence
  derived and/or modified sequence
atggcgaccgtccaacagctggaaggaaggtggcgtctggtggactctaagggcttcgatgaatacatgaaagagttgggagtgggaattgcccttagaaagatgggcgccatggccaaacccgattgcattattacttgtgacggtaaaaatctcacaataaaaactgaatctacgctgaagaccacccaattttcctgcacacttggcgagaagttcgaagagaccactgccgacggcagaaaaactcagaccgtgtgcaactttacggatggcgcccttgttcagcatcaggagtgggacgggaaggagagcacgatcactcgcaagctgaaagatgggaagctcgtggttgagtgtgtgatgaacaacgtgacctgtacccgaatatatgaaaaagttgagtag

SEQ ID NO: 117822 - DNA, 408 bp, Artificial Sequence
  derived and/or modified sequence
atggccaccgtgcagcagctggagggccgctggaggctggtggacagcaaaggatttgatgagtacatgaaggagctgggcgtgggcatcgccctgaggaagatgggcgccatggccaagccagactgcatcatcacctgtgatggcaagaacctgaccatcaagacagagagcaccctgaagaccacccagttcagctgcaccctgggggagaagtttgaggagaccacagcagatggcaggaagacccagacagtgtgcaacttcacagatggagccctggtgcagcaccaggagtgggatggcaaggagagcaccatcaccaggaagctgaaggatggcaagctggtggtggagtgtgtgatgaacaacgtgacctgcacccgcatctatgagaaggtggagtag

SEQ ID NO: 117823 - DNA, 408 bp, Artificial Sequence
  derived and/or modified sequence
atggccaccgtgcagcagctggagggccggtggcggctggtggactctaagggtttcgacgaatatatgaaggagctgggggtcggtattgcccttaggaaaatgggggctatggccaagccggattgcatcataacttgcgatggcaagaatctgacaattaagactgagtctacattgaaaactacccagttttcttgtaccctgggggagaaatttgaagaaaccacagccgacgggaggaagacccagacagtctgtaatttcacagatggagcgctggtccagcaccaggaatgggacggtaaagaatctaccattactagaaaactgaaggacggaaaactcgtcgttgaatgtgttatgaacaatgtgacctgcacccgcatttacgaaaaggttgagtag

SEQ ID NO: 117824 - DNA, 408 bp, Artificial Sequence
  derived and/or modified sequence
atggcaaccgtgcaacagttggaggggaggtggaggcttgtcgatagcaaggggtttgatgaatacatgaaagagcttggcgtaggcatcgctctccgtaagatgggagcgatggccaagccagattgcatcatcacctgtgacgggaagaacctcacaataaaaaccgaatccaccctgaagacaacacaattcagctgtactctgggagaaaaattcgaagagaccacagccgacgggaggaaaactcagacggtatgcaatttcactgatggagctttggtgcagcaccaggagtgggatggcaaagaatctacgattactcgcaaactcaaagacggaaagctcgtggttgagtgcgtcatgaataacgtgacctgcactcgcatctacgaaaaggtcgagtag

SEQ ID NO: 117825 - DNA, 408 bp, Artificial Sequence
  derived and/or modified sequence
atggccaccgtgcagcagctggagggcagatggagactggtggacagcaagggcttcgacgagtacatgaaggagctgggcgtgggcatcgccctgagaaagatgggcgccatggccaagcccgactgcatcatcacctgcgacggcaagaacctgaccatcaagaccgagagcaccctgaagaccacccagttcagctgcaccctgggcgagaagttcgaggagaccaccgccgacggcagaaagacccagaccgtgtgcaacttcaccgacggcgccctggtgcagcaccaggagtgggacggcaaggagagcaccatcaccagaaagctgaaggacggcaagctggtggtggagtgcgtgatgaacaacgtgacctgcaccagaatctacgagaaggtggagtag

SEQ ID NO: 117826 - protein, 132 aa, Artificial Sequence
  derived and/or modified sequence
MVEAFCATWKLTNSQNFDEYMKALGVGFATRQVGNVTKPTVIISQEGDKVVIRTLSTFKNTEISFQLGEEFDETTADDRNCKSVVSLDGDKLVHIQKWDGKETNFVREIKDGKMVMTLTFGDVVAVRHYEKA

SEQ ID NO: 117827 - DNA, 1026 bp, Artificial Sequence
  derived and/or modified sequence
tttctcaggcataagggctgtagtgtgaggattgggaggaactcgacctactccgctaacccagtggcctgagccaatcacaaagaggattggagcctcactcgagcgctccttcccttctcctctctctgtgacagcctcttggaaagagggacactggaggggtgtgtttgcaatttaaatcactggatttttgcccaccctctttccaaataagaaggcaggagctgcttgctgaggtgtaaagggtcttctgagctgcagtggcaattagaccagaagatccccgctcctgtctctaaagaggggaaagggcaaggatggtggaggctttctgtgctacctggaagctgaccaacagtcagaactttgatgagtacatgaaggctctaggcgtgggctttgccactaggcaggtgggaaatgtgaccaaaccaacggtaattatcagtcaagaaggagacaaagtggtcatcaggactctcagcacattcaagaacacggagattagtttccagctgggagaagagtttgatgaaaccactgcagatgatagaaactgtaagtctgttgttagcctggatggagacaaacttgttcacatacagaaatgggatggcaaagaaacaaattttgtaagagaaattaaggatggcaaaatggttatgacccttacttttggtgatgtggttgctgttcgccactatgagaaggcataaaaatgttcctggtcggggcttggaagagctcttcagtttttctgtttcctcaagtctcagtgctatcctattacaacatggctgatcattaattagaaggttatccttggtgtggaggtggaaaatggtgatttaaaaacttgttactccaagcaacttgcccaattttaatctgaaaatttatcatgttttataatttgaattaaagttttgtcccccccccccttttttttataaacaagtgaatacattttataatttcttttggaatgtaaatcaaatttgaataaaaatcttacacgtgaaa

SEQ ID NO: 117828 - DNA, 399 bp, Artificial Sequence
  derived and/or modified sequence
atggtggaagcattttgcgccacctggaaactgaccaacagccagaacttcgacgagtatatgaaggcactaggagtcggctttgccactcgccaggtgggcaatgtgactaagccgaccgtgataatcagtcaggagggtgacaaagtggtcattagaacactgtccacctttaagaatactgagatttcctttcagctgggcgaagagttcgacgagacaactgcagacgaccgaaattgcaaaagtgtcgtgagcctggatggggacaaactggtgcatatccagaagtgggatggcaaggaaactaacttcgtccgagagatcaaggatggcaagatggtcatgacattaacttttggagatgtggtggcagtccgtcactatgaaaaggcctag

SEQ ID NO: 117829 - DNA, 399 bp, Artificial Sequence
  derived and/or modified sequence
atggtggaggccttctgtgccacctggaagctgaccaacagccagaactttgatgagtacatgaaggccctgggcgtgggctttgccacccggcaggtgggcaatgtgaccaagcccaccgtcatcatcagccaggagggggacaaggtggtgatccgcaccctgagcaccttcaagaacacagagatctccttccagctgggggaggagtttgatgagaccacagcagatgacaggaactgcaagtctgtggtgtccctggatggagacaagctggtgcacatccagaagtgggatggcaaggagaccaactttgtgcgggagatcaaggatggcaagatggtgatgaccctgacctttggagatgtggtggccgtgcgccactatgagaaggcctag

SEQ ID NO: 117830 - DNA, 399 bp, Artificial Sequence
  derived and/or modified sequence
atggtggaggccttctgcgccacctggaagctgaccaacagccagaacttcgacgagtatatgaaggctttgggagtcggcttcgcgacccgacaggtgggcaacgtcaccaagcccacagtcataatttcacaggaaggtgataaggttgtcatccgtactttgtccaccttcaaaaacactgaaataagcttccagctcggggaagagttcgacgagacgacggccgatgataggaattgcaaaagtgttgtgagcctagacggagataagctggtacatatccagaagtgggacggcaaggaaacgaacttcgtcagagagatcaaggatggcaaaatggtcatgacattaacctttggagatgtggtggcagtacggcactacgagaaagcgtag

SEQ ID NO: 117831 - DNA, 399 bp, Artificial Sequence
  derived and/or modified sequence
atggtggaagctttttgcgctacgtggaagctgaccaactcacagaacttcgacgaatacatgaaagccctgggggttggcttcgcaacacgacaggtaggcaacgtcactaaaccaacagtcatcatatcccaggagggggacaaggtcgtaatccgtacactgtcgacctttaaaaacacagagattagtttccagctgggagaagagttcgacgaaactacggctgacgacagaaattgtaaaagtgtggtaagtctggatggggataagcttgtgcatattcagaagtgggacggaaaagaaacaaactttgtgcgggagattaaggacggcaaaatggtgatgacactgacgtttggtgatgtagtggccgtgagacactacgaaaaggcctag

SEQ ID NO: 117832 - DNA, 399 bp, Artificial Sequence
  derived and/or modified sequence
atggtggaggccttctgcgccacctggaagctgaccaacagccagaacttcgacgagtacatgaaggccctgggcgtgggcttcgccaccagacaggtgggcaacgtgaccaagcccaccgtgatcatcagccaggagggcgacaaggtggtgatcagaaccctgagcaccttcaagaacaccgagatcagcttccagctgggcgaggagttcgacgagaccaccgccgacgacagaaactgcaagagcgtggtgagcctggacggcgacaagctggtgcacatccagaagtgggacggcaaggagaccaacttcgtgagagagatcaaggacggcaagatggtgatgaccctgaccttcggcgacgtggtggccgtgagacactacgagaaggcctag

SEQ ID NO: 117833 - protein, 556 aa, Artificial Sequence
  derived and/or modified sequence
MARFGLPALLCTLAVLSAALLAAELKSKSCSEVRRLYVSKGFNKNDAPLHEINGDHLKICPQGSTCCSQEMEEKYSLQSKDDFKSVVSEQCNHLQAVFASRYKKFDEFFKELLENAEKSLNDMFVKTYGHLYMQNSELFKDLFVELKRYYVVGNVNLEEMLNDFWARLLERMFRLVNSQYHFTDEYLECVSKYTEQLKPFGDVPRKLKLQVTRAFVAARTFAQGLAVAGDVVSKVSVVNPTAQCTHALLKMIYCSHCRGLVTVKPCYNYCSNIMRGCLANQGDLDFEWNNFIDAMLMVAERLEGPFNIESVMDPIDVKISDAIMNMQDNSVQVSQKVFQGCGPPKPLPAGRISRSISESAFSARFRPHHPEERPTTAAGTSLDRLVTDVKEKLKQAKKFWSSLPSNVCNDERMAAGNGNEDDCWNGKGKSRYLFAVTGNGLANQGNNPEVQVDTSKPDILILRQIMALRVMTSKMKNAYNGNDVDFFDISDESSGEGSGSGCEYQQCPSEFDYNATDHAGKSANEKADSAGVRPGAQAYLLTVFCILFLVMQREWR

SEQ ID NO: 117834 - protein, 486 aa, Artificial Sequence
  derived and/or modified sequence
MEEKYSLQSKDDFKSVVSEQCNHLQAVFASRYKKFDEFFKELLENAEKSLNDMFVKTYGHLYMQNSELFKDLFVELKRYYVVGNVNLEEMLNDFWARLLERMFRLVNSQYHFTDEYLECVSKYTEQLKPFGDVPRKLKLQVTRAFVAARTFAQGLAVAGDVVSKVSVVNPTAQCTHALLKMIYCSHCRGLVTVKPCYNYCSNIMRGCLANQGDLDFEWNNFIDAMLMVAERLEGPFNIESVMDPIDVKISDAIMNMQDNSVQVSQKVFQGCGPPKPLPAGRISRSISESAFSARFRPHHPEERPTTAAGTSLDRLVTDVKEKLKQAKKFWSSLPSNVCNDERMAAGNGNEDDCWNGKGKSRYLFAVTGNGLANQGNNPEVQVDTSKPDILILRQIMALRVMTSKMKNAYNGNDVDFFDISDESSGEGSGSGCEYQQCPSEFDYNATDHAGKSANEKADSAGVRPGAQAYLLTVFCILFLVMQREWR

SEQ ID NO: 117835 - protein, 550 aa, Artificial Sequence
  derived and/or modified sequence
MARFGLPALLCTLAVLSAALLAAELKSKSCSEVRRLYVSKGFNKNDAPLHEINGDHEDLSPGFYLLLSRDGGYSLQSKDDFKSVVSEQCNHLQAVFASRYKKFDEFFKELLENAEKSLNDMFVKTYGHLYMQNSELFKDLFVELKRYYVVGNVNLEEMLNDFWARLLERMFRLVNSQYHFTDEYLECVSKYTEQLKPFGDVPRKLKLQVTRAFVAARTFAQGLAVAGDVVSKVSVPSCTHALLKMIYCSHCRGLVTVKPCYNYCSNIMRGCLANQGDLDFEWNNFIDAMLMVAERLEGPFNIESVMDPIDVKISDAIMNMQDNSVQVSQKVFQGCGPPKPLPAGRISRSISESAFSARFRPHHPEERPTTAAGTSLDRLVTDVKEKLKQAKKFWSSLPSNVCNDERMAAGNGNEDDCWNGKGKSRYLFAVTGNGLANQGNNPEVQVDTSKPDILILRQIMALRVMTSKMKNAYNGNDVDFFDISDESSGEGSGSGCEYQQCPSEFDYNATDHAGKSANEKADSAGVRPGAQAYLLTVFCILFLVMQREWR

SEQ ID NO: 117836 - DNA, 1671 bp, Artificial Sequence
  derived and/or modified sequence
atggcacgcttcgggttacccgctttgctgtgtactctggctgtgttaagtgccgctctccttgccgccgagctcaaaagcaagtcttgtagtgaagttagaaggctttatgttagcaaaggcttcaacaaaaatgatgctcccctacatgagattaacggggatcatctgaagatttgtccccaagggtcaacatgctgcagtcaggagatggaggagaagtacagtctgcagtcaaaagatgacttcaagtcagtggtttctgagcaatgtaatcacctgcaggcagtctttgccagccgatacaagaaatttgacgagtttttcaaagagctgttagagaatgccgagaagtccctcaacgacatgttcgtcaaaacgtatggccacctgtatatgcaaaatagtgagctgttcaaggatctttttgtggagttaaagcgatactacgttgtcggtaacgtgaatcttgaagagatgctgaacgatttctgggctcgactcctcgagaggatgttccggctggtaaatagccagtatcatttcactgatgaatacctggagtgcgtctcaaagtacactgaacagcttaagcctttcggggacgtgcctcggaaactaaaactgcaggttaccagagccttcgtcgctgctcgtaccttcgcccagggactcgcagtggccggagacgtagtgtctaaggtgagcgttgtgaaccctaccgctcaatgcacacatgccctgttgaagatgatctactgctcacactgcagaggcctggtgaccgtgaagccatgctacaactattgctccaatattatgcgcggctgcctcgcaaaccagggcgatctcgacttcgagtggaataacttcatcgacgctatgctgatggttgccgagcgcctggaaggcccctttaacatagaatcagtcatggacccgatagatgtgaagatcagcgacgccatcatgaacatgcaggacaattcagtgcaggtcagccaaaaagtgtttcaagggtgcggcccacccaaacccctgcctgccggccggatttcccggagcataagtgagtcagccttttctgctcgcttccgaccccatcaccctgaagagagacccactactgctgctgggacaagcctcgataggttggtgacggatgtgaaggagaaacttaaacaagcaaaaaagttttggtcgtctctgcccagcaatgtgtgcaacgacgagagaatggccgcaggaaatggcaatgaagatgattgctggaacgggaaaggcaagagccggtacctgtttgcagtaaccgggaatggcctggctaaccagggaaacaatcctgaggtacaggttgataccagcaagcccgacatcctgatcttaagacagataatggcattaagagtaatgacatctaaaatgaaaaatgcttacaatggcaatgatgtggattttttcgatatttctgatgagtcctctggagaagggagcggttctggttgtgaatatcaacaatgcccaagcgagttcgactacaatgcgactgatcatgcgggaaagtcagccaacgaaaaagctgattctgccggcgtgaggccaggggcccaggcttacttactgaccgtgttctgtatcctgttcttagtaatgcagcgagaatggagatag

SEQ ID NO: 117837 - DNA, 1461 bp, Artificial Sequence
  derived and/or modified sequence
atggaggagaagtactccctgcagtctaaagacgacttcaagtctgtggtgtccgaacagtgtaatcacttgcaagctgtgttcgctagtaggtacaaaaaatttgatgaattcttcaaggagttgctcgaaaacgctgagaaaagcttgaatgacatgtttgtgaaaacctacggccacctctacatgcagaattctgagcttttcaaagatttgtttgtcgagctgaaacgctactacgtggtgggcaatgtgaacctggaagagatgctgaacgacttctgggctcgcttgctggagcggatgttccgcctggtgaacagccagtaccactttaccgacgaatatctagagtgcgtcagcaagtataccgagcaactgaaaccctttggcgacgtcccccgtaagctgaaacttcaggtgacaagagctttcgttgctgctagaacattcgcccaggggctagctgtcgcaggagatgtggtaagcaaagtttccgttgtaaacccgacggcgcagtgtacacacgctctgctgaagatgatctattgttctcactgtcgagggctggtgaccgtgaaaccttgctacaattactgttcgaacatcatgagggggtgcctcgcgaaccagggagatctcgacttcgaatggaataactttattgacgccatgctgatggtggctgagcgtctggaaggtccttttaatatcgagagcgtgatggacccgatcgatgtgaaaatcagcgatgccattatgaatatgcaggacaacagcgtacaggtctcccagaaggtgtttcagggctgtggccccccgaagcctttgccagccggacggattagcaggtcaatttctgagtccgcgttttccgcacgcttccggccacaccacccagaagagagacctacaaccgcagctgggacaagcctcgaccggctggtgaccgatgtgaaggagaaattgaaacaagcaaaaaaattttggtcttctcttccctcaaacgtttgcaacgatgaacggatggccgcaggcaacgggaacgaggacgattgttggaacgggaaggggaaatctcggtatctgtttgccgtgaccggcaacggtctggctaaccagggaaacaaccccgaagtccaggtggacacctcaaaacctgacatactgattctccggcaaattatggccctgagggttatgacctcaaaaatgaagaacgcttacaacgggaacgatgtggacttctttgatatctctgatgaatccagcggagagggctctggttcgggctgtgaataccagcagtgcccatccgagtttgattataacgctacagaccatgctggcaagtccgctaacgaaaaggctgattctgctggcgtaaggcccggagctcaagcttatttactgaccgtgttttgcattctgtttctggtcatgcagagagagtggagatag

SEQ ID NO: 117838 - DNA, 1653 bp, Artificial Sequence
  derived and/or modified sequence
atggcgagattcggcctgccagcgttgctgtgcacactggccgttctctccgccgctctgttggctgccgagctgaaaagtaaaagctgctccgaggttaggcgactctacgtcagtaagggatttaacaagaacgacgctcccctacacgagattaatggcgaccacgaggatctgtccccaggcttttacctgctgttaagccgcgacgggggatactcactgcagtcgaaggatgattttaagtcagtcgtgtcagaacagtgcaaccacctccaagcggtttttgcctcgaggtacaaaaagtttgacgagttttttaaagaactgttggagaatgccgaaaaatccctgaatgatatgttcgttaagacctatggccacttgtacatgcaaaatagcgaattattcaaagacctgttcgtggaactaaagcgctattatgtcgtggggaatgtaaatctggaagaaatgctaaacgacttctgggccagactgctggagcggatgttcaggttggtcaattctcagtaccactttacggacgagtacttagaatgtgtgtctaagtacacagaacagcttaaaccattcggggacgtgccgcggaagctaaaactgcaggtcacacgagcttttgtcgccgcaagaaccttcgcacagggcctcgccgtggccggcgatgtggtgtccaaagtgtcagttccaagttgtactcacgcactgctcaagatgatatactgctcccattgtaggggtctcgtgaccgtcaaaccctgttataactattgctccaatattatgcgcggctgtttggcaaaccagggagatctggactttgagtggaataactttatagacgcaatgctgatggtcgccgaacgtctcgaggggcctttcaatatagagagcgtgatggaccctatcgacgtcaaaataagtgatgcaatcatgaacatgcaagacaacagcgtacaagtctctcagaaggtgtttcaaggatgtgggccacctaagccgctcccagctggacggattagccggagcatttcagaaagtgccttctcagccagatttagaccgcaccaccctgaagagcggcctacaaccgccgctggcacctctttagacaggttagtcactgacgtcaaggagaaactgaaacaggccaagaaattctggtcaagcctgccgtcaaatgtttgtaacgatgaacgtatggcagcggggaacggcaacgaagatgattgctggaacgggaagggaaagtcgcgatatttgtttgcggttaccggcaatgggctagctaatcaggggaataacccggaagtccaagtggatactagcaagcctgatattcttattttacgacagattatggcgttgagggtgatgacatcaaagatgaagaacgcatacaacggcaacgatgtggacttcttcgatatctccgacgaatcaagcggggaagggagtgggtcaggctgtgagtatcagcagtgtcctagtgaattcgattacaatgctacagatcatgccggaaagtctgcaaatgagaaagctgatagcgccggagtaagaccaggggcccaggcttatttattaacggttttctgtattttattcctagtgatgcagcgggagtggcgatag

SEQ ID NO: 117839 - DNA, 4960 bp, Artificial Sequence
  derived and/or modified sequence
cagtcaatcagcggcagagctgagaagggcacagccgcgcggcggagggcagagtcagccgagccgagtccagccggacgagcggaccagcgcagggcagcccaagcagcgcgcagcgaacgcccgccgccgcccacaccctctgcggtccccgcggcgcctgccacccttccctccttccccgcgtccccgcctcgccggccagtcagcttgccgggttcgctgccccgcgaaaccccgaggtcaccagcccgcgcctctgcttccctgggccgcgcgccgcctccacgccctccttctcccctggcccggcgcctggcaccggggaccgttgcctgacgcgaggcccagctctacttttcgccccgcgtctcctccgcctgctcgcctcttccaccaactccaactccttctccctccagctccactcgctagtccccgactccgccagccctcggcccgctgccgtagcgccgcttcccgtccggtcccaaaggtgggaacgcgtccgccccggcccgcaccatggcacggttcggcttgcccgcgcttctctgcaccctggcagtgctcagcgccgcgctgctggctgccgagctcaagtcgaaaagttgctcggaagtgcgacgtctttacgtgtccaaaggcttcaacaagaacgatgcccccctccacgagatcaacggtgatcatttgaagatctgtccccagggttctacctgctgctctcaagagatggaggagaagtacagcctgcaaagtaaagatgatttcaaaagtgtggtcagcgaacagtgcaatcatttgcaagctgtctttgcttcacgttacaagaagtttgatgaattcttcaaagaactacttgaaaatgcagagaaatccctgaatgatatgtttgtgaagacatatggccatttatacatgcaaaattctgagctatttaaagatctcttcgtagagttgaaacgttactacgtggtgggaaatgtgaacctggaagaaatgctaaatgacttctgggctcgcctcctggagcggatgttccgcctggtgaactcccagtaccactttacagatgagtatctggaatgtgtgagcaagtatacggagcagctgaagcccttcggagatgtccctcgcaaattgaagctccaggttactcgtgcttttgtagcagcccgtactttcgctcaaggcttagcggttgcgggagatgtcgtgagcaaggtctccgtggtaaaccccacagcccagtgtacccatgccctgttgaagatgatctactgctcccactgccggggtctcgtgactgtgaagccatgttacaactactgctcaaacatcatgagaggctgtttggccaaccaaggggatctcgattttgaatggaacaatttcatagatgctatgctgatggtggcagagaggctagagggtcctttcaacattgaatcggtcatggatcccatcgatgtgaagatttctgatgctattatgaacatgcaggataatagtgttcaagtgtctcagaaggttttccagggatgtggaccccccaagcccctcccagctggacgaatttctcgttccatctctgaaagtgccttcagtgctcgcttcagaccacatcaccccgaggaacgcccaaccacagcagctggcactagtttggaccgactggttactgatgtcaaggagaaactgaaacaggccaagaaattctggtcctcccttccgagcaacgtttgcaacgatgagaggatggctgcaggaaacggcaatgaggatgactgttggaatgggaaaggcaaaagcaggtacctgtttgcagtgacaggaaatggattagccaaccagggcaacaacccagaggtccaggttgacaccagcaaaccagacatactgatccttcgtcaaatcatggctcttcgagtgatgaccagcaagatgaagaatgcatacaatgggaacgacgtggacttctttgatatcagtgatgaaagtagtggagaaggaagtggaagtggctgtgagtatcagcagtgcccttcagagtttgactacaatgccactgaccatgctgggaagagtgccaatgagaaagccgacagtgctggtgtccgtcctggggcacaggcctacctcctcactgtcttctgcatcttgttcctggttatgcagagagagtggagataattctcaaactctgagaaaaagtgttcatcaaaaagttaaaaggcaccagttatcacttttctaccatcctagtgactttgctttttaaatgaatggacaacaatgtacagtttttactatgtggccactggtttaagaagtgctgactttgttttctcattcagttttgggaggaaaagggactgtgcattgagttggttcctgctcccccaaaccatgttaaacgtggctaacagtgtaggtacagaactatagttagttgtgcatttgtgattttatcactctattatttgtttgtatgtttttttctcatttcgtttgtgggtttttttttccaactgtgatctcgccttgtttcttacaagcaaaccagggtcccttcttggcacgtaacatgtacgtatttctgaaatattaaatagctgtacagaagcaggttttatttatcatgttatcttattaaaagaaaaagcccaaaaagcagtaaaatttccatttctccctgttattttagttgccttatctggagagacgtggaggtgattttcttttttttaaattattattaagacagaatgtgagggcacaagcaggcttctgagccacttgtcagattgtattcaaagcatcaatccaagaaggaggttatgtgtacttcatttattggtgatagttggaagagactgcagactactgctttgaatgagttgaattacataagctaagatcactataggtccatttcttgaacccacttatacataaaatgtaacccatttagaaaaagattctggatatcatcccccttgaaagatagaaagcattcaggatgtcccagttatcacatgttcacacttgggtttaggggtgtttttttttaaaaccaggcaggttagctagcccaccctgtgctagttttcatgttcacactgaccctatttgaattaatatcctttgttagagtggtcgagatttcaaacccaattatgtacagggagctgtctgagagctagccagaactggggtacagcctgggctcagggaatagctgtcaacactcgggcaaagtttttgtctgtgcatgtgtatctccatttgttttgggatcccagtttttgttttaagagagtataaggtgtctcatttgagtctttttcttacctagccccctcttatcagtaaaacaaaggacttgccatggttcacagcaatgtgctacgatccaagatatcagccaaggagcccacttaggggagaactaggtgtccagatttttgtatgtgttgtttttcttgggggatggggtggggtgggagtaggtagagctgagaatactacatcttagtggtgacctttagccacgtgggtgaagtggcaaaggccatggccatatctgttgtcccaggccaaagactaacaactgccttgggaatcccttccttgtgtccttaccaaatgatagctcataaaactctgataatgtaacaaatcactttcaaaggagttcccagaagtcttcagaaagactaaaattctgtctcttcctgctttagacagccattaagatcccaactaattttaccgaacctaaaacccacaaagaggttgtttgtgttattgttcaatcttcagttgtaagagtaattctctatttttatattgaaacataattacttgatagctcagggtctacatttcattcaactttttacaccaaattctgcagagtggtcaaaatggaatattgggggctgttgtaaacagaggcttaattttattagaagtagccagttatttattaaagcatgatgttaataaaataggcatattctggctggtgtgtataagtggttttttttttaaaacaaatcagaagacataaaattgaaaaggcactccatttatatataagggaaaatagattgtaaatagctaaggggccttgtgagaacttggaaaatgtgctgatacttagtaactacctcagttgtgaggaatttcctttttagcttagactgctattacttttacttggtagaaatgaatctggtctccaaaatatggctcagagagttatccccatagaccttgttagattgtttttaatttaaaaccttgaactctgcccagctgttttcttccagtcaaattctctaaaccaataacattttccaaattaagtattcttgaaggttcttctgaactcttactgatttgttttctttctttgcattttttcctgttactcttttattatttaaattgtctcttgcttttgaacttcaactatgaaataaacaaatcatagatttttccattcaggtctgactggataactcttggcttctaagcagctggcaagctcacccccactccccaaaaaagaagaaaggcaagttgaatattttaaaaccttaagagtttggagtatgaagtagaataaaagccttgttaggagaagacctgacttttccaaagttaacagcatgtgaagggcttgtgttttacaaagtcatttataaattatttttctttaaaacacatcacctactctgtaccttaaagattttacaactcttagatttatattttatttcaaaaatcgtaactagcacctgttattttgattaaaagacactgcgaagaattgacgtaaatttctaaagtttagttactgagtgttcaaaacctaacagttcacatgaagtaaaaattgtcatttgtgattacagaatcaaaataaaaataggtatgaatggtgcta

SEQ ID NO: 117840 - DNA, 1835 bp, Artificial Sequence
  derived and/or modified sequence
agtgcgactgtcgcgctccgctccccgcctccgctcctcctctcccccctgcattattcgccgtcccgggaagcccctgaggactgtggccctcaaagtgatcatttgaagatctgtccccagggttctacctgctgctctcaagagatggaggagaagtacagcctgcaaagtaaagatgatttcaaaagtgtggtcagcgaacagtgcaatcatttgcaagctgtctttgcttcacgttacaagaagtttgatgaattcttcaaagaactacttgaaaatgcagagaaatccctgaatgatatgtttgtgaagacatatggccatttatacatgcaaaattctgagctatttaaagatctcttcgtagagttgaaacgttactacgtggtgggaaatgtgaacctggaagaaatgctaaatgacttctgggctcgcctcctggagcggatgttccgcctggtgaactcccagtaccactttacagatgagtatctggaatgtgtgagcaagtatacggagcagctgaagcccttcggagatgtccctcgcaaattgaagctccaggttactcgtgcttttgtagcagcccgtactttcgctcaaggcttagcggttgcgggagatgtcgtgagcaaggtctccgtggtaaaccccacagcccagtgtacccatgccctgttgaagatgatctactgctcccactgccggggtctcgtgactgtgaagccatgttacaactactgctcaaacatcatgagaggctgtttggccaaccaaggggatctcgattttgaatggaacaatttcatagatgctatgctgatggtggcagagaggctagagggtcctttcaacattgaatcggtcatggatcccatcgatgtgaagatttctgatgctattatgaacatgcaggataatagtgttcaagtgtctcagaaggttttccagggatgtggaccccccaagcccctcccagctggacgaatttctcgttccatctctgaaagtgccttcagtgctcgcttcagaccacatcaccccgaggaacgcccaaccacagcagctggcactagtttggaccgactggttactgatgtcaaggagaaactgaaacaggccaagaaattctggtcctcccttccgagcaacgtttgcaacgatgagaggatggctgcaggaaacggcaatgaggatgactgttggaatgggaaaggcaaaagcaggtacctgtttgcagtgacaggaaatggattagccaaccagggcaacaacccagaggtccaggttgacaccagcaaaccagacatactgatccttcgtcaaatcatggctcttcgagtgatgaccagcaagatgaagaatgcatacaatgggaacgacgtggacttctttgatatcagtgatgaaagtagtggagaaggaagtggaagtggctgtgagtatcagcagtgcccttcagagtttgactacaatgccactgaccatgctgggaagagtgccaatgagaaagccgacagtgctggtgtccgtcctggggcacaggcctacctcctcactgtcttctgcatcttgttcctggttatgcagagagagtggagataattctcaaactctgagaaaaagtgttcatcaaaaagttaaaaggcaccagttatcacttttctaccatcctagtgactttgctttttaaatgaatggacaacaatgtacagtttttactatgtggccactggtttaagaagtgctgactttgttttctcattcagttttgggaggaaaagggactgtgcattgagttggttcctgctcccccaaaccatgttaaacgt

SEQ ID NO: 117841 - DNA, 3696 bp, Artificial Sequence
  derived and/or modified sequence
gcctggcaccggggaccgttgcctgacgcgaggcccagctctacttttcgccccgcgtctcctccgcctgctcgcctcttccaccaactccaactccttctccctccagctccactcgctagtccccgactccgccagccctcggcccgctgccgtagcgccgcttcccgtccggtcccaaaggtgggaacgcgtccgccccggcccgcaccatggcacggttcggcttgcccgcgcttctctgcaccctggcagtgctcagcgccgcgctgctggctgccgagctcaagtcgaaaagttgctcggaagtgcgacgtctttacgtgtccaaaggcttcaacaagaacgatgcccccctccacgagatcaacggtgatcatgaagatctgtccccagggttctacctgctgctctcaagagatggaggatacagcctgcaaagtaaagatgatttcaaaagtgtggtcagcgaacagtgcaatcatttgcaagctgtctttgcttcacgttacaagaagtttgatgaattcttcaaagaactacttgaaaatgcagagaaatccctgaatgatatgtttgtgaagacatatggccatttatacatgcaaaattctgagctatttaaagatctcttcgtagagttgaaacgttactacgtggtgggaaatgtgaacctggaagaaatgctaaatgacttctgggctcgcctcctggagcggatgttccgcctggtgaactcccagtaccactttacagatgagtatctggaatgtgtgagcaagtatacggagcagctgaagcccttcggagatgtccctcgcaaattgaagctccaggttactcgtgcttttgtagcagcccgtactttcgctcaaggcttagcggttgcgggagatgtcgtgagcaaggtctccgtgccttcatgtacccatgccctgttgaagatgatctactgctcccactgccggggtctcgtgactgtgaagccatgttacaactactgctcaaacatcatgagaggctgtttggccaaccaaggggatctcgattttgaatggaacaatttcatagatgctatgctgatggtggcagagaggctagagggtcctttcaacattgaatcggtcatggatcccatcgatgtgaagatttctgatgctattatgaacatgcaggataatagtgttcaagtgtctcagaaggttttccagggatgtggaccccccaagcccctcccagctggacgaatttctcgttccatctctgaaagtgccttcagtgctcgcttcagaccacatcaccccgaggaacgcccaaccacagcagctggcactagtttggaccgactggttactgatgtcaaggagaaactgaaacaggccaagaaattctggtcctcccttccgagcaacgtttgcaacgatgagaggatggctgcaggaaacggcaatgaggatgactgttggaatgggaaaggcaaaagcaggtacctgtttgcagtgacaggaaatggattagccaaccagggcaacaacccagaggtccaggttgacaccagcaaaccagacatactgatccttcgtcaaatcatggctcttcgagtgatgaccagcaagatgaagaatgcatacaatgggaacgacgtggacttctttgatatcagtgatgaaagtagtggagaaggaagtggaagtggctgtgagtatcagcagtgcccttcagagtttgactacaatgccactgaccatgctgggaagagtgccaatgagaaagccgacagtgctggtgtccgtcctggggcacaggcctacctcctcactgtcttctgcatcttgttcctggttatgcagagagagtggagataattctcaaactctgagaaaaagtgttcatcaaaaagttaaaaggcaccagttatcacttttctaccatcctagtgactttgctttttaaatgaatggacaacaatgtacagtttttactatgtggccactggtttaagaagtgctgactttgttttctcattcagttttgggaggaaaagggactgtgcattgagttggttcctgctcccccaaaccatgttaaacgtggctaacagtgtaggtacagaactatagttagttgtgcatttgtgattttatcactctattatttgtttgtatgtttttttctcatttcgtttgtgggtttttttttccaactgtgatctcgccttgtttcttacaagcaaaccagggtcccttcttggcacgtaacatgtacgtatttctgaaatattaaatagctgtacagaagcaggttttatttatcatgttatcttattaaaagaaaaagcccaaaaagcagtaaaatttccatttctccctgttattttagttgccttatctggagagacgtggaggtgattttcttttttttaaattattattaagacagaatgtgagggcacaagcaggcttctgagccacttgtcagattgtattcaaagcatcaatccaagaaggaggttatgtgtacttcatttattggtgatagttggaagagactgcagactactgctttgaatgagttgaattacataagctaagatcactataggtccatttcttgaacccacttatacataaaatgtaacccatttagaaaaagattctggatatcatcccccttgaaagatagaaagcattcaggatgtcccagttatcacatgttcacacttgggtttaggggtgtttttttttaaaaccaggcaggttagctagcccaccctgtgctagttttcatgttcacactgaccctatttgaattaatatcctttgttagagtggtcgagatttcaaacccaattatgtacagggagctgtctgagagctagccagaactggggtacagcctgggctcagggaatagctgtcaacactcgggcaaagtttttgtctgtgcatgtgtatctccatttgttttgggatcccagtttttgttttaagagagtataaggtgtctcatttgagtctttttcttacctagccccctcttatcagtaaaacaaaggacttgccatggttcacagcaatgtgctacgatccaagatatcagccaaggagcccacttaggggagaactaggtgtccagatttttgtatgtgttgtttttcttgggggatggggtggggtgggagtaggtagagctgagaatactacatcttagtggtgacctttagccacgtgggtgaagtggcaaaggccatggccatatctgttgtcccaggccaaagactaacaactgccttgggaatcccttccttgtgtccttaccaaatgatagctcataaaactctgataatgtaacaaatcactttcaaaggagttcccagaagtcttcagaaagactaaaattctgtctcttcctgctttagacagccattaagatcccaactaattttaccgaacctaaaacccacaaagaggttgtttgtgttattgttcaatcttcagttgtaagagtaattctctatttttatattgaaacataattacttgatagctcagggtctacatttcattcaactttttacaccaaattctgcagagtggtcaaaatggaatattgggggctgttgtaaacagaggcttaattttattagaagtagccagttatttattaaagcatgatgttaataaaataggcatattc

SEQ ID NO: 117842 - DNA, 1671 bp, Artificial Sequence
  derived and/or modified sequence
atggcccgcttcggcctgcctgccctgctgtgcaccctggccgtgctgtctgctgccctgctggccgctgagctgaagagcaagagctgcagcgaggtgcggcggctgtatgtgtccaagggcttcaacaagaatgatgcccccctgcacgagatcaatggagaccacctgaagatctgcccccagggcagcacctgctgcagccaggagatggaggagaagtacagcctgcagagcaaggatgacttcaagtctgtggtgtctgagcagtgcaaccacctgcaggccgtgtttgccagccgctacaagaagtttgatgagttcttcaaggagctgctggagaatgctgagaagagcctgaatgacatgtttgtgaagacctacggccacctgtacatgcagaacagcgagctgttcaaggacctgtttgtggagctgaagcgctactacgtggtgggcaatgtgaacctggaggagatgctgaatgacttctgggcccggctgctggagaggatgttccggctggtgaacagccagtaccacttcacagatgagtacctggagtgtgtgtccaagtacacagagcagctgaagccctttggagatgtgcccaggaagctgaagctgcaggtgacccgggcctttgtggccgcccggacctttgcccagggcctggccgtggccggagatgtggtgtccaaggtgtctgtggtgaaccccacagcccagtgcacccacgccctgctgaagatgatctactgcagccactgccggggcctggtgacagtgaagccctgctacaactactgcagcaacatcatgaggggctgcctggccaaccagggcgacctggactttgagtggaacaacttcattgatgccatgctgatggtggccgagcggctggagggccccttcaacatcgagagcgtgatggaccccattgatgtgaagatcagtgatgccatcatgaacatgcaggacaacagcgtgcaggtgtcccagaaggtgttccagggctgcggcccccccaagcccctgcctgctggccgcatcagccgcagcatcagcgagagcgccttcagcgcccgcttccggccccaccaccctgaggagcggcccaccacagctgctggcaccagcctggaccggctggtgacagatgtgaaggagaagctgaagcaggccaagaagttctggagcagcctgcccagcaatgtgtgcaatgatgagaggatggctgctggaaatggaaatgaagatgactgctggaatggcaagggcaagagccgctacctgtttgctgtgactggaaatggcctggccaaccagggcaacaaccctgaggtgcaggtggacaccagcaagccagacatcctgatcctgcggcagatcatggccctgcgggtgatgaccagcaagatgaagaatgcctacaatggaaatgatgtggacttctttgacatcagtgatgagagcagcggggagggcagcggcagcggctgtgagtaccagcagtgccccagcgagtttgactacaatgccacagaccatgctgggaagagcgccaatgagaaggctgacagcgctggggtgcggcctggggcccaggcctacctgctgaccgtcttctgcatcctcttcctggtgatgcagcgggagtggaggtag

SEQ ID NO: 117843 - DNA, 1461 bp, Artificial Sequence
  derived and/or modified sequence
atggaggagaagtacagcctgcagagcaaggatgacttcaagtctgtggtgtctgagcagtgcaaccacctgcaggccgtgtttgccagccgctacaagaagtttgatgagttcttcaaggagctgctggagaatgctgagaagagcctgaatgacatgtttgtgaagacctacggccacctgtacatgcagaacagcgagctgttcaaggacctgtttgtggagctgaagcgctactacgtggtgggcaatgtgaacctggaggagatgctgaatgacttctgggcccggctgctggagaggatgttccggctggtgaacagccagtaccacttcacagatgagtacctggagtgtgtgtccaagtacacagagcagctgaagccctttggagatgtgcccaggaagctgaagctgcaggtgacccgggcctttgtggccgcccggacctttgcccagggcctggccgtggccggagatgtggtgtccaaggtgtctgtggtgaaccccacagcccagtgcacccacgccctgctgaagatgatctactgcagccactgccggggcctggtgacagtgaagccctgctacaactactgcagcaacatcatgaggggctgcctggccaaccagggcgacctggactttgagtggaacaacttcattgatgccatgctgatggtggccgagcggctggagggccccttcaacatcgagagcgtgatggaccccattgatgtgaagatcagtgatgccatcatgaacatgcaggacaacagcgtgcaggtgtcccagaaggtgttccagggctgcggcccccccaagcccctgcctgctggccgcatcagccgcagcatcagcgagagcgccttcagcgcccgcttccggccccaccaccctgaggagcggcccaccacagctgctggcaccagcctggaccggctggtgacagatgtgaaggagaagctgaagcaggccaagaagttctggagcagcctgcccagcaatgtgtgcaatgatgagaggatggctgctggaaatggaaatgaagatgactgctggaatggcaagggcaagagccgctacctgtttgctgtgactggaaatggcctggccaaccagggcaacaaccctgaggtgcaggtggacaccagcaagccagacatcctgatcctgcggcagatcatggccctgcgggtgatgaccagcaagatgaagaatgcctacaatggaaatgatgtggacttctttgacatcagtgatgagagcagcggggagggcagcggcagcggctgtgagtaccagcagtgccccagcgagtttgactacaatgccacagaccatgctgggaagagcgccaatgagaaggctgacagcgctggggtgcggcctggggcccaggcctacctgctgaccgtcttctgcatcctcttcctggtgatgcagcgggagtggaggtag

SEQ ID NO: 117844 - DNA, 1653 bp, Artificial Sequence
  derived and/or modified sequence
atggcccgcttcggcctgcctgccctgctgtgcaccctggccgtgctgtctgctgccctgctggccgctgagctgaagagcaagagctgcagcgaggtgcggcggctgtatgtgtccaagggcttcaacaagaatgatgcccccctgcacgagatcaatggagaccacgaggacctgagccctggcttctacctgctgctgagcagagatggcggctacagcctgcagagcaaggatgacttcaagtctgtggtgtctgagcagtgcaaccacctgcaggccgtgtttgccagccgctacaagaagtttgatgagttcttcaaggagctgctggagaatgctgagaagagcctgaatgacatgtttgtgaagacctacggccacctgtacatgcagaacagcgagctgttcaaggacctgtttgtggagctgaagcgctactacgtggtgggcaatgtgaacctggaggagatgctgaatgacttctgggcccggctgctggagaggatgttccggctggtgaacagccagtaccacttcacagatgagtacctggagtgtgtgtccaagtacacagagcagctgaagccctttggagatgtgcccaggaagctgaagctgcaggtgacccgggcctttgtggccgcccggacctttgcccagggcctggccgtggccggagatgtggtgtccaaggtgtctgtgcccagctgcacccacgccctgctgaagatgatctactgcagccactgccggggcctggtgacagtgaagccctgctacaactactgcagcaacatcatgaggggctgcctggccaaccagggcgacctggactttgagtggaacaacttcattgatgccatgctgatggtggccgagcggctggagggccccttcaacatcgagagcgtgatggaccccattgatgtgaagatcagtgatgccatcatgaacatgcaggacaacagcgtgcaggtgtcccagaaggtgttccagggctgcggcccccccaagcccctgcctgctggccgcatcagccgcagcatcagcgagagcgccttcagcgcccgcttccggccccaccaccctgaggagcggcccaccacagctgctggcaccagcctggaccggctggtgacagatgtgaaggagaagctgaagcaggccaagaagttctggagcagcctgcccagcaatgtgtgcaatgatgagaggatggctgctggaaatggaaatgaagatgactgctggaatggcaagggcaagagccgctacctgtttgctgtgactggaaatggcctggccaaccagggcaacaaccctgaggtgcaggtggacaccagcaagccagacatcctgatcctgcggcagatcatggccctgcgggtgatgaccagcaagatgaagaatgcctacaatggaaatgatgtggacttctttgacatcagtgatgagagcagcggggagggcagcggcagcggctgtgagtaccagcagtgccccagcgagtttgactacaatgccacagaccatgctgggaagagcgccaatgagaaggctgacagcgctggggtgcggcctggggcccaggcctacctgctgaccgtcttctgcatcctcttcctggtgatgcagcgggagtggaggtag

SEQ ID NO: 117845 - DNA, 1671 bp, Artificial Sequence
  derived and/or modified sequence
atggcccggttcggcctgcccgccctgctgtgcaccctggccgtgctgtcagccgcactgcttgcagccgaactaaagtccaagagctgtagtgaggtgcgccgcctctacgtttccaaggggtttaacaagaatgacgcaccactgcatgagattaatggcgatcacctgaaaatatgccctcaggggtcaacgtgctgctctcaggaaatggaggagaaatactcccttcagagtaaggacgatttcaagtccgttgtgtccgagcagtgtaatcacctgcaggccgtgtttgcctctcgctataagaagtttgatgaattcttcaaggagctgctggaaaatgccgagaagtcccttaacgatatgtttgtgaaaacatatggccacctgtatatgcagaacagtgaattattcaaggatctctttgtcgagctaaaacggtattatgtcgtgggaaatgtcaacttagaagagatgttgaatgatttctgggcccgcctgctggaaagaatgttccggctggtgaattcacaataccacttcaccgacgagtatcttgagtgcgtttccaaatatacagaacagttgaagccttttggagacgtgcccaggaagctgaaattacaggtgactcgcgcttttgttgcggctcgcacattcgcgcagggccttgcggtcgccggtgatgtggttagtaaagtgtcggtggtgaatccaaccgcccaatgcacgcacgcccttttgaagatgatctactgtagccattgcagagggcttgtgaccgttaagccttgttacaactactgcagcaatattatgagaggttgtcttgcaaatcagggcgatctagactttgagtggaacaattttattgatgctatgctgatggttgccgaacggcttgaaggcccctttaatatcgagagcgtcatggatcctatcgacgtgaaaatcagcgacgccataatgaacatgcaggacaattcggtgcaagttagccagaaagtcttccaggggtgtgggcctccgaagcctttgccggctgggcggatcagccgcagtatcagcgagagcgcgttcagtgcccgcttccggccacaccaccccgaagaacgaccgactaccgctgccggtaccagtctggaccggttggtgaccgatgtcaaagagaagctgaagcaggcaaagaaattttggtcttcattgccctccaatgtttgcaacgatgaacgcatggccgccggcaacggtaacgaggacgattgctggaatgggaaaggtaagtcaaggtatttgtttgcagtgacagggaacggccttgccaaccaagggaataaccctgaggtgcaggtggacacttctaagccagacattctgatacttaggcaaatcatggcccttcgagtaatgacctccaagatgaaaaatgcctacaacggcaatgatgtggacttcttcgacatatccgacgaaagctcaggagaagggagcggctcaggttgcgaataccagcagtgcccctccgaattcgactataacgccacagatcacgctggtaaaagtgccaatgaaaaggcagatagtgccggagttaggcccggggcccaggcatatttactgacagtgttttgtatcttatttttggtaatgcagcgtgaatggcgatag

SEQ ID NO: 117846 - DNA, 1461 bp, Artificial Sequence
  derived and/or modified sequence
atggaggagaagtacagcctgcagagcaaggacgacttcaagagcgttgtcagtgagcagtgcaaccacctgcaagctgttttcgccagcagatataaaaaattcgacgagttctttaaagaattactggagaatgcagaaaagtcactcaatgatatgtttgtcaagacatatggacacctatatatgcaaaactctgaattatttaaggacctcttcgtggagcttaagcgctactacgtcgtcggtaacgttaatttagaagaaatgttgaatgatttctgggcacgtctgctcgaacgaatgtttaggttagtaaattctcagtatcacttcaccgacgagtacctcgagtgcgtgagcaagtacacagaacagcttaaaccctttggagatgtgcccagaaaacttaagctacaagtcactagggctttcgtcgcggctaggacgtttgcccagggactggcagtggcaggggatgtagtgagcaaagtttcagtggtgaatcctactgcgcagtgcacccatgcgctcttaaagatgatttactgctcacactgccgcggtctggtgaccgtgaagccatgctataattattgttctaatatcatgaggggctgcctagccaaccagggtgacctcgacttcgagtggaataatttcatcgatgcgatgcttatggtggctgagaggttggaaggtcctttcaatattgaatccgtgatggacccgatagatgtgaaaatcagcgatgccattatgaacatgcaggataatagcgtgcaagtatcgcagaaagtcttccaagggtgcggtccacctaaaccgttgcctgcaggaagaatctcgcgatcaatcagtgaatctgcattctcagctagatttcggccacatcaccccgaagagcggcccacaactgcagctggaacctcattggaccggctcgtgacagacgtcaaagagaaactgaagcaggctaagaagttctggtcctccttgccctccaacgtgtgtaatgatgagcgcatggcagctgggaacggaaatgaggacgactgttggaatggcaaaggcaagtctcgatatctcttcgccgttactggaaatgggcttgcaaatcaagggaataatcctgaggtgcaagtggacacatctaagcccgacattctgatccttaggcagatcatggcactacgcgtgatgacaagcaaaatgaagaatgcatacaatgggaacgacgtggacttcttcgatataagtgatgaaagctctggggaaggcagcggtagtggctgcgagtaccagcagtgcccttccgagttcgactacaatgccactgaccacgctggcaagtccgcgaacgaaaaggcagacagcgcaggcgttcgcccgggcgcccaggcttatctgctgaccgtgttttgtattctgttcctcgtcatgcaaagagagtggcgatag

SEQ ID NO: 117847 - DNA, 1653 bp, Artificial Sequence
  derived and/or modified sequence
atggcccggttcggcctgcccgccctgctgtgcaccctggccgtgctgtcagccgcgctactggccgcagagttaaagtccaagtcatgctccgaggtgaggaggttgtacgtttctaaaggtttcaataaaaacgacgccccgctccacgaaattaatggagaccacgaggaccttagtccgggtttctatctgctcttgagcagggatggaggctacagcctccagtcaaaagacgatttcaaatccgtcgtaagcgagcagtgtaaccatctccaggccgtgttcgcctctcgatacaaaaagttcgacgagttcttcaaggagctcctagagaacgccgaaaaatcactgaatgatatgttcgtgaagacatacggccatctgtacatgcagaactctgagttgttcaaagatctgttcgtggagctgaaacgatattatgtcgtgggtaatgtcaacctcgaagaaatgctgaacgacttctgggcccgccttctcgagaggatgttccgcctggtaaattcgcagtaccatttcaccgacgagtatctggagtgcgtctctaaatacaccgagcagcttaaaccattcggagacgtgcctagaaagctcaagctccaggttacccgggcattcgtcgccgcccgcacatttgcccagggattggccgtagctggagacgtcgtctccaaagtatccgtcccaagctgtacccacgccctgctcaaaatgatctactgctcgcactgtaggggccttgttactgtgaaaccttgttacaactactgttctaacattatgagaggctgtcttgcaaatcagggcgatctcgacttcgagtggaataacttcatcgatgctatgctgatggtcgcagagcgcctggagggcccattcaatattgagtccgtcatggacccaattgatgtgaagatttccgacgccattatgaatatgcaggataacagcgtacaggtctctcagaaggtgttccaaggctgtggcccccccaaacccttgcccgccggccgcatcagccgtagtatctccgagtcagcttttagcgctcgatttcggccacatcaccctgaagagcgtccgactacagcggccggcacctctctggacagactggtgactgatgtcaaagaaaagttaaaacaagccaagaaattctggtcatcattacccagcaatgtttgcaacgacgaacggatggctgccgggaatggcaacgaagacgattgttggaatggaaagggcaagagcaggtacctctttgcggtcacaggcaacggactggcaaaccaaggaaataaccccgaagtccaggtggatacctctaaacctgatatacttatcctcagacaaattatggctttgagggtaatgacgagtaaaatgaaaaacgcttacaatggcaacgacgtcgacttttttgacatttccgatgagagttccggagaaggcagcggaagcgggtgtgaataccaacaatgtccatcggaattcgactacaacgccactgaccacgcgggcaaatcagccaacgaaaaggccgattctgcaggtgtgagacccggagcacaggcctatctcttgaccgtcttctgtattctattcctcgtgatgcaaagggagtggcgttag

SEQ ID NO: 117848 - DNA, 1671 bp, Artificial Sequence
  derived and/or modified sequence
atggcacgtttcggtttaccagccctgctctgcaccctggcagtgctgtccgccgctttgctcgccgctgaactgaagagtaagagctgttctgaggtgcgacggctatacgtctccaagggctttaataagaacgacgccccactccacgagattaatggcgaccacctaaagatctgtccacagggcagcacatgctgttcacaggaaatggaagagaaatacagtttacaatcaaaagacgatttcaaatcagtggtgtccgaacagtgcaaccacctgcaggcggtcttcgccagtcggtacaagaagtttgatgaattcttcaaagaacttttggagaatgcggaaaaaagtctgaacgatatgttcgtcaaaacctatggccatctctatatgcagaacagtgaactcttcaaagacctattcgtcgaactcaagcgctactacgtcgtgggaaacgtgaacctcgaagagatgttgaacgatttttgggccaggcttctggagcgcatgtttcggcttgtgaactcccagtatcatttcacagatgagtacttagaatgtgtttcaaagtacacagaacagctgaagccattcggtgacgttcccagaaagctcaagctccaggtcactcgagcctttgtcgccgcacgcaccttcgcccagggtctggctgtggcgggtgatgtcgtctccaaggtcagcgtggtgaatcctacggcccagtgtacccacgcacttctcaaaatgatctactgcagccattgccggggtttagtcactgtgaagccttgctacaattattgtagtaatattatgcgcggatgccttgcaaaccagggagacttagatttcgaatggaacaactttatagatgccatgctgatggtcgccgaacgccttgaggggccatttaatatcgagtcggtgatggacccgatcgacgttaaaatctccgatgcaataatgaacatgcaggataattcggtccaggtttcccagaaggtgtttcaaggctgcggccctcccaaaccgctccccgcaggccgaatttcccggtcaatcagtgagtccgcgttttcagcacggttccggccacaccatccagaggaacgcccaactaccgcagctggaacatcgctggaccggttagtgaccgatgttaaagagaaattaaagcaggcaaaaaagttttggtcttccctgccctctaacgtgtgtaacgacgaaaggatggccgctggcaacggcaacgaggacgattgttggaacggcaagggcaaatctaggtacttgtttgctgtgactgggaatggcttagctaatcagggaaataacccagaggttcaggtcgacacttctaagcctgacatccttatactgcgacagatcatggcgcttagagtgatgactagcaaaatgaagaacgcctataatgggaacgatgtggacttcttcgacatctccgatgagtcatctggcgagggctcggggagtggatgtgaataccagcaatgcccatctgaattcgactacaatgccaccgaccacgccggaaagtctgccaatgagaaggcagactctgctggtgttcgccctggagcacaggcttatctcctaacagtcttttgcatcctgtttttagtcatgcaacgtgagtggagatag

SEQ ID NO: 117849 - DNA, 1461 bp, Artificial Sequence
  derived and/or modified sequence
atggaagagaaatacagtttgcagtcgaaggacgatttcaagtccgtggtgtcggaacaatgtaatcatctacaggccgtgttcgcctcgcggtataaaaagtttgacgaatttttcaaagaactgctggaaaacgctgagaagagtttgaacgatatgtttgtcaaaacatacggtcatctttatatgcagaactccgagctcttcaaagatctgtttgtggagttgaaaagatattacgtggtgggaaacgtgaatttggaggaaatgttgaacgatttttgggccaggcttctcgaaaggatgttccgccttgtgaattcccagtatcactttaccgatgagtacctggaatgcgtctctaagtacactgaacagctaaaaccgtttggtgacgtgcccagaaagctaaagctgcaggtgacccgggcttttgtcgcggcaaggaccttcgcccagggtctcgcagtggctggggatgtggtcagcaaagtttccgtggtgaacccgacggcccaatgtacgcatgcattgctcaagatgatctactgttcccattgtcgtgggctggtgactgtgaagccttgttataattactgttccaatataatgcggggatgtcttgcaaaccagggggatcttgactttgaatggaataacttcatcgatgctatgctgatggtggctgaacggctcgaagggcctttcaatatcgagtcagtgatggacccgattgacgtgaaaataagcgacgctattatgaacatgcaggacaatagtgtccaagtctctcaaaaagttttccagggctgcgggccaccaaaaccattgccagctggtcgcatttcccgatccatatccgagagtgctttcagcgccagatttcgccctcatcatcctgaggaacggccaaccacggccgctggaacatccctagaccggctggtcacggacgtgaaggagaagcttaagcaggccaaaaaattttggtcatctcttccgagcaatgtttgcaacgatgaacggatggccgctggcaacggaaacgaggatgactgctggaacggcaaaggtaaatctcgctatctctttgcagttacagggaacggtcttgcaaatcaaggtaataacccggaggtccaggtggacacctccaagccagacatccttatattgagacaaatcatggccctcagggttatgactagcaagatgaagaatgcatataatgggaacgatgtggattttttcgacattagtgatgagagtagcggcgagggttctggatccggatgcgagtaccagcagtgtccaagcgaatttgactacaacgccactgaccacgccggaaaatcagcaaatgaaaaagccgactcagctggtgtccgaccaggggcacaggcgtatctcctcaccgtcttctgcattctgttcctcgtcatgcagcgggaatggcgatag

SEQ ID NO: 117850 - DNA, 1653 bp, Artificial Sequence
  derived and/or modified sequence
atggcacgttttggactgcctgctttgttgtgcactctcgcggtgctttccgcagctctgttggctgccgaacttaagtctaagtcatgttctgaggttagacgcctttatgtgtctaagggattcaataaaaacgatgctccattgcacgagatcaatggggaccacgaagacttaagtccagggttttacctcctactgtctagagacggaggctactcccttcagtccaaagacgatttcaaaagtgtagttagtgagcagtgtaaccacctgcaggcagtgtttgcatcacggtacaaaaagttcgacgagttctttaaggagctgctggagaacgcagaaaaatccctgaacgatatgtttgtgaagacatacggccacctgtatatgcagaattcagagttattcaaagatctgttcgttgaactaaagcgctactatgtggtggggaacgtgaacctggaagagatgctgaacgacttctgggccaggctgctcgaacgcatgtttcgactcgtaaattctcagtatcacttcaccgacgaatatctcgagtgtgtgagcaagtacaccgagcaattgaaaccctttggggacgtgcctcgtaagcttaagctgcaggtgacaagagctttcgtcgcagctcgcacctttgcccaaggtttggcagtcgctggggatgttgtgagcaaggtgagcgttcctagttgcactcacgctctcttgaagatgatttattgtagccactgcagaggactagtgaccgtgaaaccctgctacaactattgtagcaacatcatgaggggatgtctcgcaaaccagggagacctcgatttcgagtggaacaattttatcgatgccatgcttatggtcgctgaacgcctagagggaccctttaatatcgagagtgttatggatcctatagacgtgaagatctcagatgctatcatgaacatgcaagataatagcgtccaagtgtcccaaaaggtttttcaggggtgtgggccaccaaaacctcttcctgctggcaggattagccgcagtatttccgagtcagccttttctgcaaggtttaggccgcaccacccggaggaaaggcccacaacagctgctgggactagtctggaccgcctcgtgaccgatgtgaaggagaagctcaagcaagccaagaagttttggagcagcctgcccagcaatgtttgtaacgacgagcggatggccgcaggcaacgggaatgaagacgattgttggaacggcaaaggcaaaagccgctacttattcgctgtaacggggaacggcctggctaatcaaggcaataatcccgaagtgcaggttgatacgagtaaacctgatattctaatcttgcgccagattatggccctgcgcgtgatgacctcaaagatgaagaatgcatataacggtaatgacgtagacttttttgatatatccgatgagtccagcggcgagggtagtggctccggctgtgaatatcagcagtgcccttccgagtttgactataatgccaccgaccacgcagggaaaagcgctaatgagaaggccgacagcgctggcgtccgccctggcgcacaggcttaccttcttacggtcttctgcattttgttcctcgtcatgcagcgggaatggcgttag

SEQ ID NO: 117851 - DNA, 1671 bp, Artificial Sequence
  derived and/or modified sequence
atggccagattcggcctgcccgccctgctgtgcaccctggccgtgctgagcgccgccctgctggccgccgagctgaagagcaagagctgcagcgaggtgagaagactgtacgtgagcaagggcttcaacaagaacgacgcccccctgcacgagatcaacggcgaccacctgaagatctgcccccagggcagcacctgctgcagccaggagatggaggagaagtacagcctgcagagcaaggacgacttcaagagcgtggtgagcgagcagtgcaaccacctgcaggccgtgttcgccagcagatacaagaagttcgacgagttcttcaaggagctgctggagaacgccgagaagagcctgaacgacatgttcgtgaagacctacggccacctgtacatgcagaacagcgagctgttcaaggacctgttcgtggagctgaagagatactacgtggtgggcaacgtgaacctggaggagatgctgaacgacttctgggccagactgctggagagaatgttcagactggtgaacagccagtaccacttcaccgacgagtacctggagtgcgtgagcaagtacaccgagcagctgaagcccttcggcgacgtgcccagaaagctgaagctgcaggtgaccagagccttcgtggccgccagaaccttcgcccagggcctggccgtggccggcgacgtggtgagcaaggtgagcgtggtgaaccccaccgcccagtgcacccacgccctgctgaagatgatctactgcagccactgcagaggcctggtgaccgtgaagccctgctacaactactgcagcaacatcatgagaggctgcctggccaaccagggcgacctggacttcgagtggaacaacttcatcgacgccatgctgatggtggccgagagactggagggccccttcaacatcgagagcgtgatggaccccatcgacgtgaagatcagcgacgccatcatgaacatgcaggacaacagcgtgcaggtgagccagaaggtgttccagggctgcggcccccccaagcccctgcccgccggcagaatcagcagaagcatcagcgagagcgccttcagcgccagattcagaccccaccaccccgaggagagacccaccaccgccgccggcaccagcctggacagactggtgaccgacgtgaaggagaagctgaagcaggccaagaagttctggagcagcctgcccagcaacgtgtgcaacgacgagagaatggccgccggcaacggcaacgaggacgactgctggaacggcaagggcaagagcagatacctgttcgccgtgaccggcaacggcctggccaaccagggcaacaaccccgaggtgcaggtggacaccagcaagcccgacatcctgatcctgagacagatcatggccctgagagtgatgaccagcaagatgaagaacgcctacaacggcaacgacgtggacttcttcgacatcagcgacgagagcagcggcgagggcagcggcagcggctgcgagtaccagcagtgccccagcgagttcgactacaacgccaccgaccacgccggcaagagcgccaacgagaaggccgacagcgccggcgtgagacccggcgcccaggcctacctgctgaccgtgttctgcatcctgttcctggtgatgcagagagagtggagatag

SEQ ID NO: 117852 - DNA, 1461 bp, Artificial Sequence
  derived and/or modified sequence
atggaggagaagtacagcctgcagagcaaggacgacttcaagagcgtggtgagcgagcagtgcaaccacctgcaggccgtgttcgccagcagatacaagaagttcgacgagttcttcaaggagctgctggagaacgccgagaagagcctgaacgacatgttcgtgaagacctacggccacctgtacatgcagaacagcgagctgttcaaggacctgttcgtggagctgaagagatactacgtggtgggcaacgtgaacctggaggagatgctgaacgacttctgggccagactgctggagagaatgttcagactggtgaacagccagtaccacttcaccgacgagtacctggagtgcgtgagcaagtacaccgagcagctgaagcccttcggcgacgtgcccagaaagctgaagctgcaggtgaccagagccttcgtggccgccagaaccttcgcccagggcctggccgtggccggcgacgtggtgagcaaggtgagcgtggtgaaccccaccgcccagtgcacccacgccctgctgaagatgatctactgcagccactgcagaggcctggtgaccgtgaagccctgctacaactactgcagcaacatcatgagaggctgcctggccaaccagggcgacctggacttcgagtggaacaacttcatcgacgccatgctgatggtggccgagagactggagggccccttcaacatcgagagcgtgatggaccccatcgacgtgaagatcagcgacgccatcatgaacatgcaggacaacagcgtgcaggtgagccagaaggtgttccagggctgcggcccccccaagcccctgcccgccggcagaatcagcagaagcatcagcgagagcgccttcagcgccagattcagaccccaccaccccgaggagagacccaccaccgccgccggcaccagcctggacagactggtgaccgacgtgaaggagaagctgaagcaggccaagaagttctggagcagcctgcccagcaacgtgtgcaacgacgagagaatggccgccggcaacggcaacgaggacgactgctggaacggcaagggcaagagcagatacctgttcgccgtgaccggcaacggcctggccaaccagggcaacaaccccgaggtgcaggtggacaccagcaagcccgacatcctgatcctgagacagatcatggccctgagagtgatgaccagcaagatgaagaacgcctacaacggcaacgacgtggacttcttcgacatcagcgacgagagcagcggcgagggcagcggcagcggctgcgagtaccagcagtgccccagcgagttcgactacaacgccaccgaccacgccggcaagagcgccaacgagaaggccgacagcgccggcgtgagacccggcgcccaggcctacctgctgaccgtgttctgcatcctgttcctggtgatgcagagagagtggagatag

SEQ ID NO: 117853 - DNA, 1653 bp, Artificial Sequence
  derived and/or modified sequence
atggccagattcggcctgcccgccctgctgtgcaccctggccgtgctgagcgccgccctgctggccgccgagctgaagagcaagagctgcagcgaggtgagaagactgtacgtgagcaagggcttcaacaagaacgacgcccccctgcacgagatcaacggcgaccacgaggacctgagccccggcttctacctgctgctgagcagagacggcggctacagcctgcagagcaaggacgacttcaagagcgtggtgagcgagcagtgcaaccacctgcaggccgtgttcgccagcagatacaagaagttcgacgagttcttcaaggagctgctggagaacgccgagaagagcctgaacgacatgttcgtgaagacctacggccacctgtacatgcagaacagcgagctgttcaaggacctgttcgtggagctgaagagatactacgtggtgggcaacgtgaacctggaggagatgctgaacgacttctgggccagactgctggagagaatgttcagactggtgaacagccagtaccacttcaccgacgagtacctggagtgcgtgagcaagtacaccgagcagctgaagcccttcggcgacgtgcccagaaagctgaagctgcaggtgaccagagccttcgtggccgccagaaccttcgcccagggcctggccgtggccggcgacgtggtgagcaaggtgagcgtgcccagctgcacccacgccctgctgaagatgatctactgcagccactgcagaggcctggtgaccgtgaagccctgctacaactactgcagcaacatcatgagaggctgcctggccaaccagggcgacctggacttcgagtggaacaacttcatcgacgccatgctgatggtggccgagagactggagggccccttcaacatcgagagcgtgatggaccccatcgacgtgaagatcagcgacgccatcatgaacatgcaggacaacagcgtgcaggtgagccagaaggtgttccagggctgcggcccccccaagcccctgcccgccggcagaatcagcagaagcatcagcgagagcgccttcagcgccagattcagaccccaccaccccgaggagagacccaccaccgccgccggcaccagcctggacagactggtgaccgacgtgaaggagaagctgaagcaggccaagaagttctggagcagcctgcccagcaacgtgtgcaacgacgagagaatggccgccggcaacggcaacgaggacgactgctggaacggcaagggcaagagcagatacctgttcgccgtgaccggcaacggcctggccaaccagggcaacaaccccgaggtgcaggtggacaccagcaagcccgacatcctgatcctgagacagatcatggccctgagagtgatgaccagcaagatgaagaacgcctacaacggcaacgacgtggacttcttcgacatcagcgacgagagcagcggcgagggcagcggcagcggctgcgagtaccagcagtgccccagcgagttcgactacaacgccaccgaccacgccggcaagagcgccaacgagaaggccgacagcgccggcgtgagacccggcgcccaggcctacctgctgaccgtgttctgcatcctgttcctggtgatgcagagagagtggagatag

SEQ ID NO: 117854 - protein, 379 aa, Artificial Sequence
  derived and/or modified sequence
MSSAPEKQQPPHGGGGGGGGGGGAAMDPASSGPSKAKKTNAGIRRPEKPPYSYIALIVMAIQSSPTKRLTLSEIYQFLQSRFPFFRGSYQGWKNSVRHNLSLNECFIKLPKGLGRPGKGHYWTIDPASEFMFEEGSFRRRPRGFRRKCQALKPMYSMMNGLGFNHLPDTYGFQGSAGGLSCPPNSLALEGGLGMMNGHLPGNVDGMALPSHSVPHLPSNGGHSYMGGCGGAAAGEYPHHDSSVPASPLLPTGAGGVMEPHAVYSGSAAAWPPSASAALNSGASYIKQQPLSPCNPAANPLSGSLSTHSLEQPYLHQNSHNAPAELQGIPRYHSQSPSMCDRKEFVFSFNAMASSSMHSAGGGSYYHQQVTYQDIKPCVM

SEQ ID NO: 117855 - DNA, 2579 bp, Artificial Sequence
  derived and/or modified sequence
gcagagcagcggcggcagcggcggcggcggcagcagccacccgatgtcttcggcgcccgagaagcagcagccaccgcacggcggcggcggcggcggcggcgggggaggcggcgcggccatggaccccgcgtcgtccggcccgtccaaggccaagaagaccaacgccggcatccggcgcccggagaagccgccctattcctacatcgcgctcatcgtcatggccatccagagttcacccaccaagcgcctgacgctgagcgagatctaccagttcctgcagagccgcttccccttcttccggggctcctaccagggctggaagaactccgtgcgccacaacctctcgctcaacgagtgcttcatcaagctacccaagggccttgggcggcccggcaagggccactactggaccatcgacccggccagcgagttcatgttcgaggagggctcctttcggcggcggccgcgcggcttccgaaggaaatgccaggcgctcaagcccatgtacagcatgatgaacgggctcggcttcaaccacctcccggacacctacggcttccagggctcggccggcggcctctcgtgcccgcccaacagcctggcgctggagggcggcctgggcatgatgaacggccacttgccgggcaacgtggacggcatggccctgcccagccactcggtgccccacctgccttccaacggcggccactcgtacatgggcggctgcggcggcgcggcggccggcgagtacccgcaccacgacagctcggtgcccgcctccccgctgctgcccaccggcgccggtggggtcatggagccgcacgccgtctactcgggctcggcggcggcctggccgccctcggcgtccgcggcgctcaacagcggcgcctcttatatcaagcagcagcccctgtccccctgtaaccccgcggccaaccccctgtccggcagcctctccacgcactccctggagcagccgtatctgcaccagaacagccacaacgccccagccgagctgcaaggcatcccgcggtatcactcgcagtcgcccagcatgtgtgaccgaaaggagtttgtcttctctttcaacgccatggcgtcctcttccatgcactcggccggcgggggctcctactaccaccagcaggtcacctaccaagacatcaagccttgcgtgatgtgaggctgccgccgcaggccctcctggtgcaggcaggcgggtcacagggaccctggaccggcacaagaaactgctttcttctcgaggtataaccgtcggcagaagaaaagggttccacctctccccaaccggagtttttggcaaggagtccccaatgcaaagacacagcgctgcggttggcacctccttcctcactccttcaaaattgttaagaaatgttagtggtgggtctgatctgactgcagccatcggtaaataaaagtttttgatcctgttgaacccgcctgagacggtgctgtgcaggggaaagcccccgcacccacacaggaattctgctgaggtcccccctccttccggccaatggcagaagtgggggaaaatttttagaagaaaagcaaacatgtgagaccaatcattatcaaatacttttattttttggttgagtatttatctttttattttttattttttttttgaaagaatgtcttggaatgcgcaagtctccctttagagccgtcttttgcagggagcgggaagtgacaagagctcagatctccctcccgatctccctccccacctccgaagtctcctccgtggaccacaggtggatctttgtgcgaacaacttgcatttcggaagccactgtccgtctttaaacagaaagtcaaaggagccacgaagcaagcggccgtccgggcgtccgcctccgtccccttccatgttcctcctcttccttcgcttcagcctcttctgttatgttttgtcttgaattttatttagactttttcagtgggtatttttctgtctcccaacctctactgtaaactttctggtccgagaacgagccgaacacagcgcgacgcagggactaggacggcccggtgaccgcgcggattcaggattgcggggacgcagaaaggttaaggcacttttaaaaactatagcaaggctcctgtttatttattctactttctttccctaataatcaaaacaccgcgtaggctcctccgtttatcagtattaatggtgtaactttgttggcaatatttgccgtgtagaattttttttagatatccattgtaaatttgaaacaaagaccgatctgtgtaaaaacaaatttccatatgttttatataaatatatatataatatgaaggactaccctccttttttttttttgtattttggctgctagagtgcagcatttgtgacacgtatttgaaatttgaaatttccttctgcactgtataaaaggaccatttgaggatgttttgccttttgtgtattttttcctaaaaaaagaacaaaaataaaaatgtataacatttgtacatggcctttaaaattgtatcaactagaaataaaattgcatgagtattttaaaaaaaaaaaaaaaaaa

SEQ ID NO: 117856 - DNA, 1140 bp, Artificial Sequence
  derived and/or modified sequence
atgtctagcgcccctgaaaagcagcaacctccccacggagggggagggggaggcggggggggtgggggggcggccatggaccctgctagcagcggcccgtccaaggccaagaagacaaatgcaggcattcggaggcctgagaagcctccgtattcgtacattgcccttattgtcatggcgatccagagtagtcccacgaaacgccttacgctgtccgaaatttaccaatttctgcagagtcgctttcctttcttcaggggcagttatcaggggtggaaaaatagcgtacggcataatctcagcctcaatgaatgctttatcaaattacctaaggggctcgggagacccggcaaggggcactattggactatcgacccagcttctgagttcatgttcgaggagggaagcttcaggcggaggccccgcggcttccgtagaaagtgccaggctcttaagccaatgtattctatgatgaatggactgggctttaaccacctgcctgatacctacggatttcaggggtcagccggcgggttgtcctgtccacctaactcattagctctggagggcggtctgggaatgatgaatggacatcttccaggtaacgttgacgggatggcactgcccagccatagcgttccgcatctccctagcaatggcgggcacagctatatgggcggctgcggcggagccgccgccggggaatatccccatcacgacagctcagtgcccgctagtcctctgctgccaaccggtgcaggtggggtaatggaacctcatgccgtttatagcggtagcgcagctgcctggccgccttcggctagtgcagccctgaatagcggcgcctcttacatcaagcaacagcctctctcgccctgcaatcccgcagccaacccattatcggggtccctgtctacgcactctctcgaacaaccatatctccaccagaactcccataacgcccccgctgaactgcagggcatcccacgctaccacagccagagccctagcatgtgtgaccggaaggaattcgtgttcagcttcaatgcaatggccagcagcagcatgcacagcgctggcggtggctcttattaccaccaacaagttacatatcaggacatcaagccctgcgtcatgtag

SEQ ID NO: 117857 - DNA, 1140 bp, Artificial Sequence
  derived and/or modified sequence
atgagcagcgcccctgagaagcagcagcccccccacggcggcggcggcggcggcggcggcggcggcggggccgccatggaccctgccagcagcggccccagcaaggccaagaagaccaatgccggcatccggcggcctgagaagccaccctacagctacatcgccctgattgtgatggccatccagagcagccccaccaagaggctgaccctgtctgagatctaccagttcctgcagagccgcttccccttcttccggggcagctaccagggctggaagaacagcgtgcgccacaacctgagcctgaatgaatgcttcatcaagctgcccaagggcctgggccggcctgggaagggccactactggaccatcgaccctgccagcgagttcatgtttgaggagggcagcttcagaagaagaccccggggcttccggaggaagtgccaggccctgaagcccatgtacagcatgatgaatggcctgggcttcaaccacctgcctgacacctacggcttccagggcagcgctgggggcctgagctgcccccccaacagcctggccctggagggcggcctgggcatgatgaatggccacctgcctggaaatgtggatggcatggccctgcccagccacagcgtgccccacctgcccagcaatggaggccacagctacatgggcggctgcggcggcgctgctgctggggagtacccccaccacgacagctctgtgcctgccagccccctgctgcccactggagctggaggagtgatggagccccatgctgtgtacagcggcagcgctgctgcctggcccccatctgccagcgctgccctgaacagcggggccagctacatcaagcagcagcccctgagcccctgcaacccagctgccaaccccctgagcggcagcctgagcacccacagcctggagcagccctacctgcaccagaacagccacaatgccccagctgagctgcagggcatcccccgctaccacagccagagccccagcatgtgtgacaggaaggagtttgtgttctccttcaatgccatggccagcagctccatgcacagcgctgggggcggcagctactaccaccagcaggtgacctaccaggacatcaagccctgtgtgatgtag

SEQ ID NO: 117858 - DNA, 1140 bp, Artificial Sequence
  derived and/or modified sequence
atgagcagcgcccccgagaagcagcagcccccccacggcggcggcggagggggaggagggggaggcggtgctgcgatggatcctgcgagcagcggcccaagcaaagctaagaaaacaaatgcaggcatacgccgtcccgagaaacccccatactcatatattgctctcattgtcatggccatccagtcctcaccgaccaaacgattaaccctgagcgaaatttaccaatttctacagtcccggttccccttcttccgcggatcttaccaagggtggaaaaattcagtgcggcataacctgagcctgaatgaatgttttattaagcttcccaagggtttaggcaggcctggaaaagggcactattggaccatcgacccggcgagcgagtttatgttcgaggagggctcctttcggcggcggccgcgcggctttagacggaagtgccaagcactgaagccaatgtattctatgatgaatggcctgggcttcaatcatctcccagacacttacggatttcagggctctgctggaggtctgagttgccccccgaactccctggctcttgagggaggcttagggatgatgaacggccacctccccggaaatgtagacggaatggcacttcccagccattccgtgccacaccttccaagcaatggagggcactcctatatgggcggctgcggcggagcggcagccggggagtaccctcatcatgattcatcagtgcctgccagccctttattaccaaccggtgctggcggagtgatggagccccatgctgtgtattccgggagtgctgccgcatggccgcctagcgcttccgccgcgctcaacagcggcgcgtcctatatcaagcagcagccgttatccccctgcaatcctgccgctaaccctctctccgggtctctgtccacccactcccttgaacaaccttatttgcaccagaacagccacaatgcacccgcagagctgcaggggatcccacggtatcacagccaatccccgagtatgtgtgacaggaaggagttcgtcttctcttttaacgccatggcttcatcatcaatgcactctgcgggcggcggaagttattaccaccagcaagtcacctatcaggacattaagccttgcgtgatgtag

SEQ ID NO: 117859 - DNA, 1140 bp, Artificial Sequence
  derived and/or modified sequence
atgtccagcgctcctgaaaaacagcagcccccacacggaggaggcggagggggaggcggtggtgggggagccgctatggatcctgccagtagcggcccatccaaggcaaagaagactaacgctggcatccggagacccgagaaacctccctattcctacatcgccctcatagtgatggctattcagagttcacctacaaagagattaaccctctcagaaatataccagttcctgcagagtcggttcccattcttccgcggttcctaccaggggtggaagaattcggtcagacataatttgtccctgaacgaatgctttatcaagctgccgaaaggcctagggcgacccggtaagggacattattggacaatcgacccggcaagtgagtttatgttcgaggagggctccttccgacgaaggccgcgtggatttcggaggaaatgccaggccctgaaaccaatgtactccatgatgaacggattgggtttcaaccacctccccgacacatacggtttccaggggtccgcgggtggcttgagctgccccccaaacagcctagcattagagggtggtctgggaatgatgaatggacaccttccgggaaatgtagatggaatggccctcccctcacactcagtgccacacttaccctcaaacggcggtcatagttacatgggcggatgcgggggtgctgcagctggcgagtaccctcatcatgattcaagcgtgcccgctagccccctgttgcctactggagcaggtggcgtcatggagcctcatgctgtttattccggtagcgccgcagcgtggccaccttcagccagcgccgctctgaactcaggggcaagctatatcaagcaacagcctctctctccgtgtaatcctgccgcaaaccctctgagcggctccttaagtacacattccctggaacagccttacttgcaccagaatagccataacgcccctgcagagttacagggcattcctagataccatagccaatcaccttccatgtgcgacaggaaggaatttgtgtttagcttcaatgctatggccagttcgtctatgcactccgccggagggggtagctattaccaccagcaggtgacataccaggatatcaagccatgcgtgatgtag

SEQ ID NO: 117860 - DNA, 2557 bp, Artificial Sequence
  derived and/or modified sequence
gcggcagcggcggcggcggcagcagccacccgatgtcttcggcgcccgagaagcagcagccaccgcacggcggcggcggcggcggcggcgggggaggcggcgcggccatggaccccgcgtcgtccggcccgtccaaggccaagaagaccaacgccggcatccggcgcccggagaagccgccctattcctacatcgcgctcatcgtcatggccatccagagttcacccaccaagcgcctgacgctgagcgagatctaccagttcctgcagagccgcttccccttcttccggggctcctaccagggctggaagaactccgtgcgccacaacctctcgctcaacgagtgcttcatcaagctacccaagggccttgggcggcccggcaagggccactactggaccatcgacccggccagcgagttcatgttcgaggagggctcctttcggcggcggccgcgcggcttccgaaggaaatgccaggcgctcaagcccatgtacagcatgatgaacgggctcggcttcaaccacctcccggacacctacggcttccagggctcggccggcggcctctcgtgcccgcccaacagcctggcgctggagggcggcctgggcatgatgaacggccacttgccgggcaacgtggacggcatggccctgcccagccactcggtgccccacctgccttccaacggcggccactcgtacatgggcggctgcggcggcgcggcggccggcgagtacccgcaccacgacagctcggtgcccgcctccccgctgctgcccaccggcgccggtggggtcatggagccgcacgccgtctactcgggctcggcggcggcctggccgccctcggcgtccgcggcgctcaacagcggcgcctcttatatcaagcagcagcccctgtccccctgtaaccccgcggccaaccccctgtccggcagcctctccacgcactccctggagcagccgtatctgcaccagaacagccacaacgccccagccgagctgcaaggcatcccgcggtatcactcgcagtcgcccagcatgtgtgaccgaaaggagtttgtcttctctttcaacgccatggcgtcctcttccatgcactcggccggcgggggctcctactaccaccagcaggtcacctaccaagacatcaagccttgcgtgatgtgaggctgccgccgcaggccctcctggtgcaggcaggcgggtcacagggaccctggaccggcacaagaaactgctttcttctcgaggtataaccgtcggcagaagaaaagggttccacctctccccaaccggagtttttggcaaggagtccccaatgcaaagacacagcgctgcggttggcacctccttcctcactccttcaaaattgttaagaaatgttagtggtgggtctgatctgactgcagccatcggtaaataaaagtttttgatcctgttgaacccgcctgagacggtgctgtgcaggggaaagcccccgcacccacacaggaattctgctgaggtcccccctccttccggccaatggcagaagtgggggaaaatttttagaagaaaagcaaacatgtgagaccaatcattatcaaatacttttattttttggttgagtatttatctttttattttttattttttttttgaaagaatgtcttggaatgcgcaagtctccctttagagccgtcttttgcagggagcgggaagtgacaagagctcagatctccctcccgatctccctccccacctccgaagtctcctccgtggaccacaggtggatctttgtgcgaacaacttgcatttcggaagccactgtccgtctttaaacagaaagtcaaaggagccacgaagcaagcggccgtccgggcgtccgcctccgtccccttccatgttcctcctcttccttcgcttcagcctcttctgttatgttttgtcttgaattttatttagactttttcagtgggtatttttctgtctcccaacctctactgtaaactttctggtccgagaacgagccgaacacagcgcgacgcagggactaggacggcccggtgaccgcgcggattcaggattgcggggacgcagaaaggttaaggcacttttaaaaactatagcaaggctcctgtttatttattctactttctttccctaataatcaaaacaccgcgtaggctcctccgtttatcagtattaatggtgtaactttgttggcaatatttgccgtgtagaattttttttagatatccattgtaaatttgaaacaaagaccgatctgtgtaaaaacaaatttccatatgttttatataaatatatatataatatgaaggactaccctccttttttttttttgtattttggctgctagagtgcagcatttgtgacacgtatttgaaatttgaaatttccttctgcactgtataaaaggaccatttgaggatgttttgccttttgtgtattttttcctaaaaaaagaacaaaaataaaaatgtataacatttgtacatggcctttaaaattgtatcaactagaaataaaattgcatgagtattttattggga

SEQ ID NO: 117861 - DNA, 1140 bp, Artificial Sequence
  derived and/or modified sequence
atgagcagcgcccccgagaagcagcagcccccccacggcggcggcggcggcggcggcggcggcggcggcgccgccatggaccccgccagcagcggccccagcaaggccaagaagaccaacgccggcatcagaagacccgagaagcccccctacagctacatcgccctgatcgtgatggccatccagagcagccccaccaagagactgaccctgagcgagatctaccagttcctgcagagcagattccccttcttcagaggcagctaccagggctggaagaacagcgtgagacacaacctgagcctgaacgagtgcttcatcaagctgcccaagggcctgggcagacccggcaagggccactactggaccatcgaccccgccagcgagttcatgttcgaggagggcagcttcagaagaagacccagaggcttcagaagaaagtgccaggccctgaagcccatgtacagcatgatgaacggcctgggcttcaaccacctgcccgacacctacggcttccagggcagcgccggcggcctgagctgcccccccaacagcctggccctggagggcggcctgggcatgatgaacggccacctgcccggcaacgtggacggcatggccctgcccagccacagcgtgccccacctgcccagcaacggcggccacagctacatgggcggctgcggcggcgccgccgccggcgagtacccccaccacgacagcagcgtgcccgccagccccctgctgcccaccggcgccggcggcgtgatggagccccacgccgtgtacagcggcagcgccgccgcctggccccccagcgccagcgccgccctgaacagcggcgccagctacatcaagcagcagcccctgagcccctgcaaccccgccgccaaccccctgagcggcagcctgagcacccacagcctggagcagccctacctgcaccagaacagccacaacgcccccgccgagctgcagggcatccccagataccacagccagagccccagcatgtgcgacagaaaggagttcgtgttcagcttcaacgccatggccagcagcagcatgcacagcgccggcggcggcagctactaccaccagcaggtgacctaccaggacatcaagccctgcgtgatgtag

SEQ ID NO: 117862 - protein, 444 aa, Artificial Sequence
  derived and/or modified sequence
MTTEGGPPPAPLRRACSPVPGALQAALMSPPPAAAAAAAAAPETTSSSSSSSSASCASSSSSSNSASAPSAACKSAGGGGAGAGSGGAKKASSGLRRPEKPPYSYIALIVMAIQSSPSKRLTLSEIYQFLQARFPFFRGAYQGWKNSVRHNLSLNECFIKLPKGLGRPGKGHYWTIDPASEFMFEEGSFRRRPRGFRRKCQALKPMYHRVVSGLGFGASLLPQGFDFQAPPSAPLGCHSQGGYGGLDMMPAGYDAGAGAPSHAHPHHHHHHHVPHMSPNPGSTYMASCPVPAGPGGVGAAGGGGGGDYGPDSSSSPVPSSPAMASAIECHSPYTSPAAHWSSPGASPYLKQPPALTPSSNPAASAGLHSSMSSYSLEQSYLHQNAREDLSVGLPRYQHHSTPVCDRKDFVLNFNGISSFHPSASGSYYHHHHQSVCQDIKPCVM

SEQ ID NO: 117863 - DNA, 2187 bp, Artificial Sequence
  derived and/or modified sequence
agcccgggcggcgggctagggcgctcgcagggcttctgggccgaccccgctccggcgcctccgcttcccgcccggggcccgccctcgcggcccggcctcgctcccgggtcccagatgaccaccgagggcgggccgccgccggccccgctccgccgcgcgtgcagcccggtccccggcgcgctccaggccgccctgatgagcccgccgcccgccgccgccgccgccgccgccgccgccccggagaccacctcctcctcctcgtcgtcgtcctccgcctcctgcgcctcgtcctcgtcctcctccaattcggccagcgccccctcggctgcctgcaagagcgcgggcggcggcggcgcgggcgccgggagcgggggcgccaagaaggcgagctcggggctgcggcggcccgagaagccgccctactcgtacatcgcgctcatcgtcatggccatccagagctcgcccagcaagcgcctgacgctcagcgagatctaccagttcctgcaggcgcgcttccccttcttccgcggcgcctaccagggctggaagaactcggtgcgccacaatctctcgctcaacgagtgcttcatcaagctgcctaagggcctcgggcggcccggcaagggccactactggaccatcgacccggccagcgagttcatgttcgaggagggctcgttccgccgccggccgcgcggcttcaggcggaagtgccaggcgctcaagcccatgtaccaccgcgtggtgagcggcttgggcttcggggcgtcgctgctgccccagggcttcgacttccaggcgcccccgtcggcgccgctcggctgccacagccagggcggctacggcggcctcgacatgatgcccgcgggctacgacgccggcgcgggcgcccccagccacgcgcaccctcaccaccaccaccaccaccacgtcccgcacatgtcgcccaacccgggttccacctacatggccagctgcccggtgcccgcgggacccgggggcgtcggtgcggccgggggcggcggcggcggcgactacgggccggacagcagcagcagcccggtaccctcgtccccggccatggcgagcgccatcgaatgccactcgccctacacgagccctgcggcgcactggagctcgcctggcgcctcgccttacctcaagcagccgcctgccctgacgcccagcagcaaccccgccgcctcggcaggcctgcactccagcatgtcctcctactcgctggagcagagctacttgcaccagaacgctcgcgaggacctctcagtgggactgccccgttaccagcatcactctactccagtgtgtgacagaaaagatttcgtcctcaacttcaatgggatttcttctttccatccctcagctagcgggtcgtattatcaccatcaccaccagagcgtctgtcaggatattaagccctgcgtcatgtgaacggaaagaggccaagcgatggccgctctctcctctcccctcctcagagggggcagatagaaactgggacggattcaagtcacatgcacgcggatagcagtaagccacacacctgccacttagccagaatgcccaggatcgcgttggtcactgttatttgcctactgctggaagaaggacaaccgctggcaaggtagcgttccccaatctgaatacctgcaggctcccacatgagggagagggcagactcaggtgggaagatgtgccatgcgtaaggcatcaacgtgtatctgtgggatcttcgttgccttcagtaatcagggtgtgaaaaaagcagacaagttgtgtgtgtgtgtgtgtgtctaagaaaacttgtgtgcttttcaaaaaggcagtgctaagcacaagatttcaagaaagcctcttcttgttgcctagctgagtgggagagtcattttccccagacactacatttggatacaggtgccaaagaacattattaaggaattatttagaaacaatgtgtctagtttaagaaagtggttttcagtattgtgacaatacaacgtttttacaaggttgttttctaccaccatattttaaagatatttttatgaccgtgtatactcacactttgcttgtattttaaaaggaggatatatttgcacttatgtatacttttacagtttgccaaaatattttgttgtaaaattttttttcaataaaatgtatataaca

SEQ ID NO: 117864 - DNA, 1335 bp, Artificial Sequence
  derived and/or modified sequence
atgaccacagagggggggccccctccggctccccttagacgcgcctgcagtccggtacccggcgccctgcaggccgcgctgatgtctccacctcctgcagctgctgctgcagccgcagcagcccccgagaccacttccagcagttcttcctcatcctccgcttcttgcgccagctctagttccagctccaattcggccagtgcgccatctgctgcatgtaaatccgcaggtggcgggggcgcaggtgctgggtccggtggcgccaaaaaggcaagtagcggtctgcggagacccgagaaaccaccttactcttatattgccttgatagttatggctatccaatcaagtccatcaaagagactcaccctcagtgaaatctaccagtttctgcaggctcgctttcccttttttcgcggtgcctaccagggctggaagaactcagtcaggcacaatctgtctctaaatgaatgttttatcaagctgcccaagggactggggcgacctggaaaggggcactattggaccatagaccccgccagtgaatttatgttcgaggaagggtcgttccggagacgacctaggggatttcgcaggaaatgtcaagccttgaagccaatgtaccaccgggtcgtgtcaggcttaggctttggtgcgtctctgttgcctcagggcttcgacttccaggcaccacccagcgcgccactgggatgccactcccaggggggatacggaggactggacatgatgcctgccggatatgacgctggagcaggggctcctagccacgcccatccacaccatcaccatcaccaccatgtgcctcacatgagtcccaaccccgggtctacatacatggcctcctgcccagttcccgccggacccggtggcgtgggggcagctggaggcggaggcggtggagattacggtcctgactctagctctagccccgttcctagcagtcctgctatggcaagcgccatagagtgccatagtccttacacctcccccgccgcacactggtccagtccaggggcaagcccatatctgaaacagcctcccgctctgaccccttcgagtaatcctgcagcttccgccgggctgcactcttcaatgagctcttattcgctggaacagtcttatctgcaccagaatgcacgggaagacctgtccgtcggcttaccccgctatcagcaccacagcaccccagtatgtgacaggaaagattttgtcctcaatttcaacggaataagctcgtttcatcccagtgctagcggtagctactaccatcaccatcaccagtcagtctgccaggatattaagccctgtgtgatgtag

SEQ ID NO: 117865 - DNA, 1335 bp, Artificial Sequence
  derived and/or modified sequence
atgaccacagaaggaggccccccaccagcccccctgcggcgggcctgcagccctgtgcctggggccctgcaggccgccctgatgagccccccacctgctgctgctgctgctgctgctgctgcccctgagaccaccagcagcagcagcagcagcagcagcgccagctgtgccagcagcagcagcagcagcaacagcgccagcgcccccagcgctgcctgcaagtctgctgggggcggcggggccggggccggcagcggcggggccaagaaggccagcagcggcctgcggcggcctgagaagccaccctacagctacatcgccctgattgtgatggccatccagagcagccccagcaagaggctgaccctgtctgagatctaccagttcctgcaggcccgcttccccttcttccggggggcctaccagggctggaagaacagcgtgcgccacaacctgagcctgaatgaatgcttcatcaagctgcccaagggcctgggccggcctgggaagggccactactggaccatcgaccctgccagcgagttcatgtttgaggagggcagcttcagaagaagaccccggggcttccggaggaagtgccaggccctgaagcccatgtaccaccgggtggtgtctggcctgggctttggagccagcctgctgccccagggctttgacttccaggccccacccagcgcccccctgggctgccacagccagggcggctatggaggcctggacatgatgcctgctggctatgatgctggagctggggcccccagccacgcccacccccaccaccaccaccaccaccacgtgccccacatgagccccaaccctggcagcacctacatggccagctgccctgtgcctgctggccctgggggcgtgggcgccgccggcggcggcggcggcggggactatggccctgacagcagcagcagccctgtgcccagcagccctgccatggccagcgccatcgagtgccacagcccctacaccagccctgctgcccactggagcagccctggggccagcccctacctgaagcagcccccagccctgacccccagcagcaacccagctgccagcgctggcctgcacagctccatgagcagctacagcctggagcagagctacctgcaccagaatgcccgggaggacctgtctgtgggcctgccccgctaccagcaccacagcacccctgtgtgtgacaggaaggactttgtgctgaacttcaacggcatcagcagcttccaccccagcgccagcggcagctactaccaccaccaccaccagagcgtgtgccaggacatcaagccctgtgtgatgtag

SEQ ID NO: 117866 - DNA, 1335 bp, Artificial Sequence
  derived and/or modified sequence
atgaccaccgagggcggccccccccccgcccccctgcggcgggcctgttcacctgttcccggggcacttcaagccgcactgatgtcccctccccctgctgccgccgctgcagccgcagccgcacccgaaacaacaagctcctcttcctcatcctcgtccgcctcttgtgcaagttctagttcatcaagcaactctgctagtgccccttctgccgcttgtaagtccgcaggaggagggggggccggagcaggctccggaggcgccaagaaagcctcttctgggctgcggcgtcccgagaagcctccgtactcctatatcgcactaatagtcatggctattcagtcctccccctctaaaagactgaccttatcagagatataccaatttctccaagccagatttcccttcttccggggtgcctatcagggatggaaaaattccgttaggcataacctgtcccttaatgagtgcttcatcaaactgccaaagggcttggggcggccgggaaaagggcattactggactattgacccagcttccgagttcatgttcgaggagggatcctttcggaggaggcctagggggtttcggcgtaagtgccaggctctaaagcctatgtatcacagggtcgtgagcggactgggattcggagccagccttctaccacagggctttgactttcaggctcctccctctgcgcctctgggctgtcactcccaaggggggtacgggggtctggacatgatgccagccggttatgatgccggagccggtgctccgagccacgctcatccacatcatcatcaccaccatcacgtgccacacatgtctcctaatcccggctccacgtatatggcctcctgtcccgtaccagccgggcctgggggagtcggcgctgccggaggggggggcggaggcgactatgggccagactctagcagctcaccagtacctagtagtcccgcaatggcctccgcaatcgaatgtcattcaccttacacttctcctgcggctcattggtccagccccggcgcatcaccctatctgaaacaacctccagcattaactccgtcctccaaccctgccgcttccgccgggctgcatagtagtatgagctcctacagtctggagcagtcatacttgcatcagaatgcccgggaagacctctccgtgggactccctcgctaccagcaccacagtaccccggtctgcgatcgtaaggatttcgtattgaactttaacggcatttcctcatttcatccatccgcttctggaagttattaccatcaccaccaccagtccgtgtgtcaagatataaaaccatgcgtgatgtag

SEQ ID NO: 117867 - DNA, 1335 bp, Artificial Sequence
  derived and/or modified sequence
atgactacagagggcggaccgcctcccgctcccctgagacgcgcatgttcacccgtaccgggtgcacttcaagcagcgctaatgtcacctccacccgctgccgctgccgctgccgcagctgcgccagaaacaaccagtagctcttcttcttcaagttccgcttcctgtgcttcctcatccagttccagtaatagcgcgagtgctccatcagccgcttgcaagagcgccggaggcggaggcgcaggagctggaagtggtggtgccaagaaagcctcttctggactgcgtcggcctgaaaagcctccctatagttatatcgccttgatcgttatggcaattcagtccagccccagcaagcggcttacactcagtgaaatatatcagttcctgcaggcccgatttccattttttcggggtgcttaccaggggtggaagaacagtgtgcgccacaacctgtctctcaacgagtgctttattaaactgccaaaaggcttaggccgacctggtaaagggcactattggaccatcgacccggcatctgagttcatgtttgaggagggatctttccggaggagaccgagagggttccggaggaaatgtcaggctctgaagcccatgtaccaccgcgtcgtgagtggcctgggttttggagcttcactgctgccccaggggttcgactttcaggcccctccatccgccccactgggctgtcactcccagggcggatatggcggtctcgatatgatgcccgctgggtacgatgccggagcaggggcaccatcccacgcccacccacaccaccaccatcaccaccatgtccctcacatgtcaccgaaccccggaagcacttatatggcgagctgcccggtgccggctggcccaggcggagtcggagctgccggtgggggaggcggaggggattacggtccagactcctcttcatcgccggtgccaagcagtccggcaatggcatccgccatcgaatgccactctccatatacaagccctgccgcacactggagttctccaggggcttcgccctatctgaagcagccacctgcgttgaccccaagttctaatccagcagctagcgccggactccattcttcaatgtcctcatactcactggagcaatcttatctgcatcagaatgctcgtgaagacctctcagttggactgccaaggtatcagcaccactcaacaccagtttgcgacagaaaagacttcgtgctgaactttaacggtatctcaagcttccacccctccgcttccggctcctattaccaccaccaccaccaatctgtatgccaggacattaagccctgtgttatgtag

SEQ ID NO: 117868 - DNA, 1335 bp, Artificial Sequence
  derived and/or modified sequence
atgaccaccgagggcggccccccccccgcccccctgagaagagcctgcagccccgtgcccggcgccctgcaggccgccctgatgagccccccccccgccgccgccgccgccgccgccgccgcccccgagaccaccagcagcagcagcagcagcagcagcgccagctgcgccagcagcagcagcagcagcaacagcgccagcgcccccagcgccgcctgcaagagcgccggcggcggcggcgccggcgccggcagcggcggcgccaagaaggccagcagcggcctgagaagacccgagaagcccccctacagctacatcgccctgatcgtgatggccatccagagcagccccagcaagagactgaccctgagcgagatctaccagttcctgcaggccagattccccttcttcagaggcgcctaccagggctggaagaacagcgtgagacacaacctgagcctgaacgagtgcttcatcaagctgcccaagggcctgggcagacccggcaagggccactactggaccatcgaccccgccagcgagttcatgttcgaggagggcagcttcagaagaagacccagaggcttcagaagaaagtgccaggccctgaagcccatgtaccacagagtggtgagcggcctgggcttcggcgccagcctgctgccccagggcttcgacttccaggccccccccagcgcccccctgggctgccacagccagggcggctacggcggcctggacatgatgcccgccggctacgacgccggcgccggcgcccccagccacgcccacccccaccaccaccaccaccaccacgtgccccacatgagccccaaccccggcagcacctacatggccagctgccccgtgcccgccggccccggcggcgtgggcgccgccggcggcggcggcggcggcgactacggccccgacagcagcagcagccccgtgcccagcagccccgccatggccagcgccatcgagtgccacagcccctacaccagccccgccgcccactggagcagccccggcgccagcccctacctgaagcagccccccgccctgacccccagcagcaaccccgccgccagcgccggcctgcacagcagcatgagcagctacagcctggagcagagctacctgcaccagaacgccagagaggacctgagcgtgggcctgcccagataccagcaccacagcacccccgtgtgcgacagaaaggacttcgtgctgaacttcaacggcatcagcagcttccaccccagcgccagcggcagctactaccaccaccaccaccagagcgtgtgccaggacatcaagccctgcgtgatgtag

SEQ ID NO: 117869 - protein, 553 aa, Artificial Sequence
  derived and/or modified sequence
MQARYSVSSPNSLGVVPYLGGEQSYYRAAAAAAGGGYTAMPAPMSVYSHPAHAEQYPGGMARAYGPYTPQPQPKDMVKPPYSYIALITMAIQNAPDKKITLNGIYQFIMDRFPFYRDNKQGWQNSIRHNLSLNECFVKVPRDDKKPGKGSYWTLDPDSYNMFENGSFLRRRRRFKKKDAVKDKEEKDRLHLKEPPPPGRQPPPAPPEQADGNAPGPQPPPVRIQDIKTENGTCPSPPQPLSPAAALGSGSAAAVPKIESPDSSSSSLSSGSSPPGSLPSARPLSLDGADSAPPPPAPSAPPPHHSQGFSVDNIMTSLRGSPQSAAAELSSGLLASAAASSRAGIAPPLALGAYSPGQSSLYSSPCSQTSSAGSSGGGGGGAGAAGGAGGAGTYHCNLQAMSLYAAGERGGHLQGAPGGAGGSAVDDPLPDYSLPPVTSSSSSSLSHGGGGGGGGGGQEAGHHPAAHQGRLTSWYLNQAGGDLGHLASAAAAAAAAGYPGQQQNFHSVREMFESQRIGLNNSPVNGNSSCQMAFPSSQSLYRTSGAFVYDCSKF

SEQ ID NO: 117870 - protein, 212 aa, Artificial Sequence
  derived and/or modified sequence
MQARYSVSSPNSLGVVPYLGGEQSYYRAAAAAAGGGYTAMPAPMSVYSHPAHAEQYPGGMARAYGPYTPQPQPKDMVKPPYSYIALITMAIQNAPDKKITLNGIYQFIMDRFPFYRDNKQGWQNSIRHNLSLNECFVKVPRDDKKPGKGSYWTLDPDSYNMFENGSFLRRRRRFKKKDAVKDKEEKDRPQATRASSRTSTRCGRCSSHRGSA

SEQ ID NO: 117871 - DNA, 3447 bp, Artificial Sequence
  derived and/or modified sequence
atgcaggcgcgctactccgtgtccagccccaactccctgggagtggtgccctacctcggcggcgagcagagctactaccgcgcggcggccgcggcggccgggggcggctacaccgccatgccggcccccatgagcgtgtactcgcaccctgcgcacgccgagcagtacccgggcggcatggcccgcgcctacgggccctacacgccgcagccgcagcccaaggacatggtgaagccgccctatagctacatcgcgctcatcaccatggccatccagaacgccccggacaagaagatcaccctgaacggcatctaccagttcatcatggaccgcttccccttctaccgggacaacaagcagggctggcagaacagcatccgccacaacctctcgctcaacgagtgcttcgtcaaggtgccgcgcgacgacaagaagccgggcaagggcagctactggacgctggacccggactcctacaacatgttcgagaacggcagcttcctgcggcggcggcggcgcttcaagaagaaggacgcggtgaaggacaaggaggagaaggacaggctgcacctcaaggagccgcccccgcccggccgccagcccccgcccgcgccgccggagcaggccgacggcaacgcgcccggtccgcagccgccgcccgtgcgcatccaggacatcaagaccgagaacggtacgtgcccctcgccgccccagcccctgtccccggccgccgccctgggcagcggcagcgccgccgcggtgcccaagatcgagagccccgacagcagcagcagcagcctgtccagcgggagcagccccccgggcagcctgccgtcggcgcggccgctcagcctggacggtgcggattccgcgccgccgccgcccgcgccctccgccccgccgccgcaccatagccagggcttcagcgtggacaacatcatgacgtcgctgcgggggtcgccgcagagcgcggccgcggagctcagctccggccttctggcctcggcggccgcgtcctcgcgcgcggggatcgcacccccgctggcgctcggcgcctactcgcccggccagagctccctctacagctccccctgcagccagacctccagcgcgggcagctcgggcggcggcggcggcggcgcgggggccgcggggggcgcgggcggcgccgggacctaccactgcaacctgcaagccatgagcctgtacgcggccggcgagcgcgggggccacttgcagggcgcgcccgggggcgcgggcggctcggccgtggacgaccccctgcccgactactctctgcctccggtcaccagcagcagctcgtcgtccctgagtcacggcggcggcggcggcggcggcgggggaggccaggaggccggccaccaccctgcggcccaccaaggccgcctcacctcgtggtacctgaaccaggcgggcggagacctgggccacttggcgagcgcggcggcggcggcggcggccgcaggctacccgggccagcagcagaacttccactcggtgcgggagatgttcgagtcacagaggatcggcttgaacaactctccagtgaacgggaatagtagctgtcaaatggccttcccttccagccagtctctgtaccgcacgtccggagctttcgtctacgactgtagcaagttttgacacaccctcaaagccgaactaaatcgaaccccaaagcaggaaaagctaaaggaacccatcaaggcaaaatcgaaactaaaaaaaaaaaatccaattaaaaaaaacccctgagaatattcaccacaccagcgaacagaatatccctccaaaaattcagctcaccagcaccagcacgaagaaaactctattttcttaaccgattaattcagagccacctccactttgccttgtctaaataaacaaacccgtaaactgttttatacagagacagcaaaatcttggtttattaaaggacagtgttactccagataacacgtaagtttcttcttgcttttcagagacctgctttcccctcctcccgtctcccctctcttgccttcttccttgcctctcacctgtaagatattattttatcctatgttgaagggagggggaaagtccccgtttatgaaagtcgctttctttttattcatggacttgttttaaaatgtaaattgcaacatagtaatttatttttaatttgtagttggatgtcgtggaccaaacgccagaaagtgttcccaaaacctgacgttaaattgcctgaaactttaaattgtgctttttttctcattataaaaagggaaactgtattaatcttattctatcctcttttctttctttttgttgaacatattcattgtttgtttattaataaattaccattcagtttgaatgagacctatatgtctggatactttaatagagctttaattattacgaaaaaagatttcagagataaaacactagaagttacctattctccacctaaatctctgaaaaatggagaaaccctctgactagtccatgtcaaattttactaaaagtctttttgtttagatttattttcctgcagcatcttctgcaaaatgtactatatagtcagcttgctttgaggctagtaaaaagatatttttctaaacagattggagttggcatataaacaaatacgttttctcactaatgacagtccatgattcggaaattttaagcccatgaatcagccgcggtcttaccacggtgatgcctgtgtgccgagagatgggactgtgcggccagatatgcacagataaatatttggcttgtgtattccatataaaattgcagtgcatattatacatccctgtgagccagatgctgaatagatattttcctattatttcagtcctttataaaaggaaaaataaaccagtttttaaatgtatgtatataattctcccccatttacaatccttcatgtattacatagaaggattgcttttttaaaaatatactgcgggttggaaagggatatttaatctttgagaaactattttagaaaatatgtttgtagaacaattatttttgaaaaagatttaaagcaataacaagaaggaaggcgagaggagcagaacattttggtctagggtggtttctttttaaaccattttttcttgttaatttacagttaaacctaggggacaatccggattggccctcccccttttgtaaataacccaggaaatgtaataaattcattatcttagggtgatctgccctgccaatcagactttggggagatggcgatttgattacagacgttcgggggggtggggggcttgcagtttgttttggagataatacagtttcctgctatctgccgctcctatctagaggcaacacttaagcagtaattgctgttgcttgttgtcaaaatttgatcattgttaaaggattgctgcaaataaatacactttaatttcagtc

SEQ ID NO: 117872 - DNA, 748 bp, Artificial Sequence
  derived and/or modified sequence
ccatgcaggcgcgctactccgtgtccagccccaactccctgggagtggtgccctacctcggcggcgagcagagctactaccgcgcggcggccgcggcggccgggggcggctacaccgccatgccggcccccatgagcgtgtactcgcaccctgcgcacgccgagcagtacccgggcggcatggcccgcgcctacgggccctacacgccgcagccgcagcccaaggacatggtgaagccgccctatagctacatcgcgctcatcaccatggccatccagaacgccccggacaagaagatcaccctgaacggcatctaccagttcatcatggaccgcttccccttctaccgggacaacaagcagggctggcagaacagcatccgccacaacctctcgctcaacgagtgcttcgtcaaggtgccgcgcgacgacaagaagccgggcaagggcagctactggacgctggacccggactcctacaacatgttcgagaacggcagcttcctgcggcggcggcggcgcttcaagaagaaggacgcggtgaaggacaaggaggagaaggacaggccgcaggctacccgggccagcagcagaacttccactcggtgcgggagatgttcgagtcacagaggatcggcttgaacaactctccagtgaacgggaatagtagctgtcaaatggccttcccttccagccagtctctgtaccgcacgtccggagctttcgtctacgactgtagcaagttttga

SEQ ID NO: 117873 - DNA, 1662 bp, Artificial Sequence
  derived and/or modified sequence
atgcaggcccggtatagtgtcagttcacctaattcactcggtgtggtgccttatcttgggggggaacaatcttactaccgtgcagccgctgcagccgctggaggtggatacaccgctatgccggccccaatgtccgtatactcccaccctgcccacgccgagcagtaccccgggggaatggctagggcctacggcccatatacaccacagccacaaccgaaggacatggtcaagcctccttactcgtacatagccctgattacaatggcgattcagaacgcccctgataaaaaaatcacacttaatggtatatatcagtttatcatggaccgatttcctttctatcgggacaataagcaagggtggcagaatagcattcgacacaatttgtctctaaacgagtgtttcgtcaaggtcccaagggacgacaagaaaccaggtaaaggaagctactggacactggatcctgacagctacaatatgtttgagaatgggtcctttctgcgacgacggcgccgtttcaaaaagaaggacgccgtgaaggacaaggaggaaaaagataggctccacctgaaagaacctccacctccagggcgacagccacctcccgcaccgcctgaacaagccgatggaaacgccccaggcccccagccccctcccgtgaggatacaggacataaaaaccgagaacggtacttgcccgagccctcctcaacccctgagcccagccgcggcactgggttcaggcagcgccgccgctgtgcccaaaattgagagcccagactccagttcttctagcctttctagtgggtcctcccctccaggatctcttccttctgcacggcctctgagtttggatggagcagacagcgccccgccacccccagctccctccgccccccctccacaccattctcaaggcttcagcgttgataacattatgacctcgctacggggctccccccagagtgccgccgcggagttgtcaagcgggctgctagcctccgcggccgccagtagcagagccggcatagccccacctctcgcccttggggcctacagccccggtcagagttctctgtacagctcaccttgctcccagaccagctcagcaggttcttctggcgggggtggcggaggtgccggtgcagctggaggggcagggggtgctggcacttaccactgcaatctccaggcaatgtctttatatgccgcaggagagcgaggtgggcatctgcagggcgcccctggtggtgcaggcggcagcgccgtcgatgatccacttccggattattctctgccaccggttacatcaagtagctcaagcagcctgagccatggtggaggcgggggaggtggcggtggtggacaggaggccggacaccatcccgcggcacatcagggcagacttacaagctggtatttgaaccaggccgggggggacttagggcacctcgcttcggctgccgccgccgctgccgccgctgggtatcctggacaacagcagaacttccacagcgttcgcgagatgtttgaatcgcagcggattggcctcaacaattctcccgtgaatggcaatagcagctgccagatggcgttcccatccagccagtcgctataccggacctcaggagctttcgtgtacgactgcagcaagttttag

SEQ ID NO: 117874 - DNA, 639 bp, Artificial Sequence
  derived and/or modified sequence
atgcaggcccgttatagcgtcagcagcccaaattctctgggggtcgttccgtatctcggtggtgagcagagttactatagggccgctgccgcagcggccggtggaggttatacagccatgcctgcaccaatgtcagtgtatagccacccggcccacgccgagcagtatccagggggtatggctcgcgcatatggaccttatacccctcagccacagccgaaggacatggttaagcccccctactcctacatcgccctgattacaatggctatccagaatgctcctgacaaaaaaataacgctgaacggaatttaccagttcatcatggaccgttttcctttttaccgcgacaacaagcaggggtggcagaatagcattaggcacaatttatcattgaacgagtgcttcgtcaaagtcccacgcgacgataaaaagcccgggaaggggagctactggacgctggaccctgactcttataatatgtttgagaatggcagcttcttgcgccgccggaggaggttcaaaaagaaagacgccgttaaggacaaagaggaaaaagatcgaccccaggccacgcgagcttcctcgagaacatctacaaggtgtgggagatgttcgtcacatcgcggatcagcctag

SEQ ID NO: 117875 - DNA, 1662 bp, Artificial Sequence
  derived and/or modified sequence
atgcaggcccgctacagcgtgagcagccccaacagcctgggcgtggtgccctacctgggcggggagcagagctactacagagctgctgctgctgctgctgggggcggctacacagccatgcctgcccccatgtctgtgtacagccacccagcccatgctgagcagtacccaggcggcatggcccgggcctacggcccctacaccccccagccccagcccaaggacatggtgaagccaccctacagctacatcgccctgatcaccatggccatccagaatgccccagacaagaagatcaccctgaatggcatctaccagttcatcatggaccgcttccccttctacagagacaacaagcagggctggcagaacagcatccgccacaacctgagcctgaatgaatgttttgtgaaggtgcccagagatgacaagaagccaggcaagggcagctactggaccctggaccctgacagctacaacatgtttgaaaatggcagcttcctgcggaggagaagacgcttcaagaagaaggatgctgtgaaggacaaggaggagaaggaccggctgcacctgaaggagcccccacctcctggccggcagcccccaccagcccctcctgagcaggctgatggaaatgcccctggcccccagcccccacctgtgcgcatccaggacatcaagacagaaaatggcacctgccccagccccccccagcccctgagccctgctgctgccctgggcagcggcagcgctgctgctgtgcccaagattgagagcccagacagcagcagcagcagcctgagcagcggcagcagccccccaggcagcctgcccagcgcccggcccctgagcctggatggagctgacagcgcccctcctcctccagcccccagcgcccccccaccccaccacagccagggcttctctgtggacaacatcatgaccagcctgcggggcagcccccagagcgctgctgctgagctgagcagcggcctgctggccagcgctgctgccagcagccgggccggcatcgccccacccctggccctgggcgcctacagccctggccagagcagcctgtacagcagcccctgcagccagaccagcagcgctggcagcagcggcggcggcggcggcggggccggggccgccggcggggccggcggggccggcacctaccactgcaacctgcaggccatgagcctgtatgctgctggggagcggggcggccacctgcagggcgcccctgggggcgccggcggcagcgctgtggatgaccccctgcctgactacagcctgccccctgtgaccagcagcagcagcagcagcctgagccacggcggcggcggcggcggcggcggcggcggccaggaggccggccaccaccctgctgcccaccagggccgcctgacctcctggtacctgaaccaggccggcggggacctgggccacctggccagcgctgctgctgctgctgctgctgctggctacccaggccagcagcagaacttccacagcgtgcgggagatgtttgagagccagagaattggcctgaacaacagccctgtgaatggaaacagcagctgccagatggccttccccagcagccagagcctgtaccgcaccagcggggcctttgtgtatgactgcagcaagttctag

SEQ ID NO: 117876 - DNA, 639 bp, Artificial Sequence
  derived and/or modified sequence
atgcaggcccgctacagcgtgagcagccccaacagcctgggcgtggtgccctacctgggcggggagcagagctactacagagctgctgctgctgctgctgggggcggctacacagccatgcctgcccccatgtctgtgtacagccacccagcccatgctgagcagtacccaggcggcatggcccgggcctacggcccctacaccccccagccccagcccaaggacatggtgaagccaccctacagctacatcgccctgatcaccatggccatccagaatgccccagacaagaagatcaccctgaatggcatctaccagttcatcatggaccgcttccccttctacagagacaacaagcagggctggcagaacagcatccgccacaacctgagcctgaatgaatgttttgtgaaggtgcccagagatgacaagaagccaggcaagggcagctactggaccctggaccctgacagctacaacatgtttgaaaatggcagcttcctgcggaggagaagacgcttcaagaagaaggatgctgtgaaggacaaggaggagaaggaccggccccaggccacccgggccagcagcaggaccagcacccgctgtggccgctgcagcagccaccggggcagcgcctag

SEQ ID NO: 117877 - DNA, 1662 bp, Artificial Sequence
  derived and/or modified sequence
atgcaggcccggtacagcgtgagcagccccaacagcctgggcgtggtgccctatctgggtggtgagcagtcctactatcgggctgccgccgccgcagccgggggtggctacaccgctatgcctgcgcccatgtccgtgtacagccatcctgcccatgctgagcagtaccctggaggcatggctcgtgcctatggcccctacactccacagccccaaccgaaggatatggtcaaacccccgtactcctatattgctctgatcactatggcgatccagaacgcccccgacaagaagatcacactcaacggaatctatcaattcatcatggacagatttccattctaccgtgacaacaagcaggggtggcagaatagcattcgccataatctgagccttaacgagtgcttcgtcaaagtccctagagacgataaaaagcccggcaaggggtcctactggaccctcgaccctgactcctacaacatgtttgaaaatgggagcttcctacgtagacgcagaaggtttaagaaaaaggatgccgtgaaggataaggaggagaaggacaggctgcaccttaaggagccaccaccccctggcagacagccaccacccgccccccccgagcaggcagatggaaacgccccgggcccccaacccccccccgtcagaattcaggatatcaaaaccgaaaatggcacctgtccgtctcctccacagccactttcccccgctgcagcgctgggatccggaagcgcagccgcagtaccaaagatcgaaagccctgacagctcgtcctctagcctatcttcaggcagtagccctcctggctccctgccaagcgcccgcccattgagtctggacggggcagattccgcaccacctcctcctgctcctagcgcgcctcctccgcaccactctcagggattcagcgtcgataatatcatgacaagtctccggggctctcctcaaagcgccgcggctgagctgagctccgggctactcgcttcggccgctgcgtcctctcgagccgggatagccccaccacttgctttgggcgcctactcccctggccaaagttcgctgtactcttctccttgttcccagacctcaagtgctgggagtagcggtgggggaggcggcggcgcaggcgccgctggaggtgctggaggagccgggacctatcactgcaatctccaggccatgtctttgtacgccgccggggagcgggggggccacctgcagggggcacctggcggggccggcggtagcgccgtcgatgacccgttgcctgactattccctgcccccagtgacaagcagtagctcctcttcccttagtcatggggggggtggtgggggaggcggaggcggtcaagaggcaggacaccacccagcagcccaccagggtcgtcttacttcctggtatctgaaccaggccggaggtgatctggggcatcttgctagtgctgcggctgcagcggccgctgctggttacccaggacagcaacagaatttccatagcgtgcgggagatgttcgagtcccagcgcattggcctcaataatagtcccgttaatggaaactctagctgccaaatggcattcccatcctctcagtccttgtaccggacttcaggagcgttcgtgtacgattgcagtaaattctag

SEQ ID NO: 117878 - DNA, 639 bp, Artificial Sequence
  derived and/or modified sequence
atgcaggcccggtacagcgtgagcagccccaacagcctgggcgtggtgccatacctggggggagaacagagttactatcgcgccgcagccgccgccgcaggtgggggctatacagccatgccagcccctatgagcgtatacagccatcctgcacatgcggaacagtatccgggcggcatggccagggcttacgggccatataccccacaaccccagccgaaagacatggtgaagcccccatatagttatatcgccctgattactatggcaatacagaacgctccagacaagaagatcaccctcaatggcatctaccagtttatcatggacaggttcccattctacagggacaataagcaggggtggcagaatagcatccgacacaacctgtctttgaatgagtgcttcgttaaagttcccagagatgacaagaagcctgggaagggctcctactggacgcttgatccggacagctacaacatgttcgagaacggtagttttcttagacgaaggagacggttcaaaaagaaggacgctgtgaaggataaagaggagaaagatcgccctcaggccacacgcgcttcaagcaggacttccaccaggtgtggaaggtgttcctcgcacagaggatccgcctag

SEQ ID NO: 117879 - DNA, 1662 bp, Artificial Sequence
  derived and/or modified sequence
atgcaggccagatacagtgtgagctcgcctaactctctgggcgtagtgccgtacctgggcggagaacagagctactaccgggctgcagctgcagccgcaggcggtggatacacagccatgcctgcaccaatgagcgtctacagtcatccagcccacgctgagcaatacccaggtgggatggctcgggcatatggcccatataccccacagccgcagcctaaagacatggttaaacccccatatagctatatagcccttatcacgatggcgatccaaaacgcccctgataaaaagattactttgaatgggatttatcagtttatcatggataggtttcccttctaccgtgacaataaacagggatggcagaatagtattcgccataatctcagcctaaacgagtgctttgtcaaagtcccgcgagatgacaaaaagcctggaaaaggcagctactggacacttgacccggattcatataatatgtttgagaacggatccttcctccgtaggagaaggcgctttaaaaaaaaggatgctgtaaaagacaaagaggagaaagataggctacacctaaaagagcccccaccaccgggtagacagcctcctcccgctccaccggagcaagcagatggcaatgcccctggccctcagcctccacctgtgaggatacaggacattaagacagaaaacggtacctgcccctctccccctcagcctctcagtcccgctgctgcgctaggcagcggatccgccgctgcggtacccaaaattgagtctcccgattctagctcaagctcccttagcagtggaagcagcccgccagggtccctcccatcagctcggcctctctctctagatggcgctgactcggctccccctcctccagcgccttctgctcctccacctcaccactcccaggggttctccgtcgataatattatgacttcacttagggggagcccccagtctgcggcagctgagttaagttccgggctgctggcttccgcagccgcatcctcccgcgcaggcatcgcacctcccctcgctctgggggcttactcacccggtcagtcaagcctgtatagctccccatgtagccagacttcaagcgcaggatcaagtggcggaggagggggaggcgctggcgcagcgggaggcgcaggcggtgcaggcacttatcattgcaatctccaggctatgagcctgtatgcagccggagagaggggaggccacctgcagggagccccaggaggggctggcggaagcgccgtggatgaccctctcccagactattcacttcctcccgtcacgtcaagctctagttctagcctgtcgcatggagggggaggcggaggcggtgggggagggcaggaagccggtcaccacccggcagcccatcaaggaagactgacttcttggtatttgaatcaagcgggaggcgatctggggcatctggcaagcgctgccgctgcggcagcggctgccggttaccccggtcagcagcagaacttccacagtgtgagggaaatgtttgagtctcagcggataggtctgaataattccccagtgaatggaaattcctcctgtcagatggctttccccagctcccaaagcctgtacagaacctccggggctttcgtctacgactgtagcaagttctag

SEQ ID NO: 117880 - DNA, 639 bp, Artificial Sequence
  derived and/or modified sequence
atgcaggccagatactcagtgtcatcgccgaactctttgggcgtggtaccatacctggggggagaacagtcttactaccgagcagcagccgcagcggcaggcggtgggtacaccgcaatgcccgctccgatgtccgtgtatagccatcccgcacacgccgagcaataccctggcggaatggccagagcctatgggccatatactccccagcctcagccgaaggatatggttaaacctccgtactcatatattgcactcatcacaatggcaatacagaacgcaccagacaaaaaaataaccctcaatggtatctatcagttcatcatggatagatttcccttctaccgcgataataaacagggctggcagaacagcatcaggcacaatttgagcctaaacgagtgtttcgtaaaggttcctagagatgataagaagccgggaaaaggatcctactggactcttgaccccgattcttataacatgttcgagaatggcagtttcctaaggcgtaggagaagatttaagaagaaggatgcagtgaaggacaaagaagaaaaagaccgaccacaagcaacaagagctagtagccgtacctcaactcggtgcggtcgatgctcgagccaccgcggttcagcttag

SEQ ID NO: 117881 - DNA, 1662 bp, Artificial Sequence
  derived and/or modified sequence
atgcaggccagatacagcgtgagcagccccaacagcctgggcgtggtgccctacctgggcggcgagcagagctactacagagccgccgccgccgccgccggcggcggctacaccgccatgcccgcccccatgagcgtgtacagccaccccgcccacgccgagcagtaccccggcggcatggccagagcctacggcccctacaccccccagccccagcccaaggacatggtgaagcccccctacagctacatcgccctgatcaccatggccatccagaacgcccccgacaagaagatcaccctgaacggcatctaccagttcatcatggacagattccccttctacagagacaacaagcagggctggcagaacagcatcagacacaacctgagcctgaacgagtgcttcgtgaaggtgcccagagacgacaagaagcccggcaagggcagctactggaccctggaccccgacagctacaacatgttcgagaacggcagcttcctgagaagaagaagaagattcaagaagaaggacgccgtgaaggacaaggaggagaaggacagactgcacctgaaggagccccccccccccggcagacagcccccccccgccccccccgagcaggccgacggcaacgcccccggcccccagcccccccccgtgagaatccaggacatcaagaccgagaacggcacctgccccagccccccccagcccctgagccccgccgccgccctgggcagcggcagcgccgccgccgtgcccaagatcgagagccccgacagcagcagcagcagcctgagcagcggcagcagcccccccggcagcctgcccagcgccagacccctgagcctggacggcgccgacagcgccccccccccccccgcccccagcgccccccccccccaccacagccagggcttcagcgtggacaacatcatgaccagcctgagaggcagcccccagagcgccgccgccgagctgagcagcggcctgctggccagcgccgccgccagcagcagagccggcatcgccccccccctggccctgggcgcctacagccccggccagagcagcctgtacagcagcccctgcagccagaccagcagcgccggcagcagcggcggcggcggcggcggcgccggcgccgccggcggcgccggcggcgccggcacctaccactgcaacctgcaggccatgagcctgtacgccgccggcgagagaggcggccacctgcagggcgcccccggcggcgccggcggcagcgccgtggacgaccccctgcccgactacagcctgccccccgtgaccagcagcagcagcagcagcctgagccacggcggcggcggcggcggcggcggcggcggccaggaggccggccaccaccccgccgcccaccagggcagactgaccagctggtacctgaaccaggccggcggcgacctgggccacctggccagcgccgccgccgccgccgccgccgccggctaccccggccagcagcagaacttccacagcgtgagagagatgttcgagagccagagaatcggcctgaacaacagccccgtgaacggcaacagcagctgccagatggccttccccagcagccagagcctgtacagaaccagcggcgccttcgtgtacgactgcagcaagttctag

SEQ ID NO: 117882 - DNA, 639 bp, Artificial Sequence
  derived and/or modified sequence
atgcaggccagatacagcgtgagcagccccaacagcctgggcgtggtgccctacctgggcggcgagcagagctactacagagccgccgccgccgccgccggcggcggctacaccgccatgcccgcccccatgagcgtgtacagccaccccgcccacgccgagcagtaccccggcggcatggccagagcctacggcccctacaccccccagccccagcccaaggacatggtgaagcccccctacagctacatcgccctgatcaccatggccatccagaacgcccccgacaagaagatcaccctgaacggcatctaccagttcatcatggacagattccccttctacagagacaacaagcagggctggcagaacagcatcagacacaacctgagcctgaacgagtgcttcgtgaaggtgcccagagacgacaagaagcccggcaagggcagctactggaccctggaccccgacagctacaacatgttcgagaacggcagcttcctgagaagaagaagaagattcaagaagaaggacgccgtgaaggacaaggaggagaaggacagaccccaggccaccagagccagcagcagaaccagcaccagatgcggcagatgcagcagccacagaggcagcgcctag

SEQ ID NO: 117883 - protein, 421 aa, Artificial Sequence
  derived and/or modified sequence
MAESWLRLSGAGPAEEAGPEGGLEEPDALDDSLTSLQWLQEFSILNAKAPALPPGGTDPHGYHQVPGSAAPGSPLAADPACLGQPHTPGKPTSSCTSRSAPPGLQAPPPDDVDYATNPHVKPPYSYATLICMAMQASKATKITLSAIYKWITDNFCYFRHADPTWQNSIRHNLSLNKCFIKVPREKDEPGKGGFWRIDPQYAERLLSGAFKKRRLPPVHIHPAFARQAAQEPSAVPRAGPLTVNTEAQQLLREFEEATGEAGWGAGEGRLGHKRKQPLPKRVAKVPRPPSTLLPTPEEQGELEPLKGNFDWEAIFDAGTLGGELGALEALELSPPLSPASHVDVDLTIHGRHIDCPATWGPSVEQAADSLDFDETFLATSFLQHPWDESGSGCLPPEPLFEAGDATLASDLQDWASVGAFL

SEQ ID NO: 117884 - DNA, 2666 bp, Artificial Sequence
  derived and/or modified sequence
aggagaagcctttggagcggctacttaatgccggtcccggggccgcggtagctcagagaagcgccgtcgggcgggggggcggcaagaggcgctggcagggcccccgagctgggggcagagagccgcagggggtgggagcaacttcttccagaaccttcctctggcccgggctgcgctctgagccaggcaccacatacttattcggaggaggcgcccccggggtcgcgagatggaagcgcgcgtccgggaggccgtgtaacgggagctgcgggactcagcgggccagagagcgcggcgggccacccccggctcagcccgtggatgctgaccgccccctcggagagtccccgcagacatggcggagagctggctgcgcctctcgggagccgggccggcggaggaggccgggccggagggcggcctggaggagcccgacgccctggatgacagcctgaccagcctgcagtggctgcaggaattctccattctcaacgccaaggcccccgccctgcccccggggggcaccgacccccacggctaccaccaggtgccaggttcagcggcgcccgggtcccccctggcggccgaccccgcctgcctggggcagccacacacgccgggcaagcccacgtcgtcgtgcacgtcgcggagcgcgcccccggggctgcaggccccaccccccgacgacgtggactacgccaccaatccgcacgtgaagcctccctactcgtatgccacgctcatctgcatggccatgcaggccagcaaggccaccaagatcaccctgtcggccatctacaagtggatcacggacaacttctgctacttccgccacgcagatcccacctggcagaattcaatccgccacaacctgtctctgaacaagtgcttcatcaaagtgcctcgggagaaggacgaaccaggcaaggggggcttctggcgcattgacccccagtacgcggagcggctactgagcggcgctttcaagaagcggcgactgccccctgtccacatccacccagcctttgcccgccaggccgcgcaggagcccagcgctgtcccccgggccgggccgctgacggtgaataccgaggcccagcagctgctgcgggagttcgaggaggccaccggggaggcgggctggggtgcaggcgagggcaggctggggcataagcgcaaacagccgctgcccaagcgggtggccaaggtcccgcggccccccagcaccctgctgcccaccccggaggagcagggtgagctggaacccctcaaaggcaactttgactgggaggccatcttcgacgccggcactctgggcggggagctgggtgcactggaggccctggagctgagcccgcctctgagccccgcctcacacgtggacgtggacctcaccatccacggccgccacatcgactgccctgccacctgggggccttcggtggagcaggctgccgacagcctggacttcgatgagaccttcctggccacatccttcctgcagcacccctgggacgagagcggcagtggctgcctgcccccggagcccctctttgaggctggggatgccaccctggcctccgacctgcaggactgggccagcgtgggggccttcttgtaagaggccaggccctgccccacctctggacagtgcccaagtcagggtccagaactgccccccaacacaggtccacagacaccccaccacctaggcaggggctgggccagggctccaaggcttgccccagaggccacatggccaccagccccagctgccatcagattcaagcccaggaggctgaaaacgagggcccaggaccagaatcgctgcctcctctccccagccccaccttgtacacacagtgtttcattgctccgcgtcttcccagccccagaaaccggctaaaggaccctgcaccatgagagccgaggcctggaggagcccgggtcaggctggggaggaacagaactgggccctcccagagcacctccgcttcccccctgcttccccaggtctctatccagagagagtccccaggtacaacaaatgctaattagatgacagcaaattaaccccctggaggcttctcctggcagagcctccctggggccggggcaggctgtggatggggcggagcagggcagaagatggactgggggagggggcagagagaggagaccaaaatgaggtggtggcacagggtggggcaaggagatcctctctaaggcctctggggtctttgcctggccccatccctagggggcggggaggggacgtaaatccctaatctttaagcccgacttgaggctgagagcagctggaagtttgggtttggtggtttgggggccggggcagccaagctgtatggggcaggacagacagactaatgtagtgagtgtagctgtagctgaggcttaactgggagggatgccgagcttgctggaactactgggaccaagaagcggggtaccccacgcccctgcctgcactcctcgggggcgtggggcgtgccttgctccacccggactccctgggctgcgtcccacatccaccctcctgccccgtggggcaatttaacctttttcatgaaagttatttacaatgaaaagtttttaaaaataaaatttttaaaaatctaaaaaaaaaaaaaaaaaaaaaaaaaaaa

SEQ ID NO: 117885 - DNA, 2630 bp, Artificial Sequence
  derived and/or modified sequence
aggagaagcctttggagcggctacttaatgccggtcccggggccgcggtagctcagagaagcgccgtcgggcgggggggcggcaagaggcgctggcagggcccccgagctgggggcagagagccgcagggggtgggagcaacttcttccagaaccttcctctggcccgggctgcgctctgagccaggcaccacatacttattcggaggaggcgcccccggggtcgcgagatggaagcgcgcgtccgggaggccgtgtaacgggagctgcgggactcagcgggccagagagcgcggcgggccacccccggctcagcccgtggatgctgaccgccccctcggagagtccccgcagacatggcggagagctggctgcgcctctcgggagccgggccggcggaggaggccgggccggagggcggcctggaggagcccgacgccctggatgacagcctgaccagcctgcagtggctgcaggaattctccattctcaacgccaaggcccccgccctgcccccggggggcaccgacccccacggctaccaccaggtgccaggttcagcggcgcccgggtcccccctggcggccgaccccgcctgcctggggcagccacacacgccgggcaagcccacgtcgtcgtgcacgtcgcggagcgcgcccccggggctgcaggccccaccccccgacgacgtggactacgccaccaatccgcacgtgaagcctccctactcgtatgccacgctcatctgcatggccatgcaggccagcaaggccaccaagatcaccctgtcggccatctacaagtggatcacggacaacttctgctacttccgccacgcagatcccacctggcagaattcaatccgccacaacctgtctctgaacaagtgcttcatcaaagtgcctcgggagaaggacgaaccaggcaaggggggcttctggcgcattgacccccagtacgcggagcggctactgagcggcgctttcaagaagcggcgactgccccctgtccacatccacccagcctttgcccgccaggccgcgcaggagcccagcgctgtcccccgggccgggccgctgacggtgaataccgaggcccagcagctgctgcgggagttcgaggaggccaccggggaggcgggctggggtgcaggcgagggcaggctggggcataagcgcaaacagccgctgcccaagcgggtggccaaggtcccgcggccccccagcaccctgctgcccaccccggaggagcagggtgagctggaacccctcaaaggcaactttgactgggaggccatcttcgacgccggcactctgggcggggagctgggtgcactggaggccctggagctgagcccgcctctgagccccgcctcacacgtggacgtggacctcaccatccacggccgccacatcgactgccctgccacctgggggccttcggtggagcaggctgccgacagcctggacttcgatgagaccttcctggccacatccttcctgcagcacccctgggacgagagcggcagtggctgcctgcccccggagcccctctttgaggctggggatgccaccctggcctccgacctgcaggactgggccagcgtgggggccttcttgtaagaggccaggccctgccccacctctggacagtgcccaagtcagggtccagaactgccccccaacacaggtccacagacaccccaccacctaggcaggggctgggccagggctccaaggcttgccccagaggccacatggccaccagccccagctgccatcagattcaagcccaggaggctgaaaacgagggcccaggaccagaatcgctgcctcctctccccagccccaccttgtacacacagtgtttcattgctccgcgtcttcccagccccagaaaccggctaaaggaccctgcaccatgagagccgaggcctggaggagcccgggtcaggctggggaggaacagaactgggccctcccagagcacctccgcttcccccctgcttccccaggtctctatccagagagagtccccaggtacaacaaatgctaattagatgacagcaaattaaccccctggaggcttctcctggcagagcctccctggggccggggcaggctgtggatggggcggagcagggcagaagatggactgggggagggggcagagagaggagaccaaaatgaggtggtggcacagggtggggcaaggagatcctctctaaggcctctggggtctttgcctggccccatccctagggggcggggaggggacgtaaatccctaatctttaagcccgacttgaggctgagagcagctggaagtttgggtttggtggtttgggggccggggcagccaagctgtatggggcaggacagacagactaatgtagtgagtgtagctgtagctgaggcttaactgggagggatgccgagcttgctggaactactgggaccaagaagcggggtaccccacgcccctgcctgcactcctcgggggcgtggggcgtgccttgctccacccggactccctgggctgcgtcccacatccaccctcctgccccgtggggcaatttaacctttttcatgaaagttatttacaatgaaaagtttttaaaaataaaattttt

SEQ ID NO: 117886 - DNA, 1266 bp, Artificial Sequence
  derived and/or modified sequence
atggcagaaagttggctgcgcctgtctggggcggggccggcagaggaggctgggcctgagggtggcctggaggagcccgacgcgttagacgatagtctgacttctctacagtggctgcaagagttttctattctgaatgctaaggctcctgctttgcctcccggtggtaccgaccctcacggttatcatcaggttccggggtccgctgccccaggtagcccattagcggcggatccagcctgtctgggacaaccccacacccccgggaagcccacgtccagctgtactagtcgatctgcaccccccggccttcaggcgccccctccggacgacgtggactatgcaaccaatcctcacgtcaagccaccttacagctacgcaacactgatctgtatggccatgcaggcctctaaagctacaaagatcactctgagtgctatttacaaatggatcaccgataacttctgttacttccgacacgcagatcccacttggcagaattcaattcgccacaatctttccctcaacaaatgtttcatcaaggtgccacgggaaaaggatgagcctggtaagggcggcttctggaggatcgatccgcagtatgccgaacggctgctgagcggagccttcaagaaaagaaggctgccccccgtacacattcatcccgctttcgccagacaggcagcccaggaaccgtctgcggtcccacgggccgggccactgactgtgaacacggaagcccagcagctattacgcgaatttgaggaggcaacaggagaagcaggttggggagccggagaggggcgcctcggccacaaaaggaaacagcctctgcctaagagggtcgccaaggtgcctcggccaccatcaactcttctgcctacccccgaggagcaaggcgagctggagccactaaaaggaaactttgattgggaagctatcttcgacgctggcactctgggtggagagctgggggcacttgaggccctagaactgagccctcctctttctcctgcttcccatgtggatgtcgatctcacgattcacggccggcacatagactgccctgcgacatggggcccttctgtggaacaggcagccgacagcctagatttcgatgaaacctttttagcgacctcattcctccagcacccatgggacgagagcggatcaggatgtctccccccagagcctctgttcgaagccggtgacgccaccctggctagcgacctccaggactgggctagtgtgggtgctttcttgtag

SEQ ID NO: 117887 - DNA, 1266 bp, Artificial Sequence
  derived and/or modified sequence
atggccgagagctggctgcggctgtctggagctggccctgctgaggaggccggccctgagggcggcctggaggagccagatgccctggatgacagcctgaccagcctgcagtggctgcaggagttcagcatcctgaatgccaaggccccagccctgcccccaggcggcacagacccccacggctaccaccaggtgcccggcagcgctgcccctggcagccccctggccgctgaccctgcctgcctgggccagccccacacccctgggaagcccaccagcagctgcaccagccgcagcgcccctcctggcctgcaggcccctcctccagatgatgtggactatgccaccaacccccacgtgaagccaccctacagctatgccaccctcatctgcatggccatgcaggccagcaaggccaccaagatcaccctgagcgccatctacaagtggatcacagacaacttctgctacttcagacatgctgaccccacctggcagaacagcatccgccacaacctgagcctgaacaagtgcttcatcaaggtgccccgggagaaggatgagcctggaaaaggaggcttctggagaattgacccccagtatgcagagcggctgctgagcggggccttcaagaagaggcggctgccccctgtgcacatccacccagcctttgcccggcaggccgcccaggagcccagcgctgtgccccgggccggccccctgactgtgaacacagaggcccagcagctgctgcgggagtttgaggaggccaccggggaggccggctggggcgctggggagggccgcctgggccacaagaggaagcagcccctgcccaagagggtggccaaggtgccccggccccccagcaccctgctgcccaccccagaggagcagggcgagctggagcccctgaagggcaactttgactgggaggccatctttgatgctggcaccctgggcggggagctgggcgccctggaggccctggagctgagcccccccctgagccctgccagccacgtggatgtggacctgaccatccacggccgccacatcgactgcccagccacctggggccccagcgtggagcaggccgctgacagcctggactttgatgagaccttcctggccaccagcttcctgcagcacccctgggatgaaagtggcagcggctgcctgcccccagagcccctgtttgaggccggagatgccaccctggccagtgacctgcaggactgggcctctgtgggcgccttcctgtag

SEQ ID NO: 117888 - DNA, 1266 bp, Artificial Sequence
  derived and/or modified sequence
atggccgagagctggctgcggctgagcggcgccggccccgccgaggaagctggtcctgagggcgggctggaggaaccagacgcactggatgattcactgacaagccttcagtggctccaggagttctctattcttaacgccaaagccccagcactgccacctgggggtactgacccacacggataccaccaagtaccaggttccgccgcccccggaagcccgctggctgccgaccctgcttgcctcggtcagcctcacacacctggaaagccaaccagctcatgtacctctcgctccgccccccccggcctgcaggcaccacctcctgacgacgtggactatgcaactaatccccatgttaagccaccgtacagttacgcgacactgatttgtatggctatgcaagccagcaaggcgacgaagattacattaagtgctatttataaatggattactgacaacttctgctactttcggcatgcagacccaacctggcagaacagcatccgccataatctttccctgaataagtgcttcattaaagtacctcgcgagaaggacgagccagggaaaggcgggttctggaggattgatccccagtatgccgaacgactgctgagcggagcgtttaaaaaaagaaggctccccccagtccacatccaccccgctttcgctagacaggcagcccaggagccaagcgcggtgccacgtgcagggccgctgaccgtgaatacagaagcccagcagctcttgagggagttcgaggaggccaccggggaagctggctggggcgccggcgaggggcggctgggacacaaaaggaaacagcctctgccgaagagagttgccaaagtgccccggcctcccagcaccctcctacccacaccagaggagcagggcgagctcgagcctttgaagggcaactttgattgggaagccatcttcgatgccggaactttgggaggggagctcggtgcacttgaagccctcgaacttagtcctccactcagtccggcatctcacgtagacgtcgatttgacaattcacgggcggcatatcgattgtccagcaacgtggggtccctcggtcgaacaggcagccgacagtctcgacttcgatgagacattcctggccactagcttcctacaacacccatgggacgagtcaggctcgggctgtctacctcccgagcctctttttgaagcaggcgacgcaactcttgccagcgacttgcaagactgggcttcagtcggcgctttcttgtag

SEQ ID NO: 117889 - DNA, 1266 bp, Artificial Sequence
  derived and/or modified sequence
atggctgagtcctggctccgcctctccggagccggtcctgctgaggaagccggacctgaaggaggtctcgaagaaccagatgccctcgatgactccctgacgtctttacaatggctgcaggaattctcaatcctgaacgccaaggctcccgctttgccccctggcggaactgatccccacggttatcaccaagtgccgggatctgccgcacccggtagcccccttgccgctgacccggcatgcctaggtcagccccatacacctggtaaacctacatcgtcctgcacatcacgttctgccccaccaggcttgcaagcccctcctcccgacgatgttgattacgccacgaatcctcatgtgaagcccccttactcttacgccacactgatctgcatggccatgcaagctagtaaggcaacaaagatcacactctccgccatctacaaatggattacagacaacttttgctacttccgtcacgcggacccaacctggcagaacagcatccgacacaacctctctctgaacaagtgcttcataaaggtgccacgggaaaaagacgaaccaggtaagggtgggttctggaggatcgatcctcagtatgccgagcggctgctctccggagcattcaagaaaaggcgcctcccaccagtgcacattcaccctgcatttgctcggcaggccgcacaggaaccatctgcggtccccagagctggcccactgactgtgaacacggaggcccagcagctcctgcgtgaatttgaggaggccaccggggaggcgggatggggcgcaggcgaaggccgacttggccacaagaggaaacagccactgcccaaacgcgttgctaaagtccctagaccgccttctacgttattgcccacccctgaggagcagggggagttggagcctctgaaagggaacttcgactgggaggctatcttcgatgccggtacactaggtggggagctgggagctttggaagcattggaactctcaccgcctctttcccccgcttctcacgttgacgtagaccttacgatacacgggaggcacattgattgtcccgcaacttgggggccatcagtcgagcaggctgccgattccctcgatttcgatgaaacattcctggctacaagctttctgcagcacccatgggacgagtctggaagcggctgcctgccaccagagccgctctttgaggccggagacgccaccttggcatctgacctccaggattgggcttctgtaggagccttcttgtag

SEQ ID NO: 117890 - DNA, 1266 bp, Artificial Sequence
  derived and/or modified sequence
atggccgagagctggctgagactgagcggcgccggccccgccgaggaggccggccccgagggcggcctggaggagcccgacgccctggacgacagcctgaccagcctgcagtggctgcaggagttcagcatcctgaacgccaaggcccccgccctgccccccggcggcaccgacccccacggctaccaccaggtgcccggcagcgccgcccccggcagccccctggccgccgaccccgcctgcctgggccagccccacacccccggcaagcccaccagcagctgcaccagcagaagcgccccccccggcctgcaggcccccccccccgacgacgtggactacgccaccaacccccacgtgaagcccccctacagctacgccaccctgatctgcatggccatgcaggccagcaaggccaccaagatcaccctgagcgccatctacaagtggatcaccgacaacttctgctacttcagacacgccgaccccacctggcagaacagcatcagacacaacctgagcctgaacaagtgcttcatcaaggtgcccagagagaaggacgagcccggcaagggcggcttctggagaatcgacccccagtacgccgagagactgctgagcggcgccttcaagaagagaagactgccccccgtgcacatccaccccgccttcgccagacaggccgcccaggagcccagcgccgtgcccagagccggccccctgaccgtgaacaccgaggcccagcagctgctgagagagttcgaggaggccaccggcgaggccggctggggcgccggcgagggcagactgggccacaagagaaagcagcccctgcccaagagagtggccaaggtgcccagaccccccagcaccctgctgcccacccccgaggagcagggcgagctggagcccctgaagggcaacttcgactgggaggccatcttcgacgccggcaccctgggcggcgagctgggcgccctggaggccctggagctgagcccccccctgagccccgccagccacgtggacgtggacctgaccatccacggcagacacatcgactgccccgccacctggggccccagcgtggagcaggccgccgacagcctggacttcgacgagaccttcctggccaccagcttcctgcagcacccctgggacgagagcggcagcggctgcctgccccccgagcccctgttcgaggccggcgacgccaccctggccagcgacctgcaggactgggccagcgtgggcgccttcctgtag

SEQ ID NO: 117891 - protein, 2639 aa, Artificial Sequence
  derived and/or modified sequence
MSSSHSRAGQSAAGAAPGGGVDTRDAEMPATEKDLAEDAPWKKIQQNTFTRWCNEHLKCVSKRIANLQTDLSDGLRLIALLEVLSQKKMHRKHNQRPTFRQMQLENVSVALEFLDRESIKLVSIDSKAIVDGNLKLILGLIWTLILHYSISMPMWDEEEDEEAKKQTPKQRLLGWIQNKLPQLPITNFSRDWQSGRALGALVDSCAPGLCPDWDSWDASKPVTNAREAMQQADDWLGIPQVITPEEIVDPNVDEHSVMTYLSQFPKAKLKPGAPLRPKLNPKKARAYGPGIEPTGNMVKKRAEFTVETRSAGQGEVLVYVEDPAGHQEEAKVTANNDKNRTFSVWYVPEVTGTHKVTVLFAGQHIAKSPFEVYVDKSQGDASKVTAQGPGLEPSGNIANKTTYFEIFTAGAGTGEVEVVIQDPMGQKGTVEPQLEARGDSTYRCSYQPTMEGVHTVHVTFAGVPIPRSPYTVTVGQACNPSACRAVGRGLQPKGVRVKETADFKVYTKGAGSGELKVTVKGPKGEERVKQKDLGDGVYGFEYYPMVPGTYIVTITWGGQNIGRSPFEVKVGTECGNQKVRAWGPGLEGGVVGKSADFVVEAIGDDVGTLGFSVEGPSQAKIECDDKGDGSCDVRYWPQEAGEYAVHVLCNSEDIRLSPFMADIRDAPQDFHPDRVKARGPGLEKTGVAVNKPAEFTVDAKHGGKAPLRVQVQDNEGCPVEALVKDNGNGTYSCSYVPRKPVKHTAMVSWGGVSIPNSPFRVNVGAGSHPNKVKVYGPGVAKTGLKAHEPTYFTVDCAEAGQGDVSIGIKCAPGVVGPAEADIDFDIIRNDNDTFTVKYTPRGAGSYTIMVLFADQATPTSPIRVKVEPSHDASKVKAEGPGLSRTGVELGKPTHFTVNAKAAGKGKLDVQFSGLTKGDAVRDVDIIDHHDNTYTVKYTPVQQGPVGVNVTYGGDPIPKSPFSVAVSPSLDLSKIKVSGLGEKVDVGKDQEFTVKSKGAGGQGKVASKIVGPSGAAVPCKVEPGLGADNSVVRFLPREEGPYEVEVTYDGVPVPGSPFPLEAVAPTKPSKVKAFGPGLQGGSAGSPARFTIDTKGAGTGGLGLTVEGPCEAQLECLDNGDGTCSVSYVPTEPGDYNINILFADTHIPGSPFKAHVVPCFDASKVKCSGPGLERATAGEVGQFQVDCSSAGSAELTIEICSEAGLPAEVYIQDHGDGTHTITYIPLCPGAYTVTIKYGGQPVPNFPSKLQVEPAVDTSGVQCYGPGIEGQGVFREATTEFSVDARALTQTGGPHVKARVANPSGNLTETYVQDRGDGMYKVEYTPYEEGLHSVDVTYDGSPVPSSPFQVPVTEGCDPSRVRVHGPGIQSGTTNKPNKFTVETRGAGTGGLGLAVEGPSEAKMSCMDNKDGSCSVEYIPYEAGTYSLNVTYGGHQVPGSPFKVPVHDVTDASKVKCSGPGLSPGMVRANLPQSFQVDTSKAGVAPLQVKVQGPKGLVEPVDVVDNADGTQTVNYVPSREGPYSISVLYGDEEVPRSPFKVKVLPTHDASKVKASGPGLNTTGVPASLPVEFTIDAKDAGEGLLAVQITDPEGKPKKTHIQDNHDGTYTVAYVPDVTGRYTILIKYGGDEIPFSPYRVRAVPTGDASKCTVTGAGIGPTIQIGEETVITVDTKAAGKGKVTCTVCTPDGSEVDVDVVENEDGTFDIFYTAPQPGKYVICVRFGGEHVPNSPFQVTALAGDQPSVQPPLRSQQLAPQYTYAQGGQQTWAPERPLVGVNGLDVTSLRPFDLVIPFTIKKGEITGEVRMPSGKVAQPTITDNKDGTVTVRYAPSEAGLHEMDIRYDNMHIPGSPLQFYVDYVNCGHVTAYGPGLTHGVVNKPATFTVNTKDAGEGGLSLAIEGPSKAEISCTDNQDGTCSVSYLPVLPGDYSILVKYNEQHVPGSPFTARVTGDDSMRMSHLKVGSAADIPINISETDLSLLTATVVPPSGREEPCLLKRLRNGHVGISFVPKETGEHLVHVKKNGQHVASSPIPVVISQSEIGDASRVRVSGQGLHEGHTFEPAEFIIDTRDAGYGGLSLSIEGPSKVDINTEDLEDGTCRVTYCPTEPGNYIINIKFADQHVPGSPFSVKVTGEGRVKESITRRRRAPSVANVGSHCDLSLKIPEISIQDMTAQVTSPSGKTHEAEIVEGENHTYCIRFVPAEMGTHTVSVKYKGQHVPGSPFQFTVGPLGEGGAHKVRAGGPGLERAEAGVPAEFSIWTREAGAGGLAIAVEGPSKAEISFEDRKDGSCGVAYVVQEPGDYEVSVKFNEEHIPDSPFVVPVASPSGDARRLTVSSLQESGLKVNQPASFAVSLNGAKGAIDAKVHSPSGALEECYVTEIDQDKYAVRFIPRENGVYLIDVKFNGTHIPGSPFKIRVGEPGHGGDPGLVSAYGAGLEGGVTGNPAEFVVNTSNAGAGALSVTIDGPSKVKMDCQECPEGYRVTYTPMAPGSYLISIKYGGPYHIGGSPFKAKVTGPRLVSNHSLHETSSVFVDSLTKATCAPQHGAPGPGPADASKVVAKGLGLSKAYVGQKSSFTVDCSKAGNNMLLVGVHGPRTPCEEILVKHVGSRLYSVSYLLKDKGEYTLVVKWGDEHIPGSPYRVVVP

SEQ ID NO: 117892 - protein, 2315 aa, Artificial Sequence
  derived and/or modified sequence
MPATEKDLAEDAPWKKIQQNTFTRWCNEHLKCVSKRIANLQTDLSDGLRLIALLEVLSQKKMHRKHNQRPTFRQMQLENVSVALEFLDRESIKLVSIDSKAIVDGNLKLILGLIWTLILHYSISMPMWDEEEDEEAKKQTPKQRLLGWIQNKLPQLPITNFSRDWQSGRALGALVDSCAPGLCPDWDSWDASKPVTNAREAMQQADDWLGIPQVITPEEIVDPNVDEHSVMTYLSQFPKAKLKPGAPLRPKLNPKKARAYGPGIEPTGNMVKKRAEFTVETRSAGQGEVLVYVEDPAGHQEEAKVTANNDKNRTFSVWYVPEVTGTHKVTVLFAGQHIAKSPFEVYVDKSQGDASKVTAQGPGLEPSGNIANKTTYFEIFTAGAGTGEVEVVIQDPMGQKGTVEPQLEARGDSTYRCSYQPTMEGVHTVHVTFAGVPIPRSPYTVTVGQACNPSACRAVGRGLQPKGVRVKETADFKVYTKGAGSGELKVTVKGPKGEERVKQKDLGDGVYGFEYYPMVPGTYIVTITWGGQNIGRSPFEVKVGTECGNQKVRAWGPGLEGGVVGKSADFVVEAIGDDVGTLGFSVEGPSQAKIECDDKGDGSCDVRYWPQEAGEYAVHVLCNSEDIRLSPFMADIRDAPQDFHPDRVKARGPGLEKTGVAVNKPAEFTVDAKHGGKAPLRVQVQDNEGCPVEALVKDNGNGTYSCSYVPRKPVKHTAMVSWGGVSIPNSPFRVNVGAGSHPNKVKVYGPGVAKTGLKAHEPTYFTVDCAEAGQGDVSIGIKCAPGVVGPAEADIDFDIIRNDNDTFTVKYTPRGAGSYTIMVLFADQATPTSPIRVKVEPSHDASKVKAEGPGLSRTGVELGKPTHFTVNAKAAGKGKLDVQFSGLTKGDAVRDVDIIDHHDNTYTVKYTPVQQGPVGVNVTYGGDPIPKSPFSVAVSPSLDLSKIKVSGLGEKVDVGKDQEFTVKSKGAGGQGKVASKIVGPSGAAVPCKVEPGLGADNSVVRFLPREEGPYEVEVTYDGVPVPGSPFPLEAVAPTKPSKVKAFGPGLQGGSAGSPARFTIDTKGAGTGGLGLTVEGPCEAQLECLDNGDGTCSVSYVPTEPGDYNINILFADTHIPGSPFKAHVVPCFDASKVKCSGPGLERATAGEVGQFQVDCSSAGSAELTIEICSEAGLPAEVYIQDHGDGTHTITYIPLCPGAYTVTIKYGGQPVPNFPSKLQVEPAVDTSGVQCYGPGIEGQGVFREATTEFSVDARALTQTGGPHVKARVANPSGNLTETYVQDRGDGMYKVEYTPYEEGLHSVDVTYDGSPVPSSPFQVPVTEGCDPSRVRVHGPGIQSGTTNKPNKFTVETRGAGTGGLGLAVEGPSEAKMSCMDNKDGSCSVEYIPYEAGTYSLNVTYGGHQVPGSPFKVPVHDVTDASKVKCSGPGLSPGMVRANLPQSFQVDTSKAGVAPLQVKVQGPKGLVEPVDVVDNADGTQTVNYVPSREGPYSISVLYGDEEVPRSPFKVKVLPTHDASKVKASGPGLNTTGVPASLPVEFTIDAKDAGEGLLAVQITDPEGKPKKTHIQDNHDGTYTVAYVPDVTGRYTILIKYGGDEIPFSPYRVRAVPTGDASKCTVTVSIGGHGLGAGIGPTIQIGEETVITVDTKAAGKGKVTCTVCTPDGSEVDVDVVENEDGTFDIFYTAPQPGKYVICVRFGGEHVPNSPFQVTALAGDQPSVQPPLRSQQLAPQYTYAQGGQQTWAPERPLVGVNGLDVTSLRPFDLVIPFTIKKGEITGEVRMPSGKVAQPTITDNKDGTVTVRYAPSEAGLHEMDIRYDNMHIPGSPLQFYVDYVNCGHVTAYGPGLTHGVVNKPATFTVNTKDAGEGGLSLAIEGPSKAEISCTDNQDGTCSVSYLPVLPGDYSILVKYNEQHVPGSPFTARVTGDDSMRMSHLKVGSAADIPINISEISFEDRKDGSCGVAYVVQEPGDYEVSVKFNEEHIPDSPFVVPVASPSGDARRLTVSSLQESGLKVNQPASFAVSLNGAKGAIDAKVHSPSGALEECYVTEIDQDKYAVRFIPRENGVYLIDVKFNGTHIPGSPFKIRVGEPGHGGDPGLVSAYGAGLEGGVTGNPAEFVVNTSNAGAGALSVTIDGPSKVKMDCQECPEGYRVTYTPMAPGSYLISIKYGGPYHIGGSPFKAKVTGPRLVSNHSLHETSSVFVDSLTKATCAPQHGAPGPGPADASKVVAKGLGLSKAYVGQKSSFTVDCSKAGNNMLLVGVHGPRTPCEEILVKHVGSRLYSVSYLLKDKGEYTLVVKWGDEHIPGSPYRVVVP

SEQ ID NO: 117893 - DNA, 7920 bp, Artificial Sequence
  derived and/or modified sequence
atgagcagcagccacagcagagccggccagagcgccgccggcgccgcccccggcggcggcgtggacaccagagacgccgagatgcccgccaccgagaaggacctggccgaggacgccccctggaagaagatccagcagaacaccttcaccagatggtgcaacgagcacctgaagtgcgtgagcaagagaatcgccaacctgcagaccgacctgagcgacggcctgagactgatcgccctgctggaggtgctgagccagaagaagatgcacagaaagcacaaccagagacccaccttcagacagatgcagctggagaacgtgagcgtggccctggagttcctggacagagagagcatcaagctggtgagcatcgacagcaaggccatcgtggacggcaacctgaagctgatcctgggcctgatctggaccctgatcctgcactacagcatcagcatgcccatgtgggacgaggaggaggacgaggaggccaagaagcagacccccaagcagagactgctgggctggatccagaacaagctgccccagctgcccatcaccaacttcagcagagactggcagagcggcagagccctgggcgccctggtggacagctgcgcccccggcctgtgccccgactgggacagctgggacgccagcaagcccgtgaccaacgccagagaggccatgcagcaggccgacgactggctgggcatcccccaggtgatcacccccgaggagatcgtggaccccaacgtggacgagcacagcgtgatgacctacctgagccagttccccaaggccaagctgaagcccggcgcccccctgagacccaagctgaaccccaagaaggccagagcctacggccccggcatcgagcccaccggcaacatggtgaagaagagagccgagttcaccgtggagaccagaagcgccggccagggcgaggtgctggtgtacgtggaggaccccgccggccaccaggaggaggccaaggtgaccgccaacaacgacaagaacagaaccttcagcgtgtggtacgtgcccgaggtgaccggcacccacaaggtgaccgtgctgttcgccggccagcacatcgccaagagccccttcgaggtgtacgtggacaagagccagggcgacgccagcaaggtgaccgcccagggccccggcctggagcccagcggcaacatcgccaacaagaccacctacttcgagatcttcaccgccggcgccggcaccggcgaggtggaggtggtgatccaggaccccatgggccagaagggcaccgtggagccccagctggaggccagaggcgacagcacctacagatgcagctaccagcccaccatggagggcgtgcacaccgtgcacgtgaccttcgccggcgtgcccatccccagaagcccctacaccgtgaccgtgggccaggcctgcaaccccagcgcctgcagagccgtgggcagaggcctgcagcccaagggcgtgagagtgaaggagaccgccgacttcaaggtgtacaccaagggcgccggcagcggcgagctgaaggtgaccgtgaagggccccaagggcgaggagagagtgaagcagaaggacctgggcgacggcgtgtacggcttcgagtactaccccatggtgcccggcacctacatcgtgaccatcacctggggcggccagaacatcggcagaagccccttcgaggtgaaggtgggcaccgagtgcggcaaccagaaggtgagagcctggggccccggcctggagggcggcgtggtgggcaagagcgccgacttcgtggtggaggccatcggcgacgacgtgggcaccctgggcttcagcgtggagggccccagccaggccaagatcgagtgcgacgacaagggcgacggcagctgcgacgtgagatactggccccaggaggccggcgagtacgccgtgcacgtgctgtgcaacagcgaggacatcagactgagccccttcatggccgacatcagagacgccccccaggacttccaccccgacagagtgaaggccagaggccccggcctggagaagaccggcgtggccgtgaacaagcccgccgagttcaccgtggacgccaagcacggcggcaaggcccccctgagagtgcaggtgcaggacaacgagggctgccccgtggaggccctggtgaaggacaacggcaacggcacctacagctgcagctacgtgcccagaaagcccgtgaagcacaccgccatggtgagctggggcggcgtgagcatccccaacagccccttcagagtgaacgtgggcgccggcagccaccccaacaaggtgaaggtgtacggccccggcgtggccaagaccggcctgaaggcccacgagcccacctacttcaccgtggactgcgccgaggccggccagggcgacgtgagcatcggcatcaagtgcgcccccggcgtggtgggccccgccgaggccgacatcgacttcgacatcatcagaaacgacaacgacaccttcaccgtgaagtacacccccagaggcgccggcagctacaccatcatggtgctgttcgccgaccaggccacccccaccagccccatcagagtgaaggtggagcccagccacgacgccagcaaggtgaaggccgagggccccggcctgagcagaaccggcgtggagctgggcaagcccacccacttcaccgtgaacgccaaggccgccggcaagggcaagctggacgtgcagttcagcggcctgaccaagggcgacgccgtgagagacgtggacatcatcgaccaccacgacaacacctacaccgtgaagtacacccccgtgcagcagggccccgtgggcgtgaacgtgacctacggcggcgaccccatccccaagagccccttcagcgtggccgtgagccccagcctggacctgagcaagatcaaggtgagcggcctgggcgagaaggtggacgtgggcaaggaccaggagttcaccgtgaagagcaagggcgccggcggccagggcaaggtggccagcaagatcgtgggccccagcggcgccgccgtgccctgcaaggtggagcccggcctgggcgccgacaacagcgtggtgagattcctgcccagagaggagggcccctacgaggtggaggtgacctacgacggcgtgcccgtgcccggcagccccttccccctggaggccgtggcccccaccaagcccagcaaggtgaaggccttcggccccggcctgcagggcggcagcgccggcagccccgccagattcaccatcgacaccaagggcgccggcaccggcggcctgggcctgaccgtggagggcccctgcgaggcccagctggagtgcctggacaacggcgacggcacctgcagcgtgagctacgtgcccaccgagcccggcgactacaacatcaacatcctgttcgccgacacccacatccccggcagccccttcaaggcccacgtggtgccctgcttcgacgccagcaaggtgaagtgcagcggccccggcctggagagagccaccgccggcgaggtgggccagttccaggtggactgcagcagcgccggcagcgccgagctgaccatcgagatctgcagcgaggccggcctgcccgccgaggtgtacatccaggaccacggcgacggcacccacaccatcacctacatccccctgtgccccggcgcctacaccgtgaccatcaagtacggcggccagcccgtgcccaacttccccagcaagctgcaggtggagcccgccgtggacaccagcggcgtgcagtgctacggccccggcatcgagggccagggcgtgttcagagaggccaccaccgagttcagcgtggacgccagagccctgacccagaccggcggcccccacgtgaaggccagagtggccaaccccagcggcaacctgaccgagacctacgtgcaggacagaggcgacggcatgtacaaggtggagtacaccccctacgaggagggcctgcacagcgtggacgtgacctacgacggcagccccgtgcccagcagccccttccaggtgcccgtgaccgagggctgcgaccccagcagagtgagagtgcacggccccggcatccagagcggcaccaccaacaagcccaacaagttcaccgtggagaccagaggcgccggcaccggcggcctgggcctggccgtggagggccccagcgaggccaagatgagctgcatggacaacaaggacggcagctgcagcgtggagtacatcccctacgaggccggcacctacagcctgaacgtgacctacggcggccaccaggtgcccggcagccccttcaaggtgcccgtgcacgacgtgaccgacgccagcaaggtgaagtgcagcggccccggcctgagccccggcatggtgagagccaacctgccccagagcttccaggtggacaccagcaaggccggcgtggcccccctgcaggtgaaggtgcagggccccaagggcctggtggagcccgtggacgtggtggacaacgccgacggcacccagaccgtgaactacgtgcccagcagagagggcccctacagcatcagcgtgctgtacggcgacgaggaggtgcccagaagccccttcaaggtgaaggtgctgcccacccacgacgccagcaaggtgaaggccagcggccccggcctgaacaccaccggcgtgcccgccagcctgcccgtggagttcaccatcgacgccaaggacgccggcgagggcctgctggccgtgcagatcaccgaccccgagggcaagcccaagaagacccacatccaggacaaccacgacggcacctacaccgtggcctacgtgcccgacgtgaccggcagatacaccatcctgatcaagtacggcggcgacgagatccccttcagcccctacagagtgagagccgtgcccaccggcgacgccagcaagtgcaccgtgaccggcgccggcatcggccccaccatccagatcggcgaggagaccgtgatcaccgtggacaccaaggccgccggcaagggcaaggtgacctgcaccgtgtgcacccccgacggcagcgaggtggacgtggacgtggtggagaacgaggacggcaccttcgacatcttctacaccgccccccagcccggcaagtacgtgatctgcgtgagattcggcggcgagcacgtgcccaacagccccttccaggtgaccgccctggccggcgaccagcccagcgtgcagccccccctgagaagccagcagctggccccccagtacacctacgcccagggcggccagcagacctgggcccccgagagacccctggtgggcgtgaacggcctggacgtgaccagcctgagacccttcgacctggtgatccccttcaccatcaagaagggcgagatcaccggcgaggtgagaatgcccagcggcaaggtggcccagcccaccatcaccgacaacaaggacggcaccgtgaccgtgagatacgcccccagcgaggccggcctgcacgagatggacatcagatacgacaacatgcacatccccggcagccccctgcagttctacgtggactacgtgaactgcggccacgtgaccgcctacggccccggcctgacccacggcgtggtgaacaagcccgccaccttcaccgtgaacaccaaggacgccggcgagggcggcctgagcctggccatcgagggccccagcaaggccgagatcagctgcaccgacaaccaggacggcacctgcagcgtgagctacctgcccgtgctgcccggcgactacagcatcctggtgaagtacaacgagcagcacgtgcccggcagccccttcaccgccagagtgaccggcgacgacagcatgagaatgagccacctgaaggtgggcagcgccgccgacatccccatcaacatcagcgagaccgacctgagcctgctgaccgccaccgtggtgccccccagcggcagagaggagccctgcctgctgaagagactgagaaacggccacgtgggcatcagcttcgtgcccaaggagaccggcgagcacctggtgcacgtgaagaagaacggccagcacgtggccagcagccccatccccgtggtgatcagccagagcgagatcggcgacgccagcagagtgagagtgagcggccagggcctgcacgagggccacaccttcgagcccgccgagttcatcatcgacaccagagacgccggctacggcggcctgagcctgagcatcgagggccccagcaaggtggacatcaacaccgaggacctggaggacggcacctgcagagtgacctactgccccaccgagcccggcaactacatcatcaacatcaagttcgccgaccagcacgtgcccggcagccccttcagcgtgaaggtgaccggcgagggcagagtgaaggagagcatcaccagaagaagaagagcccccagcgtggccaacgtgggcagccactgcgacctgagcctgaagatccccgagatcagcatccaggacatgaccgcccaggtgaccagccccagcggcaagacccacgaggccgagatcgtggagggcgagaaccacacctactgcatcagattcgtgcccgccgagatgggcacccacaccgtgagcgtgaagtacaagggccagcacgtgcccggcagccccttccagttcaccgtgggccccctgggcgagggcggcgcccacaaggtgagagccggcggccccggcctggagagagccgaggccggcgtgcccgccgagttcagcatctggaccagagaggccggcgccggcggcctggccatcgccgtggagggccccagcaaggccgagatcagcttcgaggacagaaaggacggcagctgcggcgtggcctacgtggtgcaggagcccggcgactacgaggtgagcgtgaagttcaacgaggagcacatccccgacagccccttcgtggtgcccgtggccagccccagcggcgacgccagaagactgaccgtgagcagcctgcaggagagcggcctgaaggtgaaccagcccgccagcttcgccgtgagcctgaacggcgccaagggcgccatcgacgccaaggtgcacagccccagcggcgccctggaggagtgctacgtgaccgagatcgaccaggacaagtacgccgtgagattcatccccagagagaacggcgtgtacctgatcgacgtgaagttcaacggcacccacatccccggcagccccttcaagatcagagtgggcgagcccggccacggcggcgaccccggcctggtgagcgcctacggcgccggcctggagggcggcgtgaccggcaaccccgccgagttcgtggtgaacaccagcaacgccggcgccggcgccctgagcgtgaccatcgacggccccagcaaggtgaagatggactgccaggagtgccccgagggctacagagtgacctacacccccatggcccccggcagctacctgatcagcatcaagtacggcggcccctaccacatcggcggcagccccttcaaggccaaggtgaccggccccagactggtgagcaaccacagcctgcacgagaccagcagcgtgttcgtggacagcctgaccaaggccacctgcgccccccagcacggcgcccccggccccggccccgccgacgccagcaaggtggtggccaagggcctgggcctgagcaaggcctacgtgggccagaagagcagcttcaccgtggactgcagcaaggccggcaacaacatgctgctggtgggcgtgcacggccccagaaccccctgcgaggagatcctggtgaagcacgtgggcagcagactgtacagcgtgagctacctgctgaaggacaagggcgagtacaccctggtggtgaagtggggcgacgagcacatccccggcagcccctacagagtggtggtgccctag

SEQ ID NO: 117894 - DNA, 7920 bp, Artificial Sequence
  derived and/or modified sequence
atgtcctcttctcattcgcgcgccgggcagtctgccgccggagcagcgcccggggggggggttgatacccgcgacgccgagatgcccgcaactgagaaagatctagctgaggatgctccgtggaagaaaatccagcagaatacattcacgagatggtgtaatgaacatttaaagtgcgttagcaaaaggattgcaaatctccagacggacttaagtgatggcctccggctgatagccctactggaagtcctcagtcagaaaaaaatgcaccgcaaacataatcagagacccacattccggcagatgcaactggagaatgtgtccgtggctttggagtttctcgaccgtgaaagtatcaaattggtatctattgactcaaaagccattgtcgatggcaacttaaagctgatactgggactcatctggacactgatcctccactatagcatctcgatgccaatgtgggacgaggaggaagacgaggaggctaagaaacagactcctaagcaaagattgctcgggtggatccagaataaactgccccagctcccaatcactaacttctcgcgggactggcagagcgggcgagcattgggggcactggttgatagctgcgcgcccggactctgcccggattgggactcatgggatgcaagtaaaccagtcacgaatgcgagggaagcaatgcagcaggccgacgattggctgggcattcctcaggttattacacccgaggaaattgtagaccccaatgttgacgaacactcagtgatgacctatctgagtcagtttcccaaggccaaactgaaacctggcgccccattgaggcctaaactgaaccctaaaaaagcccgcgcttacggacctgggatcgaacccacaggtaacatggttaaaaagagggctgagttcaccgttgagacacggagcgctggccaaggggaagtcttagtctacgtggaggatccggctgggcaccaggaagaagctaaggtcacagccaacaatgataaaaaccggacgttttcggtgtggtatgtgccagaagtgacaggtacacacaaggtgactgtcttgttcgccggacaacacatagctaagagccctttcgaagtgtatgtggataaatcgcagggcgatgctagcaaggtcaccgcacagggcccaggtctcgagcccagtggaaatatagccaataaaaccacatatttcgaaatttttaccgccggcgcaggcaccggggaggtagaggtggtaatccaagatccaatgggacagaagggtactgtcgaaccgcagctagaggccaggggagattccacttataggtgctcctatcaaccgacgatggaaggcgttcatactgtgcatgtcacattcgcaggcgtcccaattccgagaagtccctacaccgtgacagttgggcaggcttgcaacccctctgcctgccgagcggtcggacggggcttacaacccaagggcgtccgcgtaaaggaaacagcagattttaaggtctacacaaaaggggctggatctggcgaactcaaagtcacagtgaaaggccctaaaggcgaggaaagagtgaagcaaaaagatctaggggatggtgtttatgggttcgaatattatccaatggttccgggaacctacattgtcaccatcacttggggagggcagaatatcgggaggtctccctttgaagtgaaggtcggaactgagtgtggaaatcaaaaggtccgcgcttgggggccaggactcgaagggggagtcgtgggaaaatctgccgatttcgtcgtggaagctataggtgacgatgtggggacactggggttctctgtagaaggtccgtcacaggccaagatagagtgtgacgacaaaggagacggatcttgtgatgtgcggtactggccacaagaagcaggagagtacgcggtgcacgtgttgtgtaattctgaggatatccggctgagtccattcatggccgatatccgcgatgcgcctcaagacttccacccagaccgtgtgaaagccagaggacccggccttgaaaagaccggcgtcgcagtgaacaagccagccgagttcactgtggatgctaaacacggtggaaaggcccccttgagggtgcaggtgcaggataatgagggctgccccgtggaggccctggtgaaagacaacggaaacggtacatactcctgcagctatgtgccccgcaagccagttaagcatacagccatggtgagttggggtggagtttctatcccaaacagcccttttcgagtgaacgtgggtgccggtagccaccccaataaagtcaaggtatacggacctggggtcgcaaaaaccggactcaaagctcatgagcctacatactttaccgtcgactgtgccgaggccggtcagggcgacgtttcgattggcataaagtgcgcccccggcgtggtagggcctgccgaggcagacatcgatttcgatataatccgcaacgacaacgacacatttaccgtaaagtatacacccagaggggctggctcatacaccattatggttcttttcgccgaccaggctactcccacatctcccatccgggtaaaagttgagccctcacacgatgcttctaaagtgaaggccgagggcccgggccttagcagaaccggagtggaattgggcaaacctacccacttcacagttaatgctaaagcggccggcaaaggaaagctggatgtgcagttcagcgggctcaccaagggcgacgccgtcagggacgtcgatatcattgaccaccacgataacacatacacggtcaagtacactcccgtacagcagggacccgtgggcgtgaacgttacctacgggggggaccccattcccaaatctcctttctctgtggctgtttcaccaagtctcgacttgtctaaaatcaaggtgagtggcttgggagagaaggtggacgtggggaaggatcaagaattcacagtgaaatcaaagggcgcaggcgggcaaggcaaggttgcttcaaagattgtcggccccagcggagcggctgtgccctgtaaggtcgaacccggcctcggtgcagacaacagcgtggtgcggttcctgcctcgtgaggaggggccctatgaggtcgaggtgacatacgatggggttcccgtgccaggcagtccgtttcctttagaggcagtggccccaactaaaccatcaaaagtcaaggcattcggacctggactgcaaggaggtagtgcaggcagcccagctagattcaccatcgatacgaaaggcgctggaaccggcggactcgggctgaccgtggagggaccctgcgaagcccaactggaatgcttagataacggggatgggacttgtagtgtcagctacgttcccacagagcctggggactataatatcaatatcctgtttgctgatacacacattcctggctctcccttcaaagctcacgttgttccctgctttgatgcaagcaaggtcaaatgctcggggccgggtctggagcgtgcaaccgccggcgaagtgggtcagtttcaagtggattgttcgagcgctggctctgccgagctgacaatagagatctgttcagaagccggactgcccgccgaagtctacatacaggaccatggagatgggacgcacaccattacatacatccccttatgcccaggggcctacacggtgactattaaatatggagggcaaccagtgcccaattttccctcgaaattgcaagtggagcctgccgttgatactagtggggtgcaatgttacggccccggcatagagggacaaggcgtatttcgtgaagccacaactgagtttagcgtggacgctcgcgccctgacacagaccggcgggcctcatgttaaagctcgagtagccaacccttccggtaatctgactgagacttacgtccaggacaggggcgacggtatgtataaggtagagtacacgccatacgaggaaggactccactcagtcgatgtgacctacgacgggtccccggtccctagctccccttttcaggttccagtgaccgagggctgcgatccgagccgagtcagggtacacggccccggcattcagtcgggaacaacgaacaagcctaacaaattcacagtagagactcgcggggccggaacaggtggactgggactggctgtcgagggcccttccgaggctaaaatgagctgcatggataataaggacggttcctgctctgtggaatatatcccctacgaagctggcacctactccctgaacgtgacttacggggggcatcaggtgccaggatctccattcaaggtaccggtccatgatgttaccgacgccagcaaagttaaatgttccggtccaggcctgtcacctgggatggtgagagccaacttaccccagagctttcaggtcgatactagtaaggctggcgtggcacccctccaggtgaaggtacaggggcctaaagggcttgttgaaccagtagatgtggtcgacaatgccgacgggacccagaccgtgaactatgttccatcgcgcgaagggccatattcaatttcggtgttgtatggcgatgaggaagttcctcgcagtccattcaaggtcaaagttctgcctacccacgacgcttctaaggtcaaggctagcggtccaggcctgaacacgacaggcgtccccgcaagcctgccagtcgagtttaccatagacgcaaaagatgctggggagggactactggcagttcagatcacggatcccgaaggtaagccaaagaagacacacattcaagataatcatgacgggacctacaccgtggcatatgtccccgatgtgacggggagatatacaatcctaatcaaatacggcggcgacgagattccattctccccgtaccgagtgcgggctgtgcctaccggtgacgctagtaagtgtacggtcaccggcgccggaattggacccacaattcagatcggcgaagagactgtgataacagtcgatactaaggccgccggtaaagggaaggtgacttgcaccgtgtgcacaccagacggctcagaagtggatgtggacgtggtggagaatgaagatggcacctttgacatcttctacaccgcaccacagccagggaagtacgtgatctgcgtgagattcgggggagaacatgtgcctaattcccccttccaggtcactgctttggccggcgatcagccctctgtccaacccccacttcgtagccagcagctggccccccagtacacatatgcccagggggggcagcagacatgggctcccgagaggcctctggtgggcgtcaatggcctggacgtcactagcctgcgcccgtttgacttagtgatcccattcacgattaagaaaggggaaattaccggtgaggtccggatgccctcgggcaaagtcgctcaacctaccattactgataacaaagacggaaccgtcacagtaagatacgccccctccgaagcaggtctgcacgagatggacatccgctatgacaatatgcacatcccaggctccccccttcagttctacgtggactacgtgaactgcggccacgtcaccgcttacggtccaggactgacacacggcgtggttaataagcctgccacttttacagttaatacaaaagacgccggtgaaggaggactgagcctggccatcgaaggaccatctaaagccgagatttcttgtacagacaaccaggatggaacctgcagtgtgagctatcttccggtgctcccgggcgattactctattctcgtgaagtacaacgagcagcacgtcccaggctcacccttcactgcacgcgtgaccggtgatgattccatgagaatgagtcacttaaaagttggctccgccgcagatattcccattaacatttcggagactgacttaagtctgctgactgccacagtagtgcccccgagtggccgagaagaaccgtgcctgctgaagcgtttgcgcaacggccatgtgggaatctcgtttgtcccaaaagagacaggcgagcacctggtgcacgtcaagaaaaatgggcagcacgtcgcttcaagcccaatcccggttgtgatttcccaaagcgaaatcggtgacgcctcccgagtgcgcgtttcaggacaggggctgcacgaaggccacacttttgaaccagcagaattcatcatcgacacacgtgacgctggctatggcggcttgagcctctcgattgagggacccagtaaggtcgatattaatacggaggacctggaagatggtacctgtcgcgtgacatactgcccgacagagcctgggaactatatcattaacatcaagttcgctgaccagcatgttcccgggtcaccattttccgtgaaagtgaccggcgaaggcagagtaaaggaatcaattactcggcgacgtagagcaccgtccgtggcaaatgtaggctcccactgtgatctgagcctaaaaatcccagagatttcgattcaagacatgaccgcccaggtgacatcaccctctggcaaaacacatgaagcggaaatcgttgagggcgagaaccacacatactgcatccggttcgtcccggccgaaatgggcacacacaccgtctcagtaaagtacaaagggcagcatgtcccaggctccccttttcagtttacagtgggtccgcttggggagggaggggcccataaagtgagagcggggggaccgggactggaaagagccgaggctggggttcctgcagaattcagcatctggacacgtgaagcgggcgccggaggactggccattgccgttgagggccctagtaaagccgagatctcgttcgaggataggaaggacggcagctgcggggtcgcctacgtcgttcaagagccaggagattatgaggtctcagtgaagttcaacgaagaacacatccctgacagtccatttgtcgtccctgtcgccagcccctcaggggatgcacgtcgccttacagtgtcttcccttcaggaatcaggcctgaaagtgaatcagcccgcctccttcgctgtgtccttaaacggcgctaaaggcgcaattgatgccaaggtgcacagcccaagcggagcattggaggaatgttacgttacagagattgatcaggataaatatgcagtgaggtttataccaagagagaacggggtatacttgattgatgtgaaatttaacgggacgcatattccaggaagcccctttaagatccgcgtgggcgaacctggccacggcggagaccctggattagtgtctgcatacggagctggcttggaggggggggttaccgggaacccagccgagtttgtggtcaatacaagtaacgctggggctggggccttgagtgtgacaatagacggaccatcgaaggttaagatggattgccaggagtgtcctgagggctatagggttacttacacacccatggcccccggaagctacctaatctccatcaagtatggtggaccctaccatataggcggcagcccttttaaggcaaaggtgacaggaccacgcctggttagcaatcactcactgcacgagacatctagtgtgttcgtggactcactaactaaagctacctgtgcccctcagcacggcgctccaggccctggcccggcagacgcttctaaggtggttgccaaagggctgggactgagtaaagcatatgtcggtcagaaatccagttttacagtcgactgctctaaggctggaaataatatgctgttagtcggagtgcacggaccacggaccccatgtgaggagatcttagtgaaacacgtgggatctcgtctgtacagcgtgagctatctcctgaaggacaaaggagagtacacacttgtcgtaaaatggggcgacgagcatattcccggctctccctacagagtggtggttccttag

SEQ ID NO: 117895 - DNA, 8486 bp, Artificial Sequence
  derived and/or modified sequence
attcgcgtggaggcgcgtcgcgcgcagcggacgccgacagaatccccgaggcgcctggcgcgggcgcgggcgcgaaggcgatccgggcgccaccccgcggtcatcggtcaccggtcgctctcaggaacagcagcgcaacctctgctccctgcctcgcctcccgcgcgcctaggtgcctgcgactttaattaaagggccgtcccctcgccgaggctgcagcaccgcccccccggcttctcgcgcctcaaaatgagtagctcccactctcgggcgggccagagcgcagcaggcgcggctccgggcggcggcgtcgacacgcgggacgccgagatgccggccaccgagaaggacctggcggaggacgcgccgtggaagaagatccagcagaacactttcacgcgctggtgcaacgagcacctgaagtgcgtgagcaagcgcatcgccaacctgcagacggacctgagcgacgggctgcggcttatcgcgctgttggaggtgctcagccagaagaagatgcaccgcaagcacaaccagcggcccactttccgccaaatgcagcttgagaacgtgtcggtggcgctcgagttcctggaccgcgagagcatcaaactggtgtccatcgacagcaaggccatcgtggacgggaacctgaagctgatcctgggcctcatctggaccctgatcctgcactactccatctccatgcccatgtgggacgaggaggaggatgaggaggccaagaagcagacccccaagcagaggctcctgggctggatccagaacaagctgccgcagctgcccatcaccaacttcagccgggactggcagagcggccgggccctgggcgccctggtggacagctgtgccccgggcctgtgtcctgactgggactcttgggacgccagcaagcccgttaccaatgcgcgagaggccatgcagcaggcggatgactggctgggcatcccccaggtgatcacccccgaggagattgtggaccccaacgtggacgagcactctgtcatgacctacctgtcccagttccccaaggccaagctgaagccaggggctcccttgcggcccaaactgaacccgaagaaagcccgtgcctacgggccaggcatcgagcccacaggcaacatggtgaagaagcgggcagagttcactgtggagaccagaagtgctggccagggagaggtgctggtgtacgtggaggacccggccggacaccaggaggaggcaaaagtgaccgccaataacgacaagaaccgcaccttctccgtctggtacgtccccgaggtgacggggactcataaggttactgtgctctttgctggccagcacatcgccaagagccccttcgaggtgtacgtggataagtcacagggtgacgccagcaaagtgacagcccaaggtcccggcctggagcccagtggcaacatcgccaacaagaccacctactttgagatctttacggcaggagctggcacgggcgaggtcgaggttgtgatccaggaccccatgggacagaagggcacggtagagcctcagctggaggcccggggcgacagcacataccgctgcagctaccagcccaccatggagggcgtccacaccgtgcacgtcacgtttgccggcgtgcccatccctcgcagcccctacactgtcactgttggccaagcctgtaacccgagtgcctgccgggcggttggccggggcctccagcccaagggtgtgcgggtgaaggagacagctgacttcaaggtgtacacaaagggcgctggcagtggggagctgaaggtcaccgtgaagggccccaagggagaggagcgcgtgaagcagaaggacctgggggatggcgtgtatggcttcgagtattaccccatggtccctggaacctatatcgtcaccatcacgtggggtggtcagaacatcgggcgcagtcccttcgaagtgaaggtgggcaccgagtgtggcaatcagaaggtacgggcctggggccctgggctggagggcggcgtcgttggcaagtcagcagactttgtggtggaggctatcggggacgacgtgggcacgctgggcttctcggtggaagggccatcgcaggctaagatcgaatgtgacgacaagggcgacggctcctgtgatgtgcgctactggccgcaggaggctggcgagtatgccgttcacgtgctgtgcaacagcgaagacatccgcctcagccccttcatggctgacatccgtgacgcgccccaggacttccacccagacagggtgaaggcacgtgggcctggattggagaagacaggtgtggccgtcaacaagccagcagagttcacagtggatgccaagcacggtggcaaggccccacttcgggtccaagtccaggacaatgaaggctgccctgtggaggcgttggtcaaggacaacggcaatggcacttacagctgctcctacgtgcccaggaagccggtgaagcacacagccatggtgtcctggggaggcgtcagcatccccaacagccccttcagggtgaatgtgggagctggcagccaccccaacaaggtcaaagtatacggccccggagtagccaagacagggctcaaggcccacgagcccacctacttcactgtggactgcgccgaggctggccagggggacgtcagcatcggcatcaagtgtgcccctggagtggtaggccccgccgaagctgacatcgacttcgacatcatccgcaatgacaatgacaccttcacggtcaagtacacgccccggggggctggcagctacaccattatggtcctctttgctgaccaggccacgcccaccagccccatccgagtcaaggtggagccctctcatgacgccagtaaggtgaaggccgagggccctggcctcagtcgcactggtgtcgagcttggcaagcccacccacttcacagtaaatgccaaagctgctggcaaaggcaagctggacgtccagttctcaggactcaccaagggggatgcagtgcgagatgtggacatcatcgaccaccatgacaacacctacacagtcaagtacacgcctgtccagcagggtccagtaggcgtcaatgtcacttatggaggggatcccatccctaagagccctttctcagtggcagtatctccaagcctggacctcagcaagatcaaggtgtctggcctgggagagaaggtggacgttggcaaagaccaggagttcacagtcaaatcaaagggtgctggtggtcaaggcaaagtggcatccaagattgtgggcccctcgggtgcagcggtgccctgcaaggtggagccaggcctgggggctgacaacagtgtggtgcgcttcctgccccgtgaggaagggccctatgaggtggaggtgacctatgacggcgtgcccgtgcctggcagcccctttcctctggaagctgtggcccccaccaagcctagcaaggtgaaggcgtttgggccggggctgcagggaggcagtgcgggctcccccgcccgcttcaccatcgacaccaagggcgccggcacaggtggcctgggcctgacggtggagggcccctgtgaggcgcagctcgagtgcttggacaatggggatggcacatgttccgtgtcctacgtgcccaccgagcccggggactacaacatcaacatcctcttcgctgacacccacatccctggctccccattcaaggcccacgtggttccctgctttgacgcatccaaagtcaagtgctcaggccccgggctggagcgggccaccgctggggaggtgggccaattccaagtggactgctcgagcgcgggcagcgcggagctgaccattgagatctgctcggaggcggggcttccggccgaggtgtacatccaggaccacggtgatggcacgcacaccattacctacattcccctctgccccggggcctacaccgtcaccatcaagtacggcggccagcccgtgcccaacttccccagcaagctgcaggtggaacctgcggtggacacttccggtgtccagtgctatgggcctggtattgagggccagggtgtcttccgtgaggccaccactgagttcagtgtggacgcccgggctctgacacagaccggagggccgcacgtcaaggcccgtgtggccaacccctcaggcaacctgacggagacctacgttcaggaccgtggcgatggcatgtacaaagtggagtacacgccttacgaggagggactgcactccgtggacgtgacctatgacggcagtcccgtgcccagcagccccttccaggtgcccgtgaccgagggctgcgacccctcccgggtgcgtgtccacgggccaggcatccaaagtggcaccaccaacaagcccaacaagttcactgtggagaccaggggagctggcacgggcggcctgggcctggctgtagagggcccctccgaggccaagatgtcctgcatggataacaaggacggcagctgctcggtcgagtacatcccttatgaggctggcacctacagcctcaacgtcacctatggtggccatcaagtgccaggcagtcctttcaaggtccctgtgcatgatgtgacagatgcgtccaaggtcaagtgctctgggcccggcctgagcccaggcatggttcgtgccaacctccctcagtccttccaggtggacacaagcaaggctggtgtggccccattgcaggtcaaagtgcaagggcccaaaggcctggtggagccagtggacgtggtagacaacgctgatggcacccagaccgtcaattatgtgcccagccgagaagggccctacagcatctcagtactgtatggagatgaagaggtaccccggagccccttcaaggtcaaggtgctgcctactcatgatgccagcaaggtgaaggccagtggccccgggctcaacaccactggcgtgcctgccagcctgcccgtggagttcaccatcgatgcaaaggacgccggggagggcctgctggctgtccagatcacggatcccgaaggcaagccgaagaagacacacatccaagacaaccatgacggcacgtatacagtggcctacgtgccagacgtgacaggtcgctacaccatcctcatcaagtacggtggtgacgagatccccttctccccgtaccgcgtgcgtgccgtgcccaccggggacgccagcaagtgcactgtcacaggtgctggcatcggccccaccattcagattggggaggagacggtgatcactgtggacactaaggcggcaggcaaaggcaaagtgacgtgcaccgtgtgcacgcctgatggctcagaggtggatgtggacgtggtggagaatgaggacggcactttcgacatcttctacacggccccccagccgggcaaatacgtcatctgtgtgcgctttggtggcgagcacgtgcccaacagccccttccaagtgacggctctggctggggaccagccctcggtgcagccccctctacggtctcagcagctggccccacagtacacctacgcccagggcggccagcagacttgggccccggagaggcccctggtgggtgtcaatgggctggatgtgaccagcctgaggccctttgaccttgtcatccccttcaccatcaagaagggcgagatcacaggggaggttcggatgccctcaggcaaggtggcgcagcccaccatcactgacaacaaagacggcaccgtgaccgtgcggtatgcacccagcgaggctggcctgcacgagatggacatccgctatgacaacatgcacatcccaggaagccccttgcagttctatgtggattacgtcaactgtggccatgtcactgcctatgggcctggcctcacccatggagtagtgaacaagcctgccaccttcaccgtcaacaccaaggatgcaggagaggggggcctgtctctggccattgagggcccgtccaaagcagaaatcagctgcactgacaaccaggatgggacatgcagcgtgtcctacctgcctgtgctgccgggggactacagcattctagtcaagtacaatgaacagcacgtcccaggcagccccttcactgctcgggtcacaggtgacgactccatgcgtatgtcccacctaaaggtcggctctgctgccgacatccccatcaacatctcagagacggatctcagcctgctgacggccactgtggtcccgccctcgggccgggaggagccctgtttgctgaagcggctgcgtaatggccacgtggggatttcattcgtgcccaaggagacgggggagcacctggtgcatgtgaagaaaaatggccagcacgtggccagcagccccatcccggtggtgatcagccagtcggaaattggggatgccagtcgtgttcgggtctctggtcagggccttcacgaaggccacacctttgagcctgcagagtttatcattgatacccgcgatgcaggctatggtgggctcagcctgtccattgagggccccagcaaggtggacatcaacacagaggacctggaggacgggacgtgcagggtcacctactgccccacagagccaggcaactacatcatcaacatcaagtttgccgaccagcacgtgcctggcagccccttctctgtgaaggtgacaggcgagggccgggtgaaagagagcatcacccgcaggcgtcgggctccttcagtggccaacgttggtagtcattgtgacctcagcctgaaaatccctgaaattagcatccaggatatgacagcccaggtgaccagcccatcgggcaagacccatgaggccgagatcgtggaaggggagaaccacacctactgcatccgctttgttcccgctgagatgggcacacacacagtcagcgtgaagtacaagggccagcacgtgcctgggagccccttccagttcaccgtggggcccctaggggaagggggagcccacaaggtccgagctgggggccctggcctggagagagctgaagctggagtgccagccgaattcagtatctggacccgggaagctggtgctggaggcctggccattgctgtcgagggccccagcaaggctgagatctcttttgaggaccgcaaggacggctcctgtggtgtggcttatgtggtccaggagccaggtgactacgaagtctcagtcaagttcaacgaggaacacattcccgacagccccttcgtggtgcctgtggcttctccgtctggcgacgcccgccgcctcactgtttctagccttcaggagtcagggctaaaggtcaaccagccagcctcttttgcagtcagcctgaacggggccaagggggcgatcgatgccaaggtgcacagcccctcaggagccctggaggagtgctatgtcacagaaattgaccaagataagtatgctgtgcgcttcatccctcgggagaatggcgtttacctgattgacgtcaagttcaacggcacccacatccctggaagccccttcaagatccgagttggggagcctgggcatggaggggacccaggcttggtgtctgcttacggagcaggtctggaaggcggtgtcacagggaacccagctgagttcgtcgtgaacacgagcaatgcgggagctggtgccctgtcggtgaccattgacggcccctccaaggtgaagatggattgccaggagtgccctgagggctaccgcgtcacctatacccccatggcacctggcagctacctcatctccatcaagtacggcggcccctaccacattgggggcagccccttcaaggccaaagtcacaggcccccgtctcgtcagcaaccacagcctccacgagacatcatcagtgtttgtagactctctgaccaaggccacctgtgccccccagcatggggccccgggtcctgggcctgctgacgccagcaaggtggtggccaagggcctggggctgagcaaggcctacgtaggccagaagagcagcttcacagtagactgcagcaaagcaggcaacaacatgctgctggtgggggttcatggcccaaggaccccctgcgaggagatcctggtgaagcacgtgggcagccggctctacagcgtgtcctacctgctcaaggacaagggggagtacacactggtggtcaaatggggggacgagcacatcccaggcagcccctaccgcgttgtggtgccctgagtctggggcccgtgccagccggcagcccccaagcctgccccgctacccaagcagccccgccctcttcccctcaaccccggcccaggccgccctggccgcccgcctgtcactgcagccgcccctgccctgtgccgtgctgcgctcacctgcctccccagccagccgctgacctctcggctttcacttgggcagagggagccatttggtggcgctgcttgtcttctttggttctgggaggggtgagggatgggggtcctgtacacaaccacccactagttctcttctccagccaagaggaataaagttttgcttccatt

SEQ ID NO: 117896 - DNA, 7920 bp, Artificial Sequence
  derived and/or modified sequence
atgagcagcagccacagccgggccggccagagcgctgctggagctgcccctgggggcggcgtggacaccagagatgctgagatgcctgccacagagaaggacctggctgaagatgccccctggaagaagatccagcagaacaccttcacccgctggtgcaatgagcacctgaagtgtgtgtccaagagaattgccaacctgcagacagacctgagtgatggcctgcggctcatcgccctgctggaggtgctgagccagaagaagatgcacaggaagcacaaccagaggcccaccttccggcagatgcagctggagaatgtgtctgtggccctggagttcctggaccgggagagcatcaagctggtgtccattgacagcaaggccatcgtggatggcaacctgaagctgatcctgggcctcatctggaccctcatcctgcactacagcatctccatgcccatgtgggatgaggaggaggatgaggaggccaagaagcagacccccaagcagaggctgctgggctggatccagaacaagctgccccagctgcccatcaccaacttcagccgggactggcagagcggccgggccctgggcgccctggtggacagctgtgcccctggcctgtgcccagactgggacagctgggatgccagcaagcctgtgaccaatgcccgggaggccatgcagcaggctgatgactggctgggcatcccccaggtgatcaccccagaggagatcgtggaccccaacgtggatgagcacagcgtgatgacctacctgagccagttccccaaggccaagctgaagccaggggcccccctgcggcccaagctgaaccccaagaaggcccgggcctacggccctggcatcgagcccaccggcaacatggtgaagaagagagctgagttcaccgtggagaccaggtctgctggccagggcgaggtgctggtgtatgtggaggaccctgctggccaccaggaggaggccaaggtgacagccaacaatgacaagaacagaaccttctctgtgtggtacgtgcctgaggtgacaggcacccacaaggtgacagtgctgtttgctggccagcacatcgccaagagcccctttgaggtgtatgtggacaagagccagggagatgccagcaaggtgacagcccagggccctggcctggagcccagcggcaacatcgccaacaagaccacctactttgagatcttcaccgctggagctggcactggagaggtggaggtggtgatccaggaccccatgggccagaagggcaccgtggagccccagctggaggcccggggggacagcacctaccgctgcagctaccagcccaccatggagggcgtgcacacagtgcacgtgacctttgctggggtgcccatccccaggagcccctacacagtgacagtgggccaggcctgcaaccccagcgcctgcagagctgtgggccggggcctgcagcccaagggcgtgcgggtgaaggagacagctgacttcaaggtgtacaccaagggggccggcagcggggagctgaaggtgacagtgaagggccccaagggggaggagcgggtgaagcagaaggacctgggagatggagtgtatggctttgagtactaccccatggtgcccggcacctacatcgtgaccatcacctggggcggccagaacatcggccgcagcccctttgaggtgaaggtgggcacagaatgtggcaaccagaaggtgcgggcctggggccctggcctggagggcggcgtggtgggcaagtctgctgactttgtggtggaggccatcggagatgatgtgggcaccctgggcttctctgtggagggccccagccaggccaagattgaatgtgatgacaagggagatggcagctgtgatgtgcgctactggccccaggaggccggggagtatgctgtgcacgtgctgtgcaacagcgaggacatccggctgagccccttcatggctgacatcagagatgccccccaggacttccacccagacagagtgaaggcccggggccctggcctggagaagacaggagtggccgtgaacaagccagctgagttcaccgtggatgccaagcatggaggcaaggcccccctgcgggtgcaggtgcaggacaatgaaggctgccctgtggaggccctggtgaaggacaatggaaatggcacctacagctgcagctatgtgcccaggaagcctgtgaagcacacagccatggtgtcctggggcggcgtgtccatccccaacagccccttccgggtgaatgtgggcgccggcagccaccccaacaaggtgaaggtgtatggccctggggtggccaagacaggcctgaaggcccacgagcccacctacttcaccgtggactgtgccgaggccggccagggagatgtgtccatcggcatcaagtgtgcccctggggtggtgggccctgctgaggccgacatcgactttgacatcatcagaaatgacaatgacaccttcaccgtgaagtacaccccaagaggagctggcagctacaccatcatggtgctgtttgctgaccaggccacccccaccagccccatccgggtgaaggtggagcccagccatgatgccagcaaggtgaaggccgagggccctggcctgagcaggactggagtggagctgggcaagcccacccacttcaccgtgaatgccaaggccgccggcaagggcaagctggatgtgcagttcagcggcctgaccaagggagatgctgtgagagatgtggacatcatcgaccaccacgacaacacctacacagtgaagtacacccctgtgcagcagggccctgtgggcgtgaatgtgacctatggaggagaccccatccccaagagccccttctctgtggccgtgagccccagcctggacctgagcaagatcaaggtgtctggcctgggggagaaggtggatgtgggcaaggaccaggagttcaccgtgaagagcaagggggccggcggccagggcaaggtggccagcaagatcgtgggccccagcggggctgctgtgccctgcaaggtggagcccggcctgggcgctgacaacagcgtggtgcgcttcctgccccgggaggagggcccctatgaggtggaggtgacctatgatggagtgcctgtgcccggcagccccttccccctggaggccgtggcccccaccaagcccagcaaggtgaaggcctttggacctggcctgcagggcggcagcgctggcagccctgcccgcttcaccatcgacaccaagggagctggcactggaggcctgggcctgactgtggagggcccctgtgaggcccagctggagtgcctggacaatggagatggcacctgcagcgtgtcctatgtgcccacagagcccggggactacaacatcaacatcctgtttgctgacacccacatccctggcagccccttcaaggcccacgtggtgccctgctttgatgccagcaaggtgaagtgcagcggccctggcctggagcgggccacagctggggaggtgggccagttccaggtggactgcagcagcgctggcagcgctgagctgaccatcgagatctgcagcgaggccggcctgcctgctgaggtgtacatccaggaccatggagatggcacccacaccatcacctacatccccctgtgccctggggcctacacagtgaccatcaagtatggaggccagcctgtgcccaacttccccagcaagctgcaggtggagcctgctgtggacaccagcggcgtgcagtgctacggccctggcatcgagggccagggcgtcttccgggaggccaccacagagttctctgtggatgcccgggccctgacccagacaggaggcccccacgtgaaggcccgggtggccaaccccagcggcaacctgacagagacctacgtgcaggacagaggagatggcatgtacaaggtggagtacaccccctatgaggagggcctgcacagcgtggatgtgacctatgatggcagccctgtgcccagcagccccttccaggtgcctgtgacagagggctgtgaccccagccgggtgcgggtgcacggccctggcatccagagcggcaccaccaacaagcccaacaagttcaccgtggagaccagaggagctggcactggaggcctgggcctggccgtggagggccccagcgaggccaagatgagctgcatggacaacaaggatggcagctgcagcgtggagtacatcccctatgaagctggcacctacagcctgaatgtgacctacggcggccaccaggtgcccggcagccccttcaaggtgcctgtgcatgatgtgacagatgccagcaaggtgaagtgcagcggccctggcctgagccctggcatggtgcgggccaacctgccccagagcttccaggtggacaccagcaaggccggcgtggcccccctgcaggtgaaggtgcagggccccaagggcctggtggagcctgtggatgtggtggacaatgctgatggcacccagacagtgaactacgtgcccagccgggagggcccctacagcatctctgtgctgtatggagatgaggaggtgcccaggagccccttcaaggtgaaggtgctgcccacccatgatgccagcaaggtgaaggccagcggccctggcctgaacaccaccggggtgcctgccagcctgcctgtggagttcaccattgatgccaaggatgctggggagggcctgctggccgtgcagatcacagatcctgagggcaagcccaagaagacccacatccaggacaaccatgatggcacctacacagtggcctacgtgcctgatgtgacaggccgctacaccatcctgatcaagtatggaggagatgagatccccttcagcccctacagagtgcgggctgtgcccactggagatgccagcaagtgcaccgtgactggagctggcatcggccccaccatccagatcggggaggagaccgtcatcaccgtggacaccaaggctgctgggaagggcaaggtgacctgcaccgtgtgcaccccagatggcagcgaggtggatgtggatgtggtggagaatgaagatggcacctttgacatcttctacacagccccccagcccgggaagtatgtgatctgtgtgcgctttggaggagagcacgtgcccaacagccccttccaggtgacagccctggccggggaccagcccagcgtgcagccccccctgcggagccagcagctggccccccagtacacctacgcccagggcggccagcagacctgggcccctgagcggcccctggtgggcgtgaatggcctggatgtgaccagcctgcggccctttgacctggtgatccccttcaccatcaagaagggggagatcactggagaggtgaggatgcccagcggcaaggtggcccagcccaccatcacagacaacaaggatggcaccgtgacagtgcgctatgcccccagcgaggccggcctgcacgagatggacatccgctatgacaacatgcacatccctggcagccccctgcagttctacgtggactatgtgaactgtggccacgtgacagcctacggccctggcctgacccatggagtggtgaacaagccagccaccttcaccgtgaacaccaaggatgctggggagggcggcctgagcctggccatcgagggccccagcaaggccgagatcagctgcacagacaaccaggacggcacctgcagcgtgtcctacctgcctgtgctgcccggggactacagcatcctggtgaagtacaatgagcagcacgtgcccggcagccccttcaccgcccgggtgactggagatgacagcatgaggatgagccacctgaaggtgggcagcgctgctgacatccccatcaacatcagcgagacagacctgagcctgctgacagccaccgtggtgcccccatctggccgggaggagccctgcctgctgaagaggctgagaaatggccacgtgggcatcagctttgtgcccaaggagaccggggagcacctggtgcacgtgaagaagaatggccagcacgtggccagcagccccatccctgtggtgatcagccagagcgagattggagatgccagccgggtgcgggtgtctggccagggcctgcacgagggccacacctttgagcctgctgagttcatcatcgacaccagagatgctggctatggaggcctgagcctgagcattgagggccccagcaaggtggacatcaacacagaggacctggaggatggcacctgccgggtgacctactgccccacagagcccggcaactacatcatcaacatcaagtttgctgaccagcacgtgcccggcagccccttctctgtgaaggtgactggagagggccgggtgaaggagagcatcaccaggagaagaagagcccccagcgtggccaacgtgggcagccactgtgacctgagcctgaagatccctgagatcagcatccaggacatgacagcccaggtgaccagccccagcggcaagacccatgaggccgagatcgtggagggggagaaccacacctactgcatccgctttgtgcctgctgagatgggcacccacacagtgtctgtgaagtacaagggccagcacgtgcccggcagccccttccagttcaccgtgggccccctgggggagggcggggcccacaaggtgcgggccggcggccctggcctggagagagctgaggccggcgtgcctgctgagttcagcatctggacccgggaggccggggccggcggcctggccatcgctgtggagggccccagcaaggccgagatcagctttgaggacaggaaggatggcagctgtggggtggcctacgtggtgcaggagcccggggactatgaggtgtctgtgaagttcaatgaggagcacatcccagacagcccctttgtggtgcctgtggccagccccagcggagatgcccggcggctgactgtgagcagcctgcaggagagcggcctgaaggtgaaccagcctgccagctttgctgtgtccctgaatggagccaagggggccattgatgccaaggtgcacagccccagcggggccctggaggagtgctacgtgacagaaattgaccaggacaagtatgctgtgcgcttcatcccccgggagaatggagtgtacctgattgatgtgaagttcaacggcacccacatccctggcagccccttcaagatccgggtgggggagcccggccatggaggagaccccggcctggtgtctgcctatggagctggcctggagggcggcgtgacaggcaacccagctgagtttgtggtgaacaccagcaatgctggggccggggccctgtctgtgaccattgatggccccagcaaggtgaagatggactgccaggagtgcccagagggctacagagtgacctacacccccatggcccctggcagctacctgatcagcatcaagtatggaggcccctaccacatcggcggcagccccttcaaggccaaggtgacaggcccccggctggtgagcaaccacagcctgcacgagaccagctctgtgtttgtggacagcctgaccaaggccacctgtgccccccagcacggggcccctggccctggccctgcagatgccagcaaggtggtggccaagggcctgggcctgagcaaggcctacgtgggccagaagagcagcttcaccgtggactgcagcaaggccggcaacaacatgctgctggtgggcgtgcacggccccaggaccccctgtgaggagatcctggtgaagcacgtgggcagccggctgtacagcgtgtcctacctgctgaaggacaagggggagtacaccctggtggtgaagtggggagatgagcacatccctggcagcccctacagagtggtggtgccctag

SEQ ID NO: 117897 - DNA, 7920 bp, Artificial Sequence
  derived and/or modified sequence
atgagcagcagccacagccgggccggccagagcgccgccggcgccgctcctgggggcggggtcgacacacgtgatgcggaaatgccagccaccgaaaaagacctggctgaagacgccccatggaagaaaatccaacagaacactttcactcgttggtgtaacgagcaccttaagtgcgtgtctaagcggatcgcaaatttgcagacggacttaagcgatggactgcgcttgatcgcattactggaagtcctgagtcaaaagaagatgcatcgaaaacataatcagagaccaacatttagacagatgcagctggaaaatgtgtcagttgccctcgagttcctcgacagggagagcataaagctggtgagcatcgatagcaaagccatcgtggatggtaacctgaaactgattcttggtttgatctggactctgattctacactactcaatttccatgccgatgtgggacgaggaggaagacgaggaagcgaaaaagcaaacgccaaaacagcggctgcttggatggatacagaataaactgccccaattgcccatcaccaattttagtagagattggcagtcggggcgcgctctgggggccctggtggactcttgtgcccccggcctttgcccggattgggactcctgggatgcaagtaagccggttaccaacgctagagaggcaatgcagcaggccgacgattggctgggcattcctcaggtgatcactccagaggaaatcgtggatcccaatgtcgatgagcatagtgtcatgacatacctctcacagttccccaaggctaagctcaagcctggagccccactgcgaccaaagctcaatcccaagaaagctcgggcttacggtcccggcatcgagccaacaggcaacatggtcaagaaacgggccgaattcaccgtggagacaaggagtgcaggtcagggcgaggtgctggtctacgttgaggatcccgccggacatcaggaagaagcgaaggtcactgcaaataacgataagaaccggaccttcagcgtgtggtacgtcccggaggttaccggaacgcacaaagtgacagtattgttcgcgggacaacacattgctaagtccccattcgaggtgtatgtggacaaaagccagggcgacgcttctaaggtgacagctcaaggccctggcctcgagccaagcgggaatatcgccaataagacaacctactttgaaatcttcacagctggtgcagggaccggggaggtggaggtggtgatccaggacccaatgggccagaaaggtacggtcgagccacagcttgaagctcggggagactcaacataccgatgctcctaccagcccacaatggaaggagtgcatactgtgcatgtaactttcgcgggtgttcccatccctaggtcaccctataccgttaccgtaggccaggcttgcaacccatcagcgtgcagggctgtagggcgggggcttcagccaaagggcgtccgcgtgaaagagaccgccgactttaaagtgtataccaaaggagccgggtccggcgagcttaaggtcacagttaaaggcccaaaaggcgaggagcgcgtgaagcagaaggacctgggtgatggggtatacggcttcgagtattaccccatggttccagggacttatattgttactatcacatggggcgggcagaatatcggtcgatctccattcgaagtcaaggtcgggactgagtgtggaaaccagaaagttagagcctgggggccaggacttgagggcggggtggtggggaagagtgcagacttcgtcgtcgaagccatcggagatgacgtggggaccttaggatttagcgtggagggaccctctcaagccaaaatcgagtgcgatgacaagggagatggcagctgtgatgtaaggtattggccgcaagaagcgggcgagtacgccgttcatgtactgtgtaactcagaggacattaggttgtctccctttatggccgacatccgcgatgccccccaggacttccatccggaccgtgtgaaggccaggggcccaggcctggaaaagactggagttgccgtgaacaagccagccgaattcactgtagatgctaagcacggcgggaaggcgcccctaagagtccaggttcaggataatgagggctgcccagtagaggccctagttaaagataacggaaacggcacatacagctgttcatatgtgcccagaaagccagtaaaacatacggctatggtgagttgggggggcgtgtcgatccctaattccccgttcagggttaatgtcggggccgggtcccatcccaataaggtcaaggtgtacggacctggcgtggccaagacaggcctgaaggctcacgaacctacgtatttcacggtggactgtgctgaagcagggcaaggcgacgtgagtattggcatcaagtgtgcgcccggcgtggtaggacctgccgaggccgacatcgattttgacatcattagaaacgataacgataccttcactgtgaaatatactcctaggggcgccggatcctacacaataatggtgctgttcgccgatcaggccacacccacttctcctatcagggtgaaagtagagcccagccatgacgctagcaaggtgaaagctgagggacccggcttaagccgtaccggggtcgagcttggcaagcccacccactttactgttaacgctaaggcagcagggaagggcaaacttgacgtgcaattcagcggtttgactaaaggtgacgccgtgagggacgtggatattattgatcaccatgataatacctacacagtaaaatacacccccgtgcagcagggaccagtgggcgtcaacgtgacttacgggggagaccccatccccaaaagccccttctccgttgcagtgtcaccatcccttgacctctccaagatcaaggtgagcggactgggtgagaaagtggatgtaggaaaagaccaagagtttacggttaaaagcaagggtgcagggggccagggaaaagtggccagcaagatcgttggcccatccggagccgcagttccctgcaaggtggagccagggctgggcgctgataactctgtagtgaggttcctcccacgcgaagagggtccttacgaagttgaagtcacatacgacggcgtacccgtgccaggcagtccattccctctcgaagccgtggcccccaccaaaccttctaaagtgaaggcttttggaccaggactgcagggtggcagtgcgggctctccagctagatttaccatagatacgaaaggggcaggtacaggtggactgggcctcacagtggagggtccttgcgaggctcagctggaatgtctggacaatggggatggaacctgttctgtatcatacgttcccaccgagcccggggattacaatattaatatcttgtttgcggatacccatattccagggtcccctttcaaggcacacgtagtgccttgcttcgacgcctctaaggtaaaatgtagcggccccgggctcgaacgcgcgactgcaggggaggtggggcagtttcaggtagactgctctagcgcaggatcagcagaacttacaatcgagatctgttcggaggcaggtctgccggccgaggtctacatccaagaccacggagatggaacccacactattacatatatcccgttgtgcccaggcgcctacaccgtcacgataaaatatggcggacagcctgttcccaattttccgagtaaactgcaggtggagcctgccgtggacaccagcggggttcaatgttatggacctgggatcgaggggcaaggggtattccgcgaggcaaccactgagtttagcgtagatgctcgggcattgacccagacagggggtccccatgtgaaagccagagtcgccaatcccagcggcaacctcaccgaaacatatgtgcaagataggggtgatggtatgtataaggtcgagtacaccccatacgaggaagggttacattccgtagacgtcacttacgacggaagccctgtgccctcctctccgttccaggtgcccgtgaccgaaggatgtgacccttcccgagttcgggtgcatggccccggtattcagtctggcaccactaacaaacccaacaaatttactgtcgaaaccagaggagcaggcacgggcggactggggcttgcggtcgagggaccctcggaagccaaaatgtcctgcatggataataaagacggaagctgttctgtagaatacattccatacgaagccggtacttacagcctgaacgtgacttacgggggtcatcaggttcccggctccccctttaaggttcccgtgcacgacgtcaccgacgcctctaaagtaaaatgtagcggcccaggcttgtccccgggaatggtgcgagcaaatctgccccagtcttttcaggtggatacatctaaagctggggtggctcccctgcaggtgaaggtacagggccccaaaggcttggtcgagcctgtcgatgtggtagataacgccgacggaacacaaaccgtgaattatgtgccatcccgggagggcccatacagtatatcagtgttatatggcgatgaggaagtccctagatctccgttcaaagtcaaagtacttccaactcacgacgcttctaaggttaaggcctctggacccggcctgaacaccacaggtgtgccagcatcccttcccgttgaattcacaatcgacgctaaagacgcaggagaggggttgctggcggtgcagataactgatcctgaggggaaaccgaagaagacccacattcaggataaccacgatggcacatacactgttgcctatgtcccagacgtcacggggcggtataccatcctcattaagtacgggggggacgagatcccattttccccttatagagtcagagcggtgccgacaggagatgccagtaagtgcacagtgactggcgcaggcataggcccaacgattcaaattggtgaggaaactgtgatcactgtcgataccaaggcagccggtaagggtaaggtaacttgcaccgtgtgcactcccgacggctccgaggtcgacgtggatgtggttgaaaatgaagacgggacatttgacatcttctacacagcaccccagccgggcaagtacgttatttgcgtgcgctttggcggagaacacgttcccaattccccttttcaggtaaccgcattggctggggaccaaccaagcgtacaaccacccctgcgttcacagcagctcgcgcctcagtacacatacgcacagggcggccagcagacatgggcgccagaaagacccctcgtgggtgtaaacggtctggatgtgacctcactacggcccttcgacctggtgataccttttactatcaagaagggcgaaattactggcgaggtgcggatgccatccggaaaagtagcgcagccaacgataaccgacaacaaggatggtactgtgactgtgaggtatgccccatccgaggcaggactgcacgagatggatatcagatatgacaacatgcacatccctgggagtcccctgcaattctatgtcgattacgtcaactgcggacatgttactgcctacgggcccggcctgactcatggcgttgtgaacaagcctgctacatttaccgtaaatacaaaggacgcgggagagggcgggctctccctcgcaatcgaaggaccctcaaaagccgaaatatcctgtaccgacaatcaagacggcacatgctcggtgtcttacctgcccgtcttgcctggggactacagtatacttgtgaagtacaacgagcagcacgtgcccggatctcccttcaccgctagggttaccggggacgacagcatgcgcatgtctcatctcaaggtcggaagtgccgcggatatacctattaacatttctgagacagacttatcactgctcaccgcgactgttgtacccccctcggggcgggaagagccttgtcttctgaaacgactccgcaatggccacgtcggtatttcttttgtgccaaaagagaccggcgagcaccttgtacacgttaaaaaaaatgggcagcatgtagcctcctctcctattcctgttgtaattagccagtcagagatcggtgatgcatcccgcgtccgggtgtccggacagggactacacgaaggccatacatttgagccagccgagtttattattgacacaagagacgcagggtacggaggcctgagcctctctatagaagggcctagtaaggttgatataaacacagaagatctggaggatggaacgtgccgggtgacatattgtcctacggagccgggaaactacatcattaacattaagttcgccgaccaacatgtgccaggttccccattcagtgtcaaagtaactggggagggcagagtaaaggagtccatcacgagacgccgaagagccccctctgtggctaatgtgggctcccactgcgacctgtctctaaagattcccgaaatcagcatacaggacatgaccgcacaagtgaccagtccaagcgggaaaacccatgaagcagaaatcgtcgaaggtgaaaatcacacctattgtattaggtttgtcccagcagaaatgggtacacatactgtgagtgttaaatataaaggacagcacgttccaggttccccatttcagttcaccgtgggaccactcggtgagggtggcgcccacaaggtgcgggccggagggcccgggctagaacgcgccgaggccggggtcccagccgagttctcgatctggacccgggaggccggcgctggggggctcgcaattgccgtggaaggcccatcgaaggctgagatcagctttgaagatcgcaaagacggtagctgcggagtggcttatgtcgtgcaggagccaggagattatgaggtgtccgtgaaattcaacgaagaacacatccccgattcccctttcgtggtccctgtggcttccccgagtggggatgcacgccggctaacggtgtctagcctgcaagagtctggactgaaagtcaatcagcctgcttcttttgctgttagtctgaatggggcaaaaggtgccattgacgcaaaagtacatagtccaagcggcgccttagaggagtgttatgtcacggagattgatcaggacaagtacgccgtgcgatttatacccagggagaacggagtgtatctgatcgatgtaaaattcaacggaactcacattcccggtagtccgttcaagattagggtcggcgagccgggacacggtggagatcccggtcttgtaagcgcttatggcgcaggattggagggtggtgtcaccggtaacccagccgaatttgtcgtcaacacatctaacgccggtgcaggcgccctgtccgtcacaatcgacggtccatccaaagtcaaaatggactgccaggaatgccccgagggatacagagttacttacaccccgatggcaccaggttcctacctcatcagcataaaatatggaggtccatatcacattggcggctcaccattcaaggcgaaagtcactggacctagactggtgtcaaaccatagccttcacgaaaccagctctgtgtttgtcgattcgctgactaaagctacatgcgctccacagcatggtgcacccggccctggccccgccgacgcctctaaagtcgtcgccaagggcttggggctgtctaaggcatacgtgggccagaagtctagttttacagtcgattgctctaaagccggaaacaatatgctgctcgtaggtgtccacggaccccgcacaccatgtgaagaaattctggtgaagcatgtggggtcccggctgtatagtgtgtcttatttattgaaagacaagggcgagtataccctggtggtgaaatggggggacgaacacatcccaggcagcccttatcgggtggtcgtgccctag

SEQ ID NO: 117898 - DNA, 7919 bp, Artificial Sequence
  derived and/or modified sequence
atgtcaagcagtcatagcagagccggacaaagcgctgcaggcgctgcgcctgggggtggggttgatacaagggatgctgaaatgcctgctacagaaaaagacctcgcagaagacgccccatggaagaagatccaacagaacacattcacccgttggtgtaatgagcacctcaagtgtgtcagcaaacgtattgctaacctgcagactgacttgtccgacggcctgcgactcattgctctcctcgaagtcctttcccagaagaaaatgcatagaaaacataaccagaggccgacattccggcagatgcaactggagaacgtttcagtggcactggagtttctggaccgcgaaagtatcaagctggtgagcatagattctaaggcaatagtcgacggcaacctcaaattgatactgggtttaatctggactctgatactccactactccatttctatgccaatgtgggacgaggaggaggatgaggaagcaaagaagcagacacccaagcagcgattgctggggtggattcagaataagctgccacagctgcctattacaaactttagtagagactggcaaagcggtagagctttgggcgcactggttgactcctgcgcccctggactctgtcccgactgggatagttgggacgctagcaagcctgtgactaacgcacgtgaggccatgcaacaggccgatgactggctggggatcccccaggtaattaccccagaagagatcgtggacccaaacgtcgatgaacactctgtgatgacatacttatctcaatttcccaaagctaagctgaaacctggagcccctctgcgccctaagctgaatcccaagaaggccagagcctatggaccgggaatcgaacctaccggcaacatggttaaaaaaagagccgaatttactgttgaaacccggagtgccggacagggggaggtgctggtgtatgtggaagatcctgccggtcaccaagaagaagccaaggtcactgcaaacaatgataaaaacaggacgttttccgtctggtacgtgcctgaggtgacgggcacacacaaagtgaccgttctgtttgccggacagcacatcgccaaatcccctttcgaggtttacgtggataaaagccagggagatgcctccaaggtgaccgcccagggacctggcttggagccttcaggtaatattgctaataagaccacttacttcgagatcttcaccgccggagcagggactggagaggtggaggtggtgattcaggatcctatgggacaaaagggtacagtagagccgcagctcgaagccaggggcgattcgacctatcgctgctcctatcaaccaacaatggagggtgttcataccgtgcacgtgacatttgctggcgtgccgattcccagaagcccttacacagtcacagtgggccaagcttgcaacccatccgcctgtcgagcagtcgggaggggactgcagccaaaaggcgtgcgggtgaaggagaccgctgacttcaaggtttatactaaaggggctggctctggggaactcaaagtgacagtcaaagggcctaagggggaagaaagggtgaagcagaaggatctgggcgatggcgtctatggattcgagtactatcccatggttcctgggacctacatcgtcaccatcacctggggcggtcagaatattggacgctcccccttcgaggtgaaggtaggaactgagtgcgggaatcagaaggttagagcctgggggccaggcctcgaagggggtgtcgtaggcaaatcagctgactttgtggtagaggctatcggcgacgatgttgggacccttggattttctgttgaaggtccctcccaggccaaaattgagtgcgatgataaaggtgacggttcttgtgatgtccgatattggcctcaggaggctggcgagtatgccgtgcacgtcctttgcaattctgaggatatccgactctcaccatttatggctgatatccgcgatgccccacaggacttccatcctgatcgggtgaaggcgaggggacccggtctagaaaagactggggtggccgtgaacaagcctgccgagtttaccgtcgacgcgaagcatggtggcaaggctccactgagggtgcaggtccaggataacgaaggctgtcccgtcgaggccctggtgaaggacaatggcaacgggacttatagttgctcctacgttcccagaaaaccggtgaagcatacagcaatggttagctggggaggcgtgagcataccgaactctccattccgggttaacgtcggggctggcagccaccccaacaaagtaaaggtgtatggtccgggagtcgcaaagactgggttaaaggcccatgagccaacctatttcactgtggattgtgccgaggcaggccaaggagatgtctcaatcggcataaaatgcgctcccggtgtggtcggacctgccgaggcggacatcgacttcgacatcatcagaaatgacaatgacacctttaccgtcaagtatacacctcggggagccggatcctacactattatggtccttttcgcagaccaggccactccaaccagcccaatacgggtgaaagtggagcccagtcatgatgcttcaaaggtgaaagctgaggggccaggattgtcccggaccggagtagaactgggtaagcccacgcacttcaccgtcaatgcaaaagccgcaggaaagggtaagttggatgtccagtttagcggcctaactaaaggggacgctgtgcgggacgtggacatcatcgaccatcacgacaacacctacaccgtgaaatacaccccagtccagcaggggccagtcggcgtgaacgtcacgtacggcggagaccctatccccaaatcccccttctctgtggccgtgtcacccagtcttgacctgtcaaagattaaggtctcgggtctgggcgaaaaagtggacgtggggaaggaccaggagttcactgtcaagtcgaaaggggcagggggacagggcaaagtggcatccaaaatagtggggccaagcggggcagcagtcccctgcaaggttgagcctggcctgggagccgacaatagtgtcgtgcgcttcctgccccgagaggagggcccttacgaggtggaagtgacatatgatggtgtgcctgtccccggtagcccattcccactggaggcggtcgccccaaccaaacccagtaaggtgaaagcatttggtccaggactgcaggggggttcagctggatcccccgctaggttcactatcgacaccaaaggggcaggcacgggaggcctgggactgacagtggagggcccatgtgaagcacagttggaatgcctggataacggcgatgggacatgctcggtgtcctatgtaccaactgaaccgggagattacaatatcaacatccttttcgccgatacacatatacctggtagccctttcaaggcccatgtcgtgccctgctttgacgcttccaaggtaaagtgctccggcccaggtctcgaacgagctactgccggagaagttggtcagttccaggttgattgctcatcggctggatcggccgagttgactatcgagatctgtagcgaagcagggctgcccgcagaagtttacatccaggaccacggcgacgggacccatactattacctatattcccctgtgccctggggcatacactgtgaccattaaatacggagggcagcctgtccctaactttccatctaagctccaggtggagcctgctgtggataccagcggagtccagtgttacgggccaggaattgagggccaaggcgtcttccgagaagccacgacagagtttagtgtggacgctcgggctcttacacagactggtggccctcacgtgaaggccagggtggccaaccctagcgggaatctcaccgagacctacgtgcaggatcgaggggatggcatgtataaagtggaatataccccttacgaagaaggcctccatagcgtggacgtaacttatgacggcagtccggtgccctcctccccattccaagtgccggtcacagaagggtgcgaccccagtcgggtccgtgtccacgggcctgggatccagagcggaacgacaaacaaacctaacaagtttacagtcgaaacaaggggcgcaggaaccggcggtctgggacttgctgttgagggcccatctgaggccaaaatgtcttgcatggacaacaaagatgggagctgctcggtggagtacatcccctacgaggccggaacttactctctcaatgtaacctatggaggccatcaagtccctggaagccccttcaaggtgcctgtacacgatgtgactgacgcttctaaggtaaagtgctcagggcctggtctctcaccaggcatggtccgggcaaaccttccgcagtcattccaggtcgacacaagcaaggcaggagtcgccccactacaagttaaagtgcaggggcctaagggactggtggagcctgttgatgtagtcgataatgccgatggaacgcagacagtaaactatgtgccctctcgggaaggaccttactccatcagcgtgctttacggtgacgaggaggttccgcgatctccgtttaaggtcaaggtgctgccaacccacgacgcctccaaagtcaaagcaagcggaccgggtctaaataccactggagtgcctgcttccttgccagtggagttcacgattgatgctaaagatgccggagaagggctgctcgctgtccagatcactgacccggaagggaaaccaaagaaaactcatattcaggacaatcacgacggcacctacaccgtagcttacgtccctgatgtcaccggcagatacactattctcattaaatatggaggagatgaaattccatttagtccttaccgggtgagagccgtccccaccggagacgcctctaaatgtacggtcactggagccggtataggtcccaccatccagatcggtgaggaaaccgtgataacagtcgataccaaggccgctgggaagggaaaggtgacctgtactgtctgtacccctgatgggtcagaagtggatgtggatgttgtggaaaatgaagatggtaccttcgatatcttctataccgccccacagcctgggaagtatgttatctgcgttaggttcggcggagagcatgtgccaaatagtccgttccaggtcacagctttggcaggggaccagccttcagtgcagccgccactaaggtcccaacaactcgccccacagtatacttatgcccagggcggacagcaaacatgggcccctgaaaggccgcttgtgggcgtgaacggattggatgtaacaagcctgagaccattcgacctcgtgattccattcaccatcaagaaaggggagattactggagaagtgagaatgccttcagggaaagtcgctcagccgacaatcaccgacaacaaagatggcaccgtcacagttaggtacgccccatctgaggctggcttgcatgaaatggatatccggtacgacaacatgcatattcccggtagtcctctgcagttctacgtcgactatgtgaattgcggacacgtgacggcttatgggccaggtcttacacacggtgtggtcaacaaacccgctacattcactgtaaatacaaaagacgctggggaagggggtctgtcactggctatagagggcccttcaaaagccgagatcagctgtacagataaccaggatgggacctgcagtgtgagctatctgccagttctgcccggagactattccatccttgttaaatataacgaacaacatgtgcccggaagcccattcactgctcgcgttacgggagatgactctatgagaatgtctcaccttaaggtcggttccgccgcagatattcccataaacatttcagaaacagatctgtcccttctcacagccaccgtagttccaccatccggccgtgaagaaccatgcctgctcaaacgtcttcggaatggtcatgttggcattagctttgtgcccaaggaaactggcgagcacctcgttcacgtcaaaaaaaacggacagcacgtcgctagcagccccatacccgtagtcatctcacagagcgaaattggagatgccagccgggtgagggtaagcggacagggactgcacgaaggccacacctttgaacccgctgaattcataatcgacacccgggacgcaggctacggcggactcagccttagcattgagggcccatcaaaggtggatattaacaccgaggacctggaggatgggacatgccgtgttacttactgcccaacagagcctggtaattacattatcaacatcaagtttgcagaccagcacgtgcccggatcacctttttcggtgaaggtcactggggaaggcagagtaaaggaaagcatcaccaggcgtcggagagcccctagcgtcgccaacgtgggctcccactgtgatctctctctgaagattccagaaatcagtatccaggatatgacagcccaggtgacaagtcctagtggtaaaacccatgaggccgagatcgtggagggggagaaccatacctattgcatccgcttcgtcccagcggagatgggcacacacaccgtgtccgtcaaatataagggacaacatgttcccggaagtcccttccagtttacggtggggccactgggtgaagggggagcccataaggtgagagctgggggtcccggactggagagagcagaagctggggtgccagccgaattctccatctggacgcgtgaagccggtgctggaggacttgcaatagctgtggaaggcccaagcaaggccgagatcagctttgaagataggaaagacggatcctgtggggtcgcatacgtggttcaagaaccaggtgactacgaggtgtctgtcaagttcaatgaagaacacattcccgattctccattcgtagtgcccgtggcgagtccatctggggatgcacgtcgcctgacagtgtcctcactgcaggagtccggcctgaaggtaaatcaacccgcttcatttgccgtctctctaaatggagccaaaggcgcaatagatgccaaggtacattcgccctctggcgcactcgaagagtgctacgtgacggagattgatcaggacaagtatgccgtccgctttatccctagagaaaacggggtgtaccttatcgatgtgaaatttaatggtacgcacataccaggtagtccgttcaagatacgggtaggcgagccagggcatggcggtgaccccggtctcgtgagtgcctacggggctggattggagggaggcgtcactggtaatccagctgagttcgtggtcaatacctctaacgctggggctggtgctctttcagtcacaatcgatggccctagcaaggttaagatggattgccaggagtgccccgagggttaccgagtaacatacacccccatggcccctggctcatatttgatctctattaagtacggcggtccctaccatattgggggaagtcctttcaaggccaaggttacaggccctaggctcgtttccaatcactccttgcatgagacaagctcagtttttgttgattcactgacgaaagccacctgtgccccacagcatggagctcctggccctggcccagccgatgcatccaaggtggttgcaaaaggacttggactgtccaaagcctacgttggtcagaagagttcttttaccgtggactgcagcaaggccggaaacaatatgttgctggtaggcgtgcacggaccacgcaccccctgtgaggagatcctcgtcaaacacgtggggagccgcctctattcagtttcctacttactgaaggataagggggagtacacgctagtcgtgaaatggggagatgaacacatacccggttccccctacagggtggttgtgcctta

SEQ ID NO: 117899 - DNA, 7920 bp, Artificial Sequence
  derived and/or modified sequence
atgtctagctcgcacagccgagctggtcagtccgcggcaggagctgcaccggggggcggggttgacacaagggatgcagaaatgcctgcaaccgaaaaagacttggctgaggacgcgccttggaagaaaattcagcagaacacctttacgagatggtgcaatgagcatctaaaatgcgtcagcaagcgcatcgctaatctccagactgacctgtctgatggcctgcgattgattgccttgctagaggtcttgtcccaaaaaaaaatgcatcgcaagcataaccagcggcctacctttcggcagatgcagctggaaaatgtgtccgttgcactggaattcctggatagggagtcaatcaagctcgtgagcattgatagcaaagccattgtggatggcaatttgaagctcattctgggactaatttggacattaatcctgcactacagcattagtatgcccatgtgggatgaggaggaagacgaagaggcaaagaaacagacccccaagcagcgtcttctcggttggatacagaataaacttcctcagctgcccattaccaacttcagccgggactggcaaagtggtcgggcgctgggggccctggtagacagttgtgcgccagggttgtgtcccgattgggattcttgggatgctagtaaaccggtgacaaacgccagggaagcaatgcagcaggctgacgactggctcggaatcccacaagttatcacacctgaggagatagtggatccgaatgtcgatgagcacagcgtgatgacctacctcagccagtttccaaaggccaagctgaagccgggggctccgttgcgacccaaattaaaccccaaaaaggcccgagcctatggccccggaattgagcctactggcaatatggtcaagaagcgcgctgagttcacagtggaaactcgctccgccgggcagggtgaggtgcttgtgtacgttgaggacccagctggacatcaagaggaagcaaaagtcaccgcaaacaacgacaagaatagaacttttagtgtctggtatgtgccagaggtgacagggacacacaaggtcaccgtgctttttgccgggcagcacattgcaaagtcaccatttgaggtgtacgtcgacaaaagtcagggagatgctagcaaagtaaccgcacagggaccagggcttgagccatctggcaacatcgcaaacaagaccacctactttgaaatctttaccgcgggcgccggaactggagaagtggaagtggtgatccaggatcccatggggcaaaaaggcacagttgaacctcagcttgaagcacgcggcgactcgacttatcgttgtagctatcagccaaccatggaaggggtccatactgtgcatgttacattcgccggcgtccctatccctaggtcgccctatacggtgaccgtcggccaggcatgcaatccatctgcatgtagggctgtggggcgtggtctgcagcccaaaggcgttcgagtgaaagaaaccgcagactttaaggtttatactaagggagccggaagcggtgaactgaaggttactgttaagggccctaagggcgaggagcgcgttaagcaaaaagatttaggtgacggggtttatgggttcgaatactatcctatggttccagggacctatattgtgacaattacatggggaggccagaatatcggacggtccccatttgaggttaaggtgggaacagaatgcggaaaccagaaggtgcgtgcctggggtcccggcctcgagggaggcgttgtcggcaagtcagccgatttcgtggttgaggcaataggggacgatgtcggaaccctgggattctctgtcgaggggccatcccaggcgaaaattgaatgcgatgataagggcgacggaagctgtgacgtgcgttactggcctcaagaggctggggaatatgcggttcatgtattgtgtaatagtgaggacatacgtctgagtccctttatggctgatattcgggacgcacctcaagatttccaccccgaccgagtgaaggcccggggacccggcctggagaaaaccggagtcgccgtgaacaagccagccgaattcacagttgacgcaaagcacggtggtaaggcccccctcagagtgcaggtccaggacaatgaaggatgccccgtggaggccctggtaaaggataacggcaacgggacatattcttgctcctacgtaccccgcaagcctgtcaaacatacagctatggtgagctgggggggagtgtccatcccaaattctccttttagagtcaacgtgggcgctgggtcacatccaaataaagtcaaggtctacggacccggagttgctaaaaccggacttaaggcacatgaacccacatatttcactgtcgattgcgctgaggccggccaaggtgacgtttccatcgggattaaatgcgctcctggggttgttgggccagccgaggccgacattgacttcgacattattcggaacgacaatgacacatttacagtaaagtacactccccggggcgccggcagctacactataatggtgttgtttgccgaccaggccactccaactagccccataagggtgaaggtggaaccctctcatgatgcttccaaggttaaggcagagggcccagggctcagccggacaggtgttgagctcggcaaaccaacgcactttaccgtcaatgctaaagcagctggcaaaggaaagctcgacgtccagttttctgggctgactaagggcgacgccgtgcgcgatgtcgatattattgaccatcatgataacacgtatacggtcaaatacaccccagtccagcagggacccgtgggtgtgaatgtgacctacgggggggatcctatcccaaagtccccctttagcgtggctgtcagccccagtttggatctctctaaaatcaaggtgagcggacttggcgagaaggtggatgtgggcaaagaccaggaattcactgtgaaatccaagggcgctggaggacagggcaaagttgcctctaaaattgttggcccatctggagccgctgtgccttgtaaggtcgagcctgggctgggggcagacaattcggtggtccgctttttaccccgggaggaaggaccctatgaagtggaggtgacctacgacggcgttcccgtgcccggaagtccattccctttagaggctgttgctcctaccaagcccagcaaagtcaaagcgtttgggccagggttacagggtggaagtgccggttctcctgcacggttcaccatcgatactaagggcgctggaacggggggcctgggacttacggtagaaggcccttgtgaggcgcagctggagtgtctcgacaatggcgatggcacgtgctctgtttcttacgtgccgacagagccaggagattacaacataaacatcctctttgccgatactcatatcccaggcagccctttcaaggcccatgtggtgccatgtttcgacgcttccaaggttaagtgctctggcccgggcctcgaacgagcgacagcaggtgaagttggtcagttccaggtggattgttcctctgctgggtccgcggaattgactatcgaaatctgtagcgaagcaggactgcccgcagaggtgtatatacaggaccacggggacggaacccataccatcacttacatcccactctgccctggcgcatatacagtaactattaaatacggagggcagccagtccctaactttccttctaaactgcaggtggaacctgcagtcgacacaagcggcgtgcaatgctatggcccaggaatcgaaggtcagggggtttttcgagaggctactacagaattttcagtcgacgcccgtgccctgacccagacggggggtccccacgtgaaggccagggtcgctaacccgagcggcaatcttacagagacttatgttcaagatcgaggagacggtatgtataaggtagagtacacaccttacgaggagggcctccacagcgtggatgtgacatatgatgggtctcctgttccctcgtccccatttcaggtacccgtgaccgagggctgtgatccctcacgggttagagtccacggaccaggcatccaaagcgggacaacaaacaaaccgaataagtttactgtggagacaaggggtgctggcacaggcggactgggccttgctgtggagggcccttccgaagcaaaaatgagctgtatggataacaaagacggatcatgttctgtggagtacatcccttacgaggcaggaacctattcattgaatgtcacttatggcgggcaccaagtacctggatctccctttaaagtacctgtgcatgatgtgactgatgccagcaaggtgaagtgcagtggtcccggcctatccccgggcatggtaagagccaacctgcctcagtctttccaggttgacacttccaaggctggggtcgccccattacaggtgaaggtccagggccctaagggtctcgtagagcctgttgatgtggttgacaatgccgatggcacacagacggtcaactatgtgccctctagggaaggcccgtactccattagcgttttgtacggtgatgaagaggtccctcgctcaccatttaaggttaaggtcctgcctactcatgacgcatcaaaggtgaaggcgtcaggcccggggctgaacaccacaggcgttccagcttcgctgccagtggagttcacgattgatgccaaagacgccggcgaaggcctcctggctgtgcagattacggatccggaagggaaacccaaaaagacccacattcaggataatcacgacggaacatatacagtggcctacgtcccagacgtaactggtcggtatactatattgatcaaatatggtggcgacgagattccattctctccatatagagtgagagccgtccccactggcgacgccagtaagtgcaccgtgactggcgcaggcatcggcccgaccattcagatcggtgaagaaactgtaattacagttgataccaaggccgctggcaaaggaaaggtgacctgcacagtgtgcacacctgacggaagtgaagtggacgtcgacgttgtagaaaatgaggacggaacatttgatattttctacacagccccacaacccggaaagtacgttatctgcgtaagattcggcggggaacacgtccccaactccccctttcaagtcacggctctggccggagatcagccttccgtccagcccccgctgcggagccagcagctggcacctcagtatacttacgcccagggagggcagcaaacatgggcgcccgaaagacccctggtaggtgttaatggtctggacgtgaccagtctgcggccatttgatctggttattccttttacaatcaaaaaaggggagataacgggagaggtacggatgccgagtgggaaggtggcacaaccaactatcacggataacaaagatgggacagtgaccgttcggtatgccccctctgaggctggcctccacgagatggatattcggtatgataatatgcatatcccaggctcccccctgcagttttacgtggactatgtgaattgcgggcacgtcacagcatacggtcctggactcacacatggcgttgtgaataaacccgctacgttcactgttaataccaaagacgctggtgaaggcggcctgagtctcgctatcgaaggtccaagcaaggccgagatctcatgcacagacaaccaggacggaacgtgctccgtgagttatctgcccgtcttgccaggtgattactcaattctggtcaaatacaatgagcagcatgtgccaggttccccctttacagcccgggtgactggcgacgatagcatgcgaatgagccatctcaaagtcggctctgctgccgatatcccgataaatattagtgagactgacctgtctctactgaccgctaccgttgtcccgccttcaggtcgcgaagaaccctgcctcctcaagcggctgcgcaatggccacgtggggataagttttgttcctaaggaaacaggggaacacctggtgcacgtcaagaagaatgggcagcacgtagcttctagcccaattcctgtggttatttcccagagtgagattggcgacgcatcacgtgtgcgcgtcagcggacagggcctgcacgaagggcatacctttgaacccgcagaattcattattgataccagagatgctggttatggtggcctcagcctcagtattgaggggccttctaaggtggatattaacacagaagacctcgaagatggcacctgtcgtgttacatactgcccgaccgagccgggaaattacattatcaatatcaaattcgcagaccagcacgtgcctgggagccccttctctgtgaaagtgactggagaaggtcgcgtaaaagaaagtattacccggcgacggagagcaccctctgtggccaatgtcggctctcactgcgacctatccctcaagattcccgagatttccattcaggatatgacagcccaggtaacatccccatctggcaaaacacatgaggcagaaatcgtggagggtgaaaatcacacctattgtatccgttttgtccccgccgagatgggaacccacaccgtgtcagtaaaatacaagggccagcatgtgcctgggagcccttttcagttcaccgtcggtcccttaggcgaagggggggcccacaaagtgcgggccggcggccctgggcttgagagagcagaggcaggggtacctgcagaattcagcatttggactagagaggctggtgcgggtggtctggcaattgccgttgaagggccatctaaggcagagattagctttgaggacaggaaggacggaagttgcggagtggcctatgtggtgcaggaacctggagactatgaggtgtcagtgaagtttaacgaggagcacatcccagatagtccctttgtggtccctgtggcgagcccatctggcgatgcacggaggttaacggtgtcgagcctccaggagtccggcctcaaggttaatcagcccgcctccttcgccgtgtccctcaacggtgccaagggggccatcgatgcgaaggtgcactccccctccggcgccctggaggagtgctacgtgacagagatcgaccaggataaatatgcggttagattcataccccgagaaaacggcgtgtacctgattgacgtgaaattcaatgggactcatatccccggaagcccctttaaaattcgagtgggagagcctggtcacggaggcgatcccgggctggtgtccgcctatggtgcaggtcttgaagggggtgttactggcaatcctgccgaattcgtggtgaacacctctaatgctggtgctggagccttgtcagtgactattgacgggccaagtaaagtgaagatggactgccaggagtgccccgaaggctacagagtgacctataccccaatggcccctgggtcttacctgatttctattaaatacgggggcccctaccatattggcgggtcccccttcaaggccaaagtcaccggccctagattggtgtcaaatcatagtctgcatgagacatcgtcagttttcgtggattcccttacaaaagccacctgcgccccccaacatggggcccccgggcccggaccagccgatgcctccaaagttgtcgcaaaaggattgggactgagtaaggcctacgtgggccagaagtcatctttcaccgtggattgcagcaaagcagggaataacatgcttcttgtcggagtgcatggacctcggaccccttgcgaagaaatcttagtgaagcacgtgggctctcgactgtacagcgtgtcttatttacttaaggataagggcgaatacacactcgtggttaaatggggcgatgaacacattcctggctcaccatatagggtggtggtcccatag

SEQ ID NO: 117900 - DNA, 7920 bp, Artificial Sequence
  derived and/or modified sequence
atgagcagcagccacagccgggccggccagagcgccgccggcgccgcccccggaggaggtgtagacacacgcgacgcagagatgcctgccaccgaaaaggaccttgcagaggacgccccatggaagaagatccaacaaaacacattcactcgctggtgtaacgagcatcttaagtgcgtctctaaacggatcgcgaatttgcagaccgacttgagtgacgggcttagactgatcgccctcctggaagttctttctcagaagaaaatgcacaggaaacataaccaaagacctacttttaggcagatgcagctggagaacgtttctgttgcactcgaatttttggatcgtgaatccatcaagctagtttccatcgatagcaaagccatagtggatgggaacctgaagctgatcctcggcctcatatggacactcatcttgcattatagtatctcaatgcctatgtgggacgaggaagaggatgaagaggccaagaagcagaccccaaagcaacgactgctgggatggatccaaaataaactccctcagctgcctatcacgaactttagtcgggactggcagtccggacgggcacttggagcccttgttgatagctgtgctccaggcctctgtcctgattgggattcctgggatgcgtcaaagcccgttactaacgctagagaggcaatgcagcaggcagacgactggctcggcattccacaagttattacacctgaagagatcgtggaccccaacgtggatgagcactcagtcatgacgtacctgagtcagttccctaaggctaaactgaagcccggtgctccactaaggcctaaactgaacccaaagaaagcgagggcgtacggacccggcatcgagccgacaggaaacatggttaagaaacgtgcggaatttaccgtggaaacacgctccgctgggcaaggagaagtgttggtttatgttgaagaccctgcagggcatcaggaagaggcaaaggtcactgccaacaacgataaaaatagaaccttctcagtgtggtacgtgcccgaagtaactgggacccacaaggtaactgttttatttgccggccagcacattgccaaatctccctttgaggtctacgtcgataaatcacagggcgacgcgtctaaggtgactgcacaagggcccggactagagccttccggcaatattgctaacaaaacaacttattttgaaattttcacagcaggcgctgggactggagaagtcgaagtggtgatacaggacccgatggggcagaaaggcactgtcgaacctcagctggaggccaggggcgactcaacctatagatgctcttatcaacccactatggaaggagtccacactgtccacgtgacctttgccggcgttccaatcccaagaagtccatacactgtcactgtcgggcaagcttgtaacccatctgcttgccgggccgtcgggcgagggctccagcccaagggcgtgcgagttaaggaaacagcagatttcaaggtttacaccaaaggcgctgggagcggagagttaaaagtgacagtgaagggtccgaaaggggaagagcgagtgaagcaaaaagacctgggcgatggagtctacggctttgagtactatccaatggtcccaggaacctatattgtcacaatcacctggggtggccagaatatcggaagatcgccctttgaggtgaaagtaggaactgaatgtggaaaccagaaggtgcgggcatggggacctggtctggaagggggcgtcgtcggtaagtcagccgattttgttgttgaagcaattggagacgacgtcgggaccctgggtttctccgttgagggcccttcgcaggccaaaatcgaatgcgatgataagggtgacggcagttgtgacgtcagatactggcctcaggaagctggcgagtacgctgttcacgttctatgtaatagcgaagatatccgtctttcgcctttcatggctgacattcgggacgcacctcaagatttccaccctgaccgagtcaaggcgcgcggcccaggcctggaaaagacgggcgtagccgtcaataagcctgcagaattcaccgtcgatgctaagcacggtggcaaggctcctctcagagtgcaagtgcaggataatgagggctgccccgtcgaagccctggtcaaggataatggcaatggcacctattcatgcagctatgtgccgcggaaacccgtcaagcataccgcaatggtctcctggggcggagtctccatcccaaactcacctttccgcgtcaatgtaggagccggttcacatccaaacaaagtcaaggtttacgggcctggtgtagccaagaccggtttaaaagcgcacgagcctacttacttcaccgtggactgtgcggaggctgggcagggtgacgtgagcattggtattaaatgcgctccgggggtcgttggtcctgcagaggctgatatagattttgatattatacggaacgataacgacacattcacagtgaagtacacgccaagaggcgccgggtcttataccatcatggtactgtttgccgatcaggccacccccactagccctatccgggtcaaagtggaaccttcgcatgatgcatccaaggtaaaagctgaaggacctgggctgagccgaaccggtgtggagctagggaaaccaacacactttaccgtgaatgccaaagccgcgggaaagggtaagctggatgtgcagttttcgggccttacaaaaggcgacgctgtgcgggacgtagacatcattgatcatcatgacaatacctacacagtgaaatataccccggttcagcaggggcccgtgggggtgaatgtcacgtacggcggggaccccatccccaaaagcccattctccgttgccgtatctccatctctcgatctgagcaaaataaaggtctccggtcttggcgaaaaagtggatgttggcaaagaccaggagttcacagtaaaatcaaagggtgctggagggcagggcaaggtagcttcaaaaattgttggaccatccggcgcagctgtaccatgcaaggtcgagccggggctgggcgctgacaactcggttgtgcgttttctgcctagagaggaaggtccttatgaggttgaagtgacgtacgacggcgtgccggtgccaggtagtcccttccctcttgaagctgtggcaccgacgaaacccagcaaggttaaagccttcggtccgggactgcaagggggatccgcaggatccccggctcgcttcacaatcgataccaagggcgcgggcacaggcggactggggcttacggtggagggcccttgcgaagcccagttggagtgcctggacaatggggacggcacatgttccgtgagctatgtgcccactgaaccaggggattacaatatcaatatcttgtttgccgatactcatatccctgggtctcccttcaaggcccacgtggttccctgtttcgacgccagtaaggtgaagtgcagtggacctgggctggagcgcgcgacagccggtgaggttgggcaatttcaggtcgattgctccagcgccggctcggctgaactgaccattgaaatatgttctgaagctgggttaccagccgaggtttatattcaggaccatggtgatggcacccacaccataacttacattccactgtgtcccggcgcatacacagtgacaattaagtatggaggccagccagtgcccaattttccgagcaagctgcaggtggaacctgctgtagacacctcgggggtacagtgctacgggcctgggatagaggggcagggagtgtttcgcgaagccaccaccgaattctctgtggacgctcgagccctcactcaaaccggaggcccacacgttaaggcaagagttgccaatcccagtggcaacttaacagagacctatgtccaggaccgtggggacggcatgtacaaagtcgagtacacaccctatgaggaaggcctgcacagcgtggatgtcacctacgacggttcacccgtcccatcatctccttttcaagtacctgtgaccgagggctgcgatccgtctagggtgcgtgttcacgggcccgggatccaaagtggcacaaccaataagcccaacaaattcacagtagagaccagaggggcaggcactggtgggcttggcctggcggtggaaggccctagcgaagctaagatgagctgcatggacaataaagacggcagttgtagtgttgaatacattccctacgaagccggaacctatagtctaaacgtgacatacggaggccaccaggtgccaggttcacctttcaaagtgccagttcacgatgtcacggacgcctccaaggtcaaatgtagcggcccaggtctgtcaccaggaatggtgcgggccaatttaccccagtccttccaagtggacacctctaaggctggcgtggcccccctgcaggtcaaggttcaagggccaaagggcttggtggagcccgtcgacgtggttgataacgcagatggcacacagaccgtgaattacgttccctcacgcgagggtccctattccattagcgtcctgtatggcgatgaggaggttcctcggtctcctttcaaggttaaggtcttgcctacacacgacgcctcaaaggttaaagctagcgggcccggcctgaacacaactggcgtgcccgcttctctcccggtggagttcaccattgatgcaaaggacgcaggagagggcctactggctgttcagatcaccgatccggaagggaagcccaagaagacacacattcaggacaatcacgacggcacatacaccgttgcctacgtacctgacgtcactggacgctacacgattcttataaaatatggaggcgacgaaattccattcagcccataccgcgtgagggctgtgcccactggggatgccagcaaatgtacagtgaccggagctggcataggcccaacaatccagataggggaagagactgttatcacagtagatacaaaggccgcaggaaagggcaaagtgacctgcactgtttgtactccagacggaagcgaagtggacgtggacgtcgttgaaaatgaagacggcactttcgacatattctatacggcaccccagcccggaaaatacgtaatttgcgtgagatttggcggagagcacgtgccgaattctccctttcaagtgacagccctggctggcgaccaaccctccgtgcagccacctctcagaagccagcagctggcacctcagtatacctatgcccagggaggacagcagacctgggcccccgagaggcccctagttggggtcaatggcctggatgtcacgagcctccgcccttttgatctggttattcctttcaccatcaaaaagggagagatcactggtgaagtccgcatgccttccggtaaagtcgcgcagcctaccatcactgacaataaggatggtaccgttaccgtgagatatgcaccgtcggaagctggcctgcacgagatggacatacgttacgataatatgcatatccctgggtctccattgcagttctatgtcgactacgtgaattgcgggcacgttaccgcctacgggcctggattgacccacggcgtggtgaacaagcctgccaccttcaccgttaatacgaaagacgcaggcgagggtggactttcacttgctatcgaaggaccctcgaaagccgagatttcgtgcaccgacaaccaagacggtacttgcagcgtgagctatctaccggttcttcccggagattactccattctcgtaaagtacaatgagcagcacgtcccagggagccccttcaccgctcgcgtcacaggagacgactcgatgagaatgagccatctgaaagtgggaagcgctgcagacattccaataaacatttctgagaccgatttgagcttactgactgccacagtcgtgccacctagtggtcgagaggaaccttgtctattgaagcgcttgagaaacggacatgttggtatcagttttgtacccaaggagacaggggagcacctcgtgcacgtcaagaagaacgggcagcacgttgcatccagtccaatccccgtagtgatctcccagagcgagataggggatgcctcaagagtgcgggtcagtggacagggcctacacgagggccatacatttgaacctgccgaatttatcatcgacacaagagacgccggatacggtggtctgagtctctctattgaggggccctcaaaggtggacataaatacagaggatctcgaagatggcacgtgccgcgttacttactgcccaaccgagccagggaactatatcatcaatatcaaattcgcagatcaacatgttcctggtagtccctttagtgtgaaggttaccggggagggccgagttaaggagagtatcacccggcggcggagggcaccttccgtggcaaatgtgggaagtcattgtgaccttagcctcaaaatcccagaaatctctatacaggacatgacagcacaggttacctccccttcaggtaaaacccatgaagctgaaattgtcgagggcgaaaaccatacgtattgtatcagattcgttcctgctgagatgggcacccacacagtttcagttaaatacaagggccagcacgtccctgggtccccctttcagttcacagtagggccactgggtgaaggaggagcccacaaggtgcgggctggtggtcctggacttgagagagccgaagcaggcgtgccagctgaattctctatttggacccgtgaggctggtgctggcggcctcgccatcgccgtggagggtccaagcaaagccgagatttcattcgaagatcgaaaagatgggtcttgcggcgtggcttatgttgttcaggagccaggtgactacgaagtgtctgtgaagtttaacgaagagcacattcctgactcccctttcgttgttcccgtggccagcccttctggagatgctcgcagattaaccgtgagctccctgcaggaaagtgggttaaaggtcaaccagccagcgtctttcgcagtgagcctgaacggcgcgaagggtgccatcgatgccaaggtgcatagtccgtctggagccctggaagagtgctacgtaaccgaaatcgaccaggacaagtatgccgtgcgctttatcccacgcgaaaatggggtctacctgattgatgtcaagtttaatggaactcatatccccggaagcccattcaaaataagagtcggggaaccaggccacggcggagatcccggcctcgtgagcgcgtatggagccggactggaagggggcgtgacaggcaaccccgctgaatttgttgtgaacacctcaaacgccggagctggagcactgagtgtcaccatagatgggcctagcaaggtaaagatggactgtcaggaatgcccagaagggtaccgcgtcacatacacccctatggcaccaggttcataccttatctccatcaaatatggcggaccttaccatataggcggctctcctttcaaagcgaaagtgaccggccctaggctggtttctaaccacagcttgcatgagacctccagcgtgttcgttgattccctgaccaaggccacttgcgccccacagcatggcgctccagggccaggcccggccgatgcgtccaaagtggtcgcgaaggggctaggtttgagcaaggcctacgtgggccagaagtcttcttttactgtggactgcagcaaggccgggaataacatgctgctggtcggagtgcacggccccaggacaccttgcgaagagattctcgtaaaacacgttggctccagactatacagcgtgtcatatcttctgaaggataagggagagtatacgctcgtcgtaaagtggggagatgaacacattccaggctccccttaccgggtggttgtgccttag

SEQ ID NO: 117901 - DNA, 7919 bp, Artificial Sequence
  derived and/or modified sequence
atgagttccagccattccagggcgggtcagtcagctgccggagctgctccaggcggtggagtggacactagagacgcagagatgcctgcgacagagaaggacctcgccgaggacgcaccttggaagaagattcagcagaacacattcacacgctggtgtaatgagcacttaaaatgtgtctcaaaaagaattgccaatctccagactgacttgtctgacggcctaaggttaattgcgctgctggaagtgctcagccagaaaaagatgcaccggaaacataatcagcggcctacttttcgccagatgcagctggagaatgtgagcgtggcactcgaatttctcgatcgggagagcattaaacttgtgagtatcgacagcaaggccatcgtagacggcaacttgaaattaatcctcggtctcatctggactctgattctccattactcaatcagtatgccaatgtgggacgaagaggaggatgaggaggccaagaagcagaccccaaaacagcggctgctggggtggattcagaacaagctgccccaacttcctattactaactttagccgcgactggcaaagcggtagagcgttgggcgctctggtcgactcctgcgcacccggactctgccctgactgggacagctgggatgcatccaagcccgtgactaacgctcgggaagccatgcagcaggctgatgactggttaggcatcccacaggttatcacccctgaggaaatcgtcgaccctaacgtggacgagcattcagttatgacttatttgtctcagtttcccaaagcaaaattgaaaccaggtgctccattgagaccaaagctcaatcctaagaaggccagggcatacggtccaggcatcgaacccaccgggaacatggtgaaaaaaagggcagaatttaccgtcgagacaagaagcgcgggacagggggaggtactcgtgtatgtggaagaccccgctggacatcaggaggaggcaaaggtgacagcaaataatgataagaaccgaacattctcagtgtggtacgtgccagaggtcaccggcacgcacaaagtgactgtactttttgctggacaacatatcgccaagagccccttcgaggtttacgtggacaagtcccagggggatgcatcaaaggttaccgcccaaggccctggcttggagccttcgggcaacatagctaataagaccacttacttcgagattttcacggccggagctggaacaggggaagtggaagtggtgatacaggacccaatgggccagaagggaacagtggagccccagttagaggctagaggagactctacgtacagatgttcttatcagcccaccatggaaggcgtgcacacagttcatgttactttcgctggagtgcctatcccccgatccccttacacagtcactgttgggcaggcttgtaatccctccgcctgtagagcagtgggtagaggtctgcaacccaagggggtccgcgtgaaagagactgcagactttaaagtgtatactaagggggcagggagtggtgaactcaaggtgaccgtgaaaggtccaaagggcgaggaacgtgtcaagcaaaaggatctgggggacggcgtttatggtttcgagtattatcctatggtgccaggcacctacatagtgaccatcacttggggcggtcagaacatcggacgaagcccattcgaagtgaaggtgggcactgagtgcgggaaccaaaaggtgcgggcatggggccctggtctggaagggggtgtagttggtaaaagcgctgatttcgttgtggaggccattggcgacgatgtggggacccttgggttctcagtggagggtccctcccaggccaaaatcgagtgtgacgacaagggagacggttcctgcgacgtgaggtattggccccaagaggccggagaatacgccgttcacgttttatgtaacagcgaggatattaggttatcacccttcatggcagatattcgtgacgcaccccaggacttccacccagacagggtgaaagcacggggaccagggctggagaagacaggtgttgcagtcaacaagccggctgaattcaccgttgatgccaaacatggcggaaaagctccgctgcgagttcaggttcaagataacgaggggtgtccggtcgaagccttagtcaaggataacgggaatggcacctattcatgctcatacgtaccacgaaaaccggtgaagcacaccgccatggtcagctggggcggagtgagcatacctaactcaccatttcgagtgaatgtaggggctggatcccacccaaacaaagttaaggtgtacggccctggagtggcgaaaaccggattaaaggcccatgaaccaacttattttaccgtggactgcgctgaagctgggcaaggagatgtctccataggtattaagtgtgcgccaggcgtggtgggacctgccgaggccgacatcgactttgatatcattagaaacgataatgatacctttaccgtaaagtatactcccaggggcgctggcagctacactatcatggtcctgttcgccgatcaggccacaccgacatcccctatcagagtgaaagtagagccctcccacgatgcttccaaggtgaaagccgagggccctgggctctccaggaccggcgttgagctgggcaaacccacccactttactgttaatgcgaaggccgcagggaagggcaagctggatgtgcagttttccggcctcactaagggcgacgccgtgagagacgtggacatcattgaccaccacgacaacacctataccgttaaatatactcccgtgcagcagggtccagttggtgtgaacgtgacctacggcggagacccgatacctaagtctcctttcagtgttgcagtctccccgtctctagacttatcgaaaattaaggtcagcggcctcggagaaaaagtcgacgtgggcaaggaccaggagtttaccgtgaagtcaaaaggggctggaggccaggggaaagtggcatcaaagatcgtcgggccttctggagccgcagtcccttgtaaggtagagccaggtttgggcgctgacaactctgtcgtgcggtttctgccgcgagaggaagggccatacgaggtggaggtgacatacgatggtgtcccagtgccaggctcacctttcccgcttgaggccgttgcgcctacaaaaccgagtaaagtcaaggcctttggtcctggcctgcagggtggctctgctggttccccagctaggttcacaatcgatactaaaggtgcgggaacagggggactggggttgacagtggaggggccatgtgaggcacagttagaatgtctggataacggtgatggaacatgctccgtaagttacgtacccacggaacctggggactacaacatcaacattcttttcgccgacacacacattcctggctcccctttcaaagcccatgtagtgccttgtttcgacgcttcaaaggtgaaatgttctggcccagggctggagagagcgactgcaggggaggttggacaattccaggtcgactgctcctctgctggttcagcagagctcaccattgagatttgttcggaggctggcttaccagcggaggtgtacatccaggaccacggcgacggtacccacaccattacgtatatccctctttgtcctggggcttacactgtgacaattaaatatggaggacagcctgtccctaacttcccgagtaagctgcaagtagaacccgctgtcgacaccagcggcgttcagtgctatggtcctggtatcgaagggcagggagtgtttcgggaagccactacggaattctcggtagacgcacgggctctgacccagacggggggaccccacgttaaagctcgcgttgccaacccatctggcaacctgaccgaaacttacgtgcaggaccgtggagacggtatgtataaagtggaatacaccccatacgaggaaggcctccattccgtcgacgtaacctatgacgggtctccggtccccagcagcccttttcaagtaccggtgacggaaggttgcgatcccagtagagtgagagtccatggacctgggatccagtccggcaccaccaacaagcccaataaattcaccgtggagactcggggtgctggcactggtggcctgggcctggccgtggaaggcccttctgaagccaaaatgtcatgcatggataataaggacggttcatgtagcgtggagtatattccttatgaggcaggcacatattcccttaacgtcacttatggaggacaccaggtccctgggtcaccttttaaggtcccagtgcacgatgtcaccgacgccagcaaggtgaaatgttcagggcctggactgtctcccggaatggtccgggcaaacttaccacagtcctttcaggtggacacatcaaaggcaggcgtggcccctcttcaagtgaaggtgcaaggccctaaaggactggtcgagcctgtggacgttgtggataacgcagacggaacccagaccgtcaattacgtgccaagccgagaaggaccttactctatatctgtgttatacggggacgaggaggtcccaaggagccctttcaaagtgaaagtcctcccgacccatgacgcatccaaggtcaaggcttctgggcctgggctgaatactaccggagtcccggctagcctacctgtggagtttaccatcgatgcgaaagatgcgggtgagggccttttggcagttcagattaccgacccggagggcaaacccaaaaaaacacacatccaggacaaccatgacggcacctatacagtcgcctatgtccctgatgtcacaggcagatatacaatcctcatcaaatacggcggagacgaaattccattttcgccatacagagtgcgggctgtgccaaccggggatgccagcaagtgtaccgtaacaggggctgggatcggccctactatccagatcggagaagagactgtaatcacagttgacaccaaagcagccggaaaggggaaggtgacatgtacagtgtgcacacccgacgggagcgaagtggatgtcgacgtggtggagaacgaggacggaactttcgacatattttacaccgcccctcagcccggaaaatatgtcatatgcgtgagattcggcggagagcacgtgccaaattctcccttccaggtcacggccctcgctggggaccaaccctctgttcagccccctctgcgctcccagcagctcgcaccacagtatacttacgcccagggcggacagcagacatgggctcccgaaagacctctggttggagtgaacgggctggatgtgacctccctgagaccttttgacctggtcattccctttaccatcaaaaaaggcgagatcacaggcgaggtccgcatgccatctggcaaggtcgcccagccaactatcaccgacaataaagacggcacggttacagtcaggtatgcacctagcgaagcaggtctgcacgagatggatatccgctacgataacatgcatattcccggtagccccttgcagttctacgtagactatgtaaattgtggccacgtgaccgcgtacggtcccggtcttacacatggtgtggtcaataaacctgccaccttcaccgtcaataccaaagacgcgggtgagggaggactttcactggccattgagggcccatctaaagccgagatatcctgcaccgataatcaggatggaacgtgttcagtctcctacctgccagtcctccccggagactatagtatcttggttaagtacaacgaacagcatgtgcccggaagtccatttactgccagagtgactggcgacgacagcatgcgaatgagccacctcaaggtaggctcagcggcagatatcccaataaacatcagcgagacagacctcagcctcctgacagcaacagtcgtgcctccctccggaagagaggaaccctgcctgctcaagagacttagaaatggccacgtcggaatctctttcgttccaaaggagacaggcgagcatttagtccacgtcaagaagaatggtcagcacgttgctagcagccccattcctgtggtaattagtcaaagtgagattggggatgcatcccgcgttcgagtgtccggacagggtctgcacgaaggccatacctttgagcccgcagagttcatcattgatactcgggatgctggatacgggggactttcactgtccattgaaggcccttcaaaggtggacattaacactgaagacctggaagacggcacttgtagggttacatactgtcccacagaaccgggaaattatataattaatatcaaattcgccgaccagcacgtgccaggcagtcccttttccgtgaaggtgaccggtgaggggagggtcaaagaatccattactcggagaagacgagccccatctgtcgccaacgtggggagccattgtgatcttagtctgaaaattcccgaaatctctatccaagacatgactgcccaggttacttccccctcgggaaagacgcacgaagccgaaattgtggagggggagaatcacacatattgtatccggtttgtcccagctgaaatgggtacgcatacagtctcggtgaagtataagggtcagcatgtgccaggttcacctttccagttcacagtgggccctttaggggaaggcggagctcacaaagtgagggctggaggacccggactggaacgggcagaggctggagtacctgcggagttctcaatctggacaagggaagcaggtgcgggagggctcgcaatcgcagtcgagggcccttccaaggctgaaatcagctttgaggacagaaaggacggaagttgtggggtggcatacgtggtgcaggaacctggggactatgaggtgtctgtcaaatttaatgaggaacacatccccgattcccccttcgttgtccccgtggcctctccaagcggtgacgccagaagactgactgtatcatcccttcaggagagcgggctcaaagtgaaccagcccgcatcgtttgccgtgagcctaaacggtgccaagggggctatcgatgctaaagtgcactccccctcgggggctctcgaggagtgctacgtgaccgagatagaccaggacaagtatgctgttcggtttattcctagggaaaacggggtatacctgatcgacgtgaagttcaacgggactcacatcccgggaagcccatttaaaatcagagtgggcgagcccggtcacggcggtgacccaggtttagtcagtgcttatggggcagggctggagggcggtgtgaccggcaacccagccgagttcgtcgtaaatacgagcaatgcgggagccggtgccctgagcgtcaccattgatgggccttccaaggtaaagatggattgccaggaatgcccagagggataccgcgtaacctatacccctatggcgcctggaagctacttgatttccattaagtacggagggccatatcacattggcggaagtccctttaaggcaaaggtgacaggccctaggttagtgagcaaccatagcctccatgaaacctcatctgtgttcgtcgactccctgaccaaggccacttgcgccccacagcacggagctccgggacctggcccagctgacgcctccaaggtggtagcgaagggcttgggccttagtaaagcttacgtgggacagaagtcttccttcactgttgactgctccaaggccggaaacaacatgctgttggtcggagtgcatggaccacgcaccccttgtgaggaaatcctggtcaagcatgtaggcagccgcctctattcagtcagctatctgctcaaagataaaggagaatacactctcgttgtgaaatggggagacgagcacattcccggatccccctacagggtcgttgtgccata

SEQ ID NO: 117902 - protein, 2602 aa, Artificial Sequence
  derived and/or modified sequence
MPVTEKDLAEDAPWKKIQQNTFTRWCNEHLKCVNKRIGNLQTDLSDGLRLIALLEVLSQKRMYRKYHQRPTFRQMQLENVSVALEFLDRESIKLVSIDSKAIVDGNLKLILGLVWTLILHYSISMPVWEDEGDDDAKKQTPKQRLLGWIQNKIPYLPITNFNQNWQDGKALGALVDSCAPGLCPDWESWDPQKPVDNAREAMQQADDWLGVPQVITPEEIIHPDVDEHSVMTYLSQFPKAKLKPGAPLKPKLNPKKARAYGRGIEPTGNMVKQPAKFTVDTISAGQGDVMVFVEDPEGNKEEAQVTPDSDKNKTYSVEYLPKVTGLHKVTVLFAGQHISKSPFEVSVDKAQGDASKVTAKGPGLEAVGNIANKPTYFDIYTAGAGVGDIGVEVEDPQGKNTVELLVEDKGNQVYRCVYKPMQPGPHVVKIFFAGDTIPKSPFVVQVGEACNPNACRASGRGLQPKGVRIRETTDFKVDTKAAGSGELGVTMKGPKGLEELVKQKDFLDGVYAFEYYPSTPGRYSIAITWGGHHIPKSPFEVQVGPEAGMQKVRAWGPGLHGGIVGRSADFVVESIGSEVGSLGFAIEGPSQAKIEYNDQNDGSCDVKYWPKEPGEYAVHIMCDDEDIKDSPYMAFIHPATGGYNPDLVRAYGPGLEKSGCIVNNLAEFTVDPKDAGKAPLKIFAQDGEGQRIDIQMKNRMDGTYACSYTPVKAIKHTIAVVWGGVNIPHSPYRVNIGQGSHPQKVKVFGPGVERSGLKANEPTHFTVDCTEAGEGDVSVGIKCDARVLSEDEEDVDFDIIHNANDTFTVKYVPPAAGRYTIKVLFASQEIPASPFRVKVDPSHDASKVKAEGPGLSKAGVENGKPTHFTVYTKGAGKAPLNVQFNSPLPGDAVKDLDIIDNYDYSHTVKYTPTQQGNMQVLVTYGGDPIPKSPFTVGVAAPLDLSKIKLNGLENRVEVGKDQEFTVDTRGAGGQGKLDVTILSPSRKVVPCLVTPVTGRENSTAKFIPREEGLYAVDVTYDGHPVPGSPYTVEASLPPDPSKVKAHGPGLEGGLVGKPAEFTIDTKGAGTGGLGLTVEGPCEAKIECSDNGDGTCSVSYLPTKPGEYFVNILFEEVHIPGSPFKADIEMPFDPSKVVASGPGLEHGKVGEAGLLSVDCSEAGPGALGLEAVSDSGTKAEVSIQNNKDGTYAVTYVPLTAGMYTLTMKYGGELVPHFPARVKVEPAVDTSRIKVFGPGIEGKDVFREATTDFTVDSRPLTQVGGDHIKAHIANPSGASTECFVTDNADGTYQVEYTPFEKGLHVVEVTYDDVPIPNSPFKVAVTEGCQPSRVQAQGPGLKEAFTNKPNVFTVVTRGAGIGGLGITVEGPSESKINCRDNKDGSCSAEYIPFAPGDYDVNITYGGAHIPGSPFRVPVKDVVDPSKVKIAGPGLGSGVRARVLQSFTVDSSKAGLAPLEVRVLGPRGLVEPVNVVDNGDGTHTVTYTPSQEGPYMVSVKYADEEIPRSPFKVKVLPTYDASKVTASGPGLSSYGVPASLPVDFAIDARDAGEGLLAVQITDQEGKPKRAIVHDNKDGTYAVTYIPDKTGRYMIGVTYGGDDIPLSPYRIRATQTGDASKCLATGPGIASTVKTGEEVGFVVDAKTAGKGKVTCTVLTPDGTEAEADVIENEDGTYDIFYTAAKPGTYVIYVRFGGVDIPNSPFTVMATDGEVTAVEEAPVNACPPGFRPWVTEEAYVPVSDMNGLGFKPFDLVIPFAVRKGEITGEVHMPSGKTATPEIVDNKDGTVTVRYAPTEVGLHEMHIKYMGSHIPESPLQFYVNYPNSGSVSAYGPGLVYGVANKTATFTIVTEDAGEGGLDLAIEGPSKAEISCIDNKDGTCTVTYLPTLPGDYSILVKYNDKHIPGSPFTAKITDDSRRCSQVKLGSAADFLLDISETDLSSLTASIKAPSGRDEPCLLKRLPNNHIGISFIPREVGEHLVSIKKNGNHVANSPVSIMVVQSEIGDARRAKVYGRGLSEGRTFEMSDFIVDTRDAGYGGISLAVEGPSKVDIQTEDLEDGTCKVSYFPTVPGVYIVSTKFADEHVPGSPFTVKISGEGRVKESITRTSRAPSVATVGSICDLNLKIPEINSSDMSAHVTSPSGRVTEAEIVPMGKNSHCVRFVPQEMGVHTVSVKYRGQHVTGSPFQFTVGPLGEGGAHKVRAGGPGLERGEAGVPAEFSIWTREAGAGGLSIAVEGPSKAEITFDDHKNGSCGVSYIAQEPGNYEVSIKFNDEHIPESPYLVPVIAPSDDARRLTVMSLQESGLKVNQPASFAIRLNGAKGKIDAKVHSPSGAVEECHVSELEPDKYAVRFIPHENGVHTIDVKFNGSHVVGSPFKVRVGEPGQAGNPALVSAYGTGLEGGTTGIQSEFFINTTRAGPGTLSVTIEGPSKVKMDCQETPEGYKVMYTPMAPGNYLISVKYGGPNHIVGSPFKAKVTGQRLVSPGSANETSSILVESVTRSSTETCYSAIPKASSDASKVTSKGAGLSKAFVGQKSSFLVDCSKAGSNMLLIGVHGPTTPCEEVSMKHVGNQQYNVTYVVKERGDYVLAVKWGEEHIPGSPFHVTVP

SEQ ID NO: 117903 - protein, 2561 aa, Artificial Sequence
  derived and/or modified sequence
MPVTEKDLAEDAPWKKIQQNTFTRWCNEHLKCVNKRIGNLQTDLSDGLRLIALLEVLSQKRMYRKYHQRPTFRQMQLENVSVALEFLDRESIKLVSIDSKAIVDGNLKLILGLVWTLILHYSISMPVWEDEGDDDAKKQTPKQRLLGWIQNKIPYLPITNFNQNWQDGKALGALVDSCAPGLCPDWESWDPQKPVDNAREAMQQADDWLGVPQVITPEEIIHPDVDEHSVMTYLSQFPKAKLKPGAPLKPKLNPKKARAYGRGIEPTGNMVKQPAKFTVDTISAGQGDVMVFVEDPEGNKEEAQVTPDSDKNKTYSVEYLPKVTGLHKVTVLFAGQHISKSPFEVSVDKAQGDASKVTAKGPGLEAVGNIANKPTYFDIYTAGAGVGDIGVEVEDPQGKNTVELLVEDKGNQVYRCVYKPMQPGPHVVKIFFAGDTIPKSPFVVQVGEACNPNACRASGRGLQPKGVRIRETTDFKVDTKAAGSGELGVTMKGPKGLEELVKQKDFLDGVYAFEYYPSTPGRYSIAITWGGHHIPKSPFEVQVGPEAGMQKVRAWGPGLHGGIVGRSADFVVESIGSEVGSLGFAIEGPSQAKIEYNDQNDGSCDVKYWPKEPGEYAVHIMCDDEDIKDSPYMAFIHPATGGYNPDLVRAYGPGLEKSGCIVNNLAEFTVDPKDAGKAPLKIFAQDGEGQRIDIQMKNRMDGTYACSYTPVKAIKHTIAVVWGGVNIPHSPYRVNIGQGSHPQKVKVFGPGVERSGLKANEPTHFTVDCTEAGEGDVSVGIKCDARVLSEDEEDVDFDIIHNANDTFTVKYVPPAAGRYTIKVLFASQEIPASPFRVKVDPSHDASKVKAEGPGLSKAGVENGKPTHFTVYTKGAGKAPLNVQFNSPLPGDAVKDLDIIDNYDYSHTVKYTPTQQGNMQVLVTYGGDPIPKSPFTVGVAAPLDLSKIKLNGLENRVEVGKDQEFTVDTRGAGGQGKLDVTILSPSRKVVPCLVTPVTGRENSTAKFIPREEGLYAVDVTYDGHPVPGSPYTVEASLPPDPSKVKAHGPGLEGGLVGKPAEFTIDTKGAGTGGLGLTVEGPCEAKIECSDNGDGTCSVSYLPTKPGEYFVNILFEEVHIPGSPFKADIEMPFDPSKVVASGPGLEHGKVGEAGLLSVDCSEAGPGALGLEAVSDSGTKAEVSIQNNKDGTYAVTYVPLTAGMYTLTMKYGGELVPHFPARVKVEPAVDTSRIKVFGPGIEGKDVFREATTDFTVDSRPLTQVGGDHIKAHIANPSGASTECFVTDNADGTYQVEYTPFEKGLHVVEVTYDDVPIPNSPFKVAVTEGCQPSRVQAQGPGLKEAFTNKPNVFTVVTRGAGIGGLGITVEGPSESKINCRDNKDGSCSAEYIPFAPGDYDVNITYGGAHIPGSPFRVPVKDVVDPSKVKIAGPGLGSGVRARVLQSFTVDSSKAGLAPLEVRVLGPRGLVEPVNVVDNGDGTHTVTYTPSQEGPYMVSVKYADEEIPRSPFKVKVLPTYDASKVTASGPGLSSYGVPASLPVDFAIDARDAGEGLLAVQITDQEGKPKRAIVHDNKDGTYAVTYIPDKTGRYMIGVTYGGDDIPLSPYRIRATQTGDASKCLATGPGIASTVKTGEEVGFVVDAKTAGKGKVTCTVLTPDGTEAEADVIENEDGTYDIFYTAAKPGTYVIYVRFGGVDIPNSPFTVMATDGEVTAVEEAPVNACPPGFRPWVTEEAYVPVSDMNGLGFKPFDLVIPFAVRKGEITGEVHMPSGKTATPEIVDNKDGTVTVRYAPTEVGLHEMHIKYMGSHIPESPLQFYVNYPNSGSVSAYGPGLVYGVANKTATFTIVTEDAGEGGLDLAIEGPSKAEISCIDNKDGTCTVTYLPTLPGDYSILVKYNDKHIPGSPFTAKITDDSRRCSQVKLGSAADFLLDISETDLSSLTASIKAPSGRDEPCLLKRLPNNHIGISFIPREVGEHLVSIKKNGNHVANSPVSIMVVQSEIGDARRAKVYGRGLSEGRTFEMSDFIVDTRDAGYGGISLAVEGPSKVDIQTEDLEDGTCKVSYFPTVPGVYIVSTKFADEHVPEINSSDMSAHVTSPSGRVTEAEIVPMGKNSHCVRFVPQEMGVHTVSVKYRGQHVTGSPFQFTVGPLGEGGAHKVRAGGPGLERGEAGVPAEFSIWTREAGAGGLSIAVEGPSKAEITFDDHKNGSCGVSYIAQEPGNYEVSIKFNDEHIPESPYLVPVIAPSDDARRLTVMSLQESGLKVNQPASFAIRLNGAKGKIDAKVHSPSGAVEECHVSELEPDKYAVRFIPHENGVHTIDVKFNGSHVVGSPFKVRVGEPGQAGNPALVSAYGTGLEGGTTGIQSEFFINTTRAGPGTLSVTIEGPSKVKMDCQETPEGYKVMYTPMAPGNYLISVKYGGPNHIVGSPFKAKVTGQRLVSPGSANETSSILVESVTRSSTETCYSAIPKASSDASKVTSKGAGLSKAFVGQKSSFLVDCSKAGSNMLLIGVHGPTTPCEEVSMKHVGNQQYNVTYVVKERGDYVLAVKWGEEHIPGSPFHVTVP

SEQ ID NO: 117904 - DNA, 9463 bp, Artificial Sequence
  derived and/or modified sequence
gcggccaggggcgggcggccgcagagcagcaccggccgtggctccggtagcagcaagttcgaaccccgctcccgctccgcttcggttctcgctccttcggcccttgggcctccaaacaccagtccccggcagctcgttgcgcattgcgctctccccgccaccaggatgccggtaaccgagaaggatctagctgaggacgcgccttggaagaagatccagcagaacacgttcacacgctggtgcaacgagcacctcaagtgcgtgaacaaacgcatcggcaacctgcagaccgacctgagcgacgggctgcggctcatcgcgctgctcgaggtgctcagccagaagcgcatgtaccgcaagtaccatcagcggcccacctttcgccagatgcagctcgagaatgtgtccgtggcgctcgagttcctggaccgtgagagcatcaagctcgtgtccatcgatagcaaagccattgtggatgggaacctgaagctcatcttgggtctggtgtggacgctgatcctccactactccatctccatgcccgtgtgggaggatgaaggggatgatgatgccaagaagcagacgccaaagcagaggctgctggggtggattcagaacaagatcccctacttgcccatcaccaactttaaccagaactggcaagacggcaaagccctgggagccctggtagacagctgtgctccaggtctgtgcccagactgggaatcctgggacccgcagaagcctgtggataatgcacgagaagccatgcagcaggcagatgactggctgggtgtcccacaggtcatcactcctgaagaaatcattcacccggatgtggacgagcactcagttatgacttacctgtcccagttccccaaagccaagctcaagccgggggctcctctcaaacccaaactcaacccgaagaaagccagggcctatggcagaggaatcgagcccactggaaacatggtgaagcagccagccaagttcactgtggacaccatcagcgccgggcaaggagacgtgatggtgtttgttgaggacccagaagggaacaaagaggaggcacaagtgacccctgacagtgacaagaacaagacatactctgtggagtatctgcccaaggtcaccgggctacacaaagtcacagtcctctttgcaggacagcacatctccaagagcccatttgaagtgagtgttgacaaggcccagggagatgccagtaaagtcactgcaaaaggtccagggttggaagctgtagggaacatcgccaataagcccacctactttgacatctatacggcaggagctggtgtgggtgacattggtgtggaggtggaagatccccaggggaagaacaccgtggagttgctcgtggaagacaaaggaaaccaggtgtatcgatgtgtgtacaaacccatgcagcctggccctcacgtggtcaagatcttctttgctggggacactattcctaagagtcccttcgttgtgcaggttggggaagcctgcaatccaaatgcctgccgggccagtggccgaggcctacaacccaaaggcgtccgtatccgggagaccacagatttcaaggttgacaccaaagctgcaggaagtggggagctcggtgtaaccatgaagggtcctaagggtctggaggagctggtgaagcagaaagactttctggatggggtctacgcattcgagtattaccccagcaccccggggagatacagcattgccatcacatgggggggacaccacattccaaagagcccctttgaagttcaagttggccctgaagcgggtatgcagaaagtccgtgcttggggccctgggctccatggtgggattgtcgggcggtcagcggacttcgtggtagaatccattggctctgaagtggggtctctggggtttgccattgaaggcccctctcaggcaaagattgagtacaacgaccagaatgatggatcgtgtgatgtcaaatactggcccaaggagcctggcgaatatgctgttcacatcatgtgtgacgacgaagacatcaaggacagcccgtacatggccttcatccacccagccacgggaggctacaaccctgatctggttcgagcatacgggccaggtttggagaaatctggatgcattgtcaacaacctggccgagttcactgtggatcctaaggatgctggaaaagctcccttaaagatatttgctcaggatggggaaggccaacgcattgacatccagatgaagaaccggatggacggcacatatgcatgctcatacaccccggtgaaggccatcaagcacaccattgctgtggtctggggaggcgtgaacatcccgcacagcccctacagggtcaacatcgggcaaggtagccatcctcagaaggtcaaagtgtttgggccaggtgtggagagaagtggtctgaaggcaaatgaacctacacacttcacggtggactgtactgaggctggggaaggtgatgtcagtgttggcattaagtgtgatgcccgggtgttaagtgaagatgaggaagacgtggattttgacattattcacaatgccaatgatacgttcacagtcaaatatgtgcctcctgctgctgggcgatacactatcaaagttctctttgcatctcaggaaatccccgccagccctttcagagtcaaagttgacccttcccacgatgccagcaaagtgaaggcagaaggcccagggctcagcaaagcaggtgtggaaaatgggaaaccgacccacttcactgtctacaccaagggggctgggaaagccccgctcaacgtgcagttcaacagccctcttcctggcgatgcagtgaaggatttggatatcatcgataattatgactactctcacacggttaaatatacacccacccaacagggcaacatgcaggttctggtgacttacggtggcgatcccatccctaaaagccctttcactgtgggtgttgctgcaccgctggatctgagcaagataaaactcaatgggctggaaaacagggtggaagttgggaaggatcaggagttcaccgttgataccaggggggcaggaggccaggggaagctggacgtgacaatcctcagcccctctcggaaggtcgtgccatgcctagtgacacctgtgacaggccgggagaacagcacggccaagttcatccctcgggaggaggggctgtatgctgtagacgtgacctacgatggacaccctgtgcccgggagcccctacacagtggaggcctcgctgccaccagatcccagcaaggtgaaggcccacggtcccggcctcgaaggtggtctcgtgggcaagcctgccgagttcaccatcgataccaaaggagctggtactggaggtctgggcttaacggtggaaggtccgtgcgaggccaaaatcgagtgctccgacaatggtgatgggacctgctccgtctcttaccttcccacaaaacccggggagtacttcgtcaacatcctctttgaagaagtccacatacctgggtctcccttcaaagctgacattgaaatgccctttgacccctctaaagtcgtggcatcggggccaggtctcgagcacgggaaggtgggtgaagctggcctccttagcgtcgactgctcggaagcgggaccgggggccctgggcctggaagctgtctcggactcgggaacaaaagccgaagtcagtattcagaacaacaaagatggcacctacgcggtgacctacgtgcccctgacggccggcatgtacacgttgaccatgaagtatggtggcgaactcgtgccacacttccccgcccgggtcaaggtggagcccgccgtggacaccagcaggatcaaagtctttggaccaggaatagaagggaaagatgtgttccgggaagctaccaccgactttacagttgactctcggccgctgacccaggttgggggtgaccacatcaaggcccacattgccaacccctcaggggcctccaccgagtgctttgtcacagacaatgcggatgggacctaccaggtggaatacacaccctttgagaaaggtctccatgtagtggaggtgacatatgatgacgtgcctatcccaaacagtcccttcaaggtggctgtcactgaaggctgccagccatctagggtgcaagcccaaggacctggattgaaagaggcctttaccaacaagcccaatgtcttcaccgtggttaccagaggcgcaggaattggtgggcttggcataactgttgagggaccatcagagtcgaagataaattgcagagacaacaaggatggcagctgcagtgctgagtacattcctttcgcaccgggggattacgatgttaatatcacatatggaggagcccacatccccggcagccccttcagggttcctgtgaaggatgttgtggaccccagcaaggtcaagattgccggccccgggctgggctcaggcgtccgagcccgtgtcctgcagtccttcacggtggacagcagcaaggctggcctggctccgctggaagtgagggttctgggcccacgaggcttggtggagccagtgaacgtggtggacaatggagatggcacacacacagtaacctacaccccatctcaggagggaccttacatggtctcagttaaatatgctgatgaagagattcctcgcagtcccttcaaggtcaaggtccttcccacatatgatgccagcaaagtgactgccagtggccccggccttagttcctatggtgtgcctgccagtctacctgtggactttgcaattgatgcccgagatgccggggaaggcctgcttgctgttcaaataacggaccaagaaggaaaacccaaaagagccattgtccatgacaataaagatggcacgtatgctgtcacctacatccccgacaagactgggcgctatatgattggagtcacctacgggggtgacgacatcccactttctccttatcgcatccgagccacacagacgggtgatgccagcaagtgcctggccacgggtcctggaatcgcctccactgtgaaaactggcgaagaagtaggctttgtggttgatgccaagactgccgggaagggtaaagtgacctgcacggttctgaccccagatggcactgaggccgaggccgatgtcattgagaatgaagatggaacctatgacatcttctacacagctgccaagccgggcacatatgtgatctatgtgcgcttcggtggtgttgatattcctaacagccccttcactgtcatggccacagatggggaagtcacagccgtggaggaggcaccggtaaatgcatgtccccctggattcaggccctgggtgaccgaagaggcctatgtcccagtgagtgacatgaacggcctgggatttaagccttttgacctggtcattccgtttgctgtcaggaaaggagaaatcactggagaggtccacatgccttctgggaagacagccacacctgagattgtggacaacaaggacggcacggtcactgttagatatgcccccactgaggtcgggctccatgagatgcacatcaaatacatgggcagccacatccctgagagcccactccagttctacgtgaactaccccaacagtggaagtgtttctgcatacggtccaggcctcgtgtatggagtggccaacaaaactgccaccttcaccatcgtcacagaggatgcaggagaaggtggtctggacttggctattgagggcccctcaaaagcagaaatcagctgcattgacaataaagatgggacatgcacagtgacctacctgccgactctgccaggcgactacagcattctggtcaagtacaatgacaagcacatccctggcagccccttcacagccaagatcacagatgacagcaggcggtgctcccaggtgaagttgggctcagccgctgacttcctgctcgacatcagtgagactgacctcagcagcctgacggccagcattaaggccccatctggccgagacgagccctgtctcctgaagaggctgcccaacaaccacattggcatctccttcatcccccgggaagtgggcgaacatctggtcagcatcaagaaaaatggcaaccatgtggccaacagccccgtgtctatcatggtggtccagtcggagattggtgacgcccgccgagccaaagtctatggccgcggcctgtcagaaggccggactttcgagatgtctgacttcatcgtggacacaagggatgcaggttatggtggcatatccttggcggtggaaggccccagcaaagtggacatccagacggaggacctggaagatggcacctgcaaagtctcctacttccctaccgtgcctggggtttatatcgtctccaccaaattcgctgacgagcacgtgcctgggagcccatttaccgtgaagatcagtggggagggaagagtcaaagagagcatcacccgcaccagtcgggccccgtccgtggccactgtcgggagcatttgtgacctgaacctgaaaatcccagaaatcaacagcagtgatatgtcggcccacgtcaccagcccctctggccgtgtgactgaggcagagattgtgcccatggggaagaactcacactgcgtccggtttgtgccccaggagatgggcgtgcacacggtcagcgtcaagtaccgtgggcagcacgtcaccggcagccccttccagttcaccgtggggccacttggtgaaggaggcgcccacaaggtgcgggcaggaggccctggcctggagagaggagaagcgggagtcccagctgagttcagcatttggacccgggaagcaggcgctggaggcctctccatcgctgttgagggccccagtaaggccgagattacattcgatgaccataaaaatgggtcgtgcggtgtatcttatattgcccaagagcctggtaactacgaggtgtccatcaagttcaatgatgagcacatcccggaaagcccctacctggtgccggtcatcgcaccctccgacgacgcccgccgcctcactgttatgagccttcaggaatcgggattaaaagttaaccagccagcatcctttgctataaggttgaatggcgcaaaaggcaagattgatgcaaaggtgcacagcccctctggagccgtggaggagtgccacgtgtctgagctggagccagataagtatgctgttcgcttcatccctcatgagaatggtgtccacaccatcgatgtcaagttcaatgggagccacgtggttggaagccccttcaaagtgcgcgttggggagcctggacaagcggggaaccctgccctggtgtccgcctatggcacgggactcgaagggggcaccacaggtatccagtcggaattctttattaacaccacccgagcaggtccagggacattatccgtcaccatcgaaggcccatccaaggttaaaatggattgccaggaaacacctgaagggtacaaagtcatgtacacccccatggctcctggtaactacctgatcagcgtcaaatacggtgggcccaaccacatcgtgggcagtcccttcaaggccaaggtgacaggccagcgtctagttagccctggctcagccaacgagacctcatccatcctggtggagtcagtgaccaggtcgtctacagagacctgctatagcgccattcccaaggcatcctcggacgccagcaaggtgacctctaagggggcagggctctcaaaggcctttgtgggccagaagagttccttcctggtggactgcagcaaagctggctccaacatgctgctgatcggggtccatgggcccaccaccccctgcgaggaggtctccatgaagcatgtaggcaaccagcaatacaacgtcacatacgtcgtcaaggagaggggcgattatgtgctggctgtgaagtggggggaggaacacatccctggcagcccttttcatgtcacagtgccttaaaacagttttctcaaatcctggagagagttcttgtggttgcttttgttgcttgtttgtaattcattttatacaaagccctccagcctgtttgtggggctgaaaccccatccctaaaatattgctgttgtaaaatgccttcagaaataagtcctagactggactcttgagggacatattggagaatcttaagaaatgcaagcttgttcagggggctgagaagatcctgagtacactaggtgcaaaccagaactcttggtggaacagaccagccactgcagcagacagaccaggaacacaatgagactgacatttcaaaaaaacaaaactggctagcctgagctgctggttcactcttcagcatttatgaaacaaggctaggggaagatgggcagagaaaaaggggacacctagtttggttgtcatttggcaaaggagatgacttaaaatccgcttaatctcttccagtgtccgtgttaatgtatttggctattagatcactagcactgctttaccgctcctcatcgccaacacccccatgctctgtggccttcttacacttctcagagggcagagtggcagccgggcaccctacagaaactcagagggcagagtggcagccaggcccacatgtctctcaagtacctgtcccctcgctctggtgattatttcttgcagaatcaccacacgagaccatcccggcagtcatggttttgctttagttttccaagtccgtttcagtcccttccttggtctgaagaaattctgcagtggcgagcagtttcccacttgccaaagatcccttttaaccaacactagcccttgtttttaacacacgctccagcccttcatcagcctgggcagtcttaccaaaatgtttaaagtgatctcagaggggcccatggattaacgccctcatcccaaggtccgtcccatgacataacactccacacccgccccagccaacttcatgggtcactttttctggaaaataatgatctgtacagacaggacagaatgaaactcctgcgggtctttggcctgaaagttgggaatggttgggggagagaagggcagcagcttattggtggtcttttcaccattggcagaaacagtgagagctgtgtggtgcagaaatccagaaatgaggtgtagggaattttgcctgccttcctgcagacctgagctggctttggaatgaggttaaagtgtcagggacgttgcctgagcccaaatgtgtagtgtggtctgggcaggcagacctttaggttttgctgcttagtcctgaggaagtggccactcttgtggcaggtgtagtatctggggcgagtgttgggggtaaaagcccaccctacagaaagtggaacagcccggagcctgatgtgaaaggaccacgggtgttgtaagctgggacacggaagccaaactggaatcaaacgccgactgtaaattgtatcttataacttattaaataaaacatttgctccgtaaa

SEQ ID NO: 117905 - DNA, 9344 bp, Artificial Sequence
  derived and/or modified sequence
gcggccaggggcgggcggccgcagagcagcaccggccgtggctccggtagcagcaagttcgaaccccgctcccgctccgcttcggttctcgctccttcggcccttgggcctccaaacaccagtccccggcagctcgttgcgcattgcgctctccccgccaccaggatgccggtaaccgagaaggatctagctgaggacgcgccttggaagaagatccagcagaacacgttcacacgctggtgcaacgagcacctcaagtgcgtgaacaaacgcatcggcaacctgcagaccgacctgagcgacgggctgcggctcatcgcgctgctcgaggtgctcagccagaagcgcatgtaccgcaagtaccatcagcggcccacctttcgccagatgcagctcgagaatgtgtccgtggcgctcgagttcctggaccgtgagagcatcaagctcgtgtccatcgatagcaaagccattgtggatgggaacctgaagctcatcttgggtctggtgtggacgctgatcctccactactccatctccatgcccgtgtgggaggatgaaggggatgatgatgccaagaagcagacgccaaagcagaggctgctggggtggattcagaacaagatcccctacttgcccatcaccaactttaaccagaactggcaagacggcaaagccctgggagccctggtagacagctgtgctccaggtctgtgcccagactgggaatcctgggacccgcagaagcctgtggataatgcacgagaagccatgcagcaggcagatgactggctgggtgtcccacaggtcatcactcctgaagaaatcattcacccggatgtggacgagcactcagttatgacttacctgtcccagttccccaaagccaagctcaagccgggggctcctctcaaacccaaactcaacccgaagaaagccagggcctatggcagaggaatcgagcccactggaaacatggtgaagcagccagccaagttcactgtggacaccatcagcgccgggcaaggagacgtgatggtgtttgttgaggacccagaagggaacaaagaggaggcacaagtgacccctgacagtgacaagaacaagacatactctgtggagtatctgcccaaggtcaccgggctacacaaagtcacagtcctctttgcaggacagcacatctccaagagcccatttgaagtgagtgttgacaaggcccagggagatgccagtaaagtcactgcaaaaggtccagggttggaagctgtagggaacatcgccaataagcccacctactttgacatctatacggcaggagctggtgtgggtgacattggtgtggaggtggaagatccccaggggaagaacaccgtggagttgctcgtggaagacaaaggaaaccaggtgtatcgatgtgtgtacaaacccatgcagcctggccctcacgtggtcaagatcttctttgctggggacactattcctaagagtcccttcgttgtgcaggttggggaagcctgcaatccaaatgcctgccgggccagtggccgaggcctacaacccaaaggcgtccgtatccgggagaccacagatttcaaggttgacaccaaagctgcaggaagtggggagctcggtgtaaccatgaagggtcctaagggtctggaggagctggtgaagcagaaagactttctggatggggtctacgcattcgagtattaccccagcaccccggggagatacagcattgccatcacatgggggggacaccacattccaaagagcccctttgaagttcaagttggccctgaagcgggtatgcagaaagtccgtgcttggggccctgggctccatggtgggattgtcgggcggtcagcggacttcgtggtagaatccattggctctgaagtggggtctctggggtttgccattgaaggcccctctcaggcaaagattgagtacaacgaccagaatgatggatcgtgtgatgtcaaatactggcccaaggagcctggcgaatatgctgttcacatcatgtgtgacgacgaagacatcaaggacagcccgtacatggccttcatccacccagccacgggaggctacaaccctgatctggttcgagcatacgggccaggtttggagaaatctggatgcattgtcaacaacctggccgagttcactgtggatcctaaggatgctggaaaagctcccttaaagatatttgctcaggatggggaaggccaacgcattgacatccagatgaagaaccggatggacggcacatatgcatgctcatacaccccggtgaaggccatcaagcacaccattgctgtggtctggggaggcgtgaacatcccgcacagcccctacagggtcaacatcgggcaaggtagccatcctcagaaggtcaaagtgtttgggccaggtgtggagagaagtggtctgaaggcaaatgaacctacacacttcacggtggactgtactgaggctggggaaggtgatgtcagtgttggcattaagtgtgatgcccgggtgttaagtgaagatgaggaagacgtggattttgacattattcacaatgccaatgatacgttcacagtcaaatatgtgcctcctgctgctgggcgatacactatcaaagttctctttgcatctcaggaaatccccgccagccctttcagagtcaaagttgacccttcccacgatgccagcaaagtgaaggcagaaggcccagggctcagcaaagcaggtgtggaaaatgggaaaccgacccacttcactgtctacaccaagggggctgggaaagccccgctcaacgtgcagttcaacagccctcttcctggcgatgcagtgaaggatttggatatcatcgataattatgactactctcacacggttaaatatacacccacccaacagggcaacatgcaggttctggtgacttacggtggcgatcccatccctaaaagccctttcactgtgggtgttgctgcaccgctggatctgagcaagataaaactcaatgggctggaaaacagggtggaagttgggaaggatcaggagttcaccgttgataccaggggggcaggaggccaggggaagctggacgtgacaatcctcagcccctctcggaaggtcgtgccatgcctagtgacacctgtgacaggccgggagaacagcacggccaagttcatccctcgggaggaggggctgtatgctgtagacgtgacctacgatggacaccctgtgcccgggagcccctacacagtggaggcctcgctgccaccagatcccagcaaggtgaaggcccacggtcccggcctcgaaggtggtctcgtgggcaagcctgccgagttcaccatcgataccaaaggagctggtactggaggtctgggcttaacggtggaaggtccgtgcgaggccaaaatcgagtgctccgacaatggtgatgggacctgctccgtctcttaccttcccacaaaacccggggagtacttcgtcaacatcctctttgaagaagtccacatacctgggtctcccttcaaagctgacattgaaatgccctttgacccctctaaagtcgtggcatcggggccaggtctcgagcacgggaaggtgggtgaagctggcctccttagcgtcgactgctcggaagcgggaccgggggccctgggcctggaagctgtctcggactcgggaacaaaagccgaagtcagtattcagaacaacaaagatggcacctacgcggtgacctacgtgcccctgacggccggcatgtacacgttgaccatgaagtatggtggcgaactcgtgccacacttccccgcccgggtcaaggtggagcccgccgtggacaccagcaggatcaaagtctttggaccaggaatagaagggaaagatgtgttccgggaagctaccaccgactttacagttgactctcggccgctgacccaggttgggggtgaccacatcaaggcccacattgccaacccctcaggggcctccaccgagtgctttgtcacagacaatgcggatgggacctaccaggtggaatacacaccctttgagaaaggtctccatgtagtggaggtgacatatgatgacgtgcctatcccaaacagtcccttcaaggtggctgtcactgaaggctgccagccatctagggtgcaagcccaaggacctggattgaaagaggcctttaccaacaagcccaatgtcttcaccgtggttaccagaggcgcaggaattggtgggcttggcataactgttgagggaccatcagagtcgaagataaattgcagagacaacaaggatggcagctgcagtgctgagtacattcctttcgcaccgggggattacgatgttaatatcacatatggaggagcccacatccccggcagccccttcagggttcctgtgaaggatgttgtggaccccagcaaggtcaagattgccggccccgggctgggctcaggcgtccgagcccgtgtcctgcagtccttcacggtggacagcagcaaggctggcctggctccgctggaagtgagggttctgggcccacgaggcttggtggagccagtgaacgtggtggacaatggagatggcacacacacagtaacctacaccccatctcaggagggaccttacatggtctcagttaaatatgctgatgaagagattcctcgcagtcccttcaaggtcaaggtccttcccacatatgatgccagcaaagtgactgccagtggccccggccttagttcctatggtgtgcctgccagtctacctgtggactttgcaattgatgcccgagatgccggggaaggcctgcttgctgttcaaataacggaccaagaaggaaaacccaaaagagccattgtccatgacaataaagatggcacgtatgctgtcacctacatccccgacaagactgggcgctatatgattggagtcacctacgggggtgacgacatcccactttctccttatcgcatccgagccacacagacgggtgatgccagcaagtgcctggccacgggtcctggaatcgcctccactgtgaaaactggcgaagaagtaggctttgtggttgatgccaagactgccgggaagggtaaagtgacctgcacggttctgaccccagatggcactgaggccgaggccgatgtcattgagaatgaagatggaacctatgacatcttctacacagctgccaagccgggcacatatgtgatctatgtgcgcttcggtggtgttgatattcctaacagccccttcactgtcatggccacagatggggaagtcacagccgtggaggaggcaccggtaaatgcatgtccccctggattcaggccctgggtgaccgaagaggcctatgtcccagtgagtgacatgaacggcctgggatttaagccttttgacctggtcattccgtttgctgtcaggaaaggagaaatcactggagaggtccacatgccttctgggaagacagccacacctgagattgtggacaacaaggacggcacggtcactgttagatatgcccccactgaggtcgggctccatgagatgcacatcaaatacatgggcagccacatccctgagagcccactccagttctacgtgaactaccccaacagtggaagtgtttctgcatacggtccaggcctcgtgtatggagtggccaacaaaactgccaccttcaccatcgtcacagaggatgcaggagaaggtggtctggacttggctattgagggcccctcaaaagcagaaatcagctgcattgacaataaagatgggacatgcacagtgacctacctgccgactctgccaggcgactacagcattctggtcaagtacaatgacaagcacatccctggcagccccttcacagccaagatcacagatgacagcaggcggtgctcccaggtgaagttgggctcagccgctgacttcctgctcgacatcagtgagactgacctcagcagcctgacggccagcattaaggccccatctggccgagacgagccctgtctcctgaagaggctgcccaacaaccacattggcatctccttcatcccccgggaagtgggcgaacatctggtcagcatcaagaaaaatggcaaccatgtggccaacagccccgtgtctatcatggtggtccagtcggagattggtgacgcccgccgagccaaagtctatggccgcggcctgtcagaaggccggactttcgagatgtctgacttcatcgtggacacaagggatgcaggttatggtggcatatccttggcggtggaaggccccagcaaagtggacatccagacggaggacctggaagatggcacctgcaaagtctcctacttccctaccgtgcctggggtttatatcgtctccaccaaattcgctgacgagcacgtgcctgaaatcaacagcagtgatatgtcggcccacgtcaccagcccctctggccgtgtgactgaggcagagattgtgcccatggggaagaactcacactgcgtccggtttgtgccccaggagatgggcgtgcacacggtcagcgtcaagtaccgtgggcagcacgtcaccggcagccccttccagttcaccgtggggccacttggtgaaggaggcgcccacaaggtgcgggcaggaggccctggcctggagagaggagaagcgggagtcccagctgagttcagcatttggacccgggaagcaggcgctggaggcctctccatcgctgttgagggccccagtaaggccgagattacattcgatgaccataaaaatgggtcgtgcggtgtatcttatattgcccaagagcctggtaactacgaggtgtccatcaagttcaatgatgagcacatcccggaaagcccctacctggtgccggtcatcgcaccctccgacgacgcccgccgcctcactgttatgagccttcaggaatcgggattaaaagttaaccagccagcatcctttgctataaggttgaatggcgcaaaaggcaagattgatgcaaaggtgcacagcccctctggagccgtggaggagtgccacgtgtctgagctggagccagataagtatgctgttcgcttcatccctcatgagaatggtgtccacaccatcgatgtcaagttcaatgggagccacgtggttggaagccccttcaaagtgcgcgttggggagcctggacaagcggggaaccctgccctggtgtccgcctatggcacgggactcgaagggggcaccacaggtatccagtcggaattctttattaacaccacccgagcaggtccagggacattatccgtcaccatcgaaggcccatccaaggttaaaatggattgccaggaaacacctgaagggtacaaagtcatgtacacccccatggctcctggtaactacctgatcagcgtcaaatacggtgggcccaaccacatcgtgggcagtcccttcaaggccaaggtgacaggccagcgtctagttagccctggctcagccaacgagacctcatccatcctggtggagtcagtgaccaggtcgtctacagagacctgctatagcgccattcccaaggcatcctcggacgccagcaaggtgacctctaagggggcagggctctcaaaggcctttgtgggccagaagagttccttcctggtggactgcagcaaagctggctccaacatgctgctgatcggggtccatgggcccaccaccccctgcgaggaggtctccatgaagcatgtaggcaaccagcaatacaacgtcacatacgtcgtcaaggagaggggcgattatgtgctggctgtgaagtggggggaggaacacatccctggcagcccttttcatgtcacagtgccttaaaacagttttctcaaatcctggagagagttcttgtggttgcttttgttgcttgtttgtaattcattttatacaaagccctccagcctgtttgtggggctgaaaccccatccctaaaatattgctgttgtaaaatgccttcagaaataagtcctagactggactcttgagggacatattggagaatcttaagaaatgcaagcttgttcagggggctgagaagatcctgagtacactaggtgcaaaccagaactcttggtggaacagaccagccactgcagcagacagaccaggaacacaatgagactgacatttcaaaaaaacaaaactggctagcctgagctgctggttcactcttcagcatttatgaaacaaggctaggggaagatgggcagagaaaaaggggacacctagtttggttgtcatttggcaaaggagatgacttaaaatccgcttaatctcttccagtgtccgtgttaatgtatttggctattagatcactagcactgctttaccgctcctcatcgccaacacccccatgctctgtggccttcttacacttctcagagggcagagtggcagccgggcaccctacagaaactcagagggcagagtggcagccaggcccacatgtctctcaagtacctgtcccctcgctctggtgattatttcttgcagaatcaccacacgagaccatcccggcagtcatggttttgctttagttttccaagtccgtttcagtcccttccttggtctgaagaaattctgcagtggcgagcagtttcccacttgccaaagatcccttttaaccaacactagcccttgtttttaacacacgctccagcccttcatcagcctgggcagtcttaccaaaatgtttaaagtgatctcagaggggcccatggattaacgccctcatcccaaggtccgtcccatgacataacactccacacccgccccagccaacttcatgggtcactttttctggaaaataatgatctgtacagacaggacagaatgaaactcctgcgggtctttggcctgaaagttgggaatggttgggggagagaagggcagcagcttattggtggtcttttcaccattggcagaaacagtgagagctgtgtggtgcagaaatccagaaatgaggtgtagggaattttgcctgccttcctgcagacctgagctggctttggaatgaggttaaagtgtcagggacgttgcctgagcccaaatgtgtagtgtggtctgggcaggcagacctttaggttttgctgcttagtcctgaggaagtggccactcttgtggcaggtgtagtatctggggcgagtgttgggggtaaaagcccaccctacagaaagtggaacagcccggagcctgatgtgaaaggaccacgggtgttgtaagctgggacacggaagccaaactggaatcaaacgccgactgtaaattgtatcttataacttattaaataaaacatttgctccgtaaagttg

SEQ ID NO: 117906 - DNA, 7809 bp, Artificial Sequence
  derived and/or modified sequence
atgcccgtgacagagaaagatctggccgaggatgcaccatggaagaagattcagcagaataccttcacacggtggtgtaacgagcaccttaaatgtgtgaacaaacgtatcggaaatttgcagaccgatctgtctgacggtctcagactgattgccctactcgaagtactgtctcagaaacgcatgtacaggaaatatcaccagcggcctaccttccgtcagatgcagcttgaaaacgtttcagtcgctctggaattccttgacagggagtctatcaagctggtgagcatagactcgaaagctatcgtagacgggaacttgaaactgattcttggtttggtctggactctcatattgcattacagtataagtatgcccgtttgggaggatgaaggagacgacgatgcaaagaaacagacacccaaacagcgcttactgggatggatccagaacaagatcccttatctaccgatcactaatttcaaccagaattggcaggacggaaaggctttaggggcattggtagattcttgtgcgcccggactttgcccagattgggagagctgggatccccagaaaccagtggataacgctagagaagctatgcagcaggcggatgactggcttggagtcccgcaagtcatcacccccgaagaaatcattcatccagacgtagacgagcactcggtcatgacttatttgtcccagttcccaaaggcaaagctcaaacccggtgcccccctgaagccgaagcttaaccccaagaaagcgcgggcatatgggagaggcattgaacccaccggtaacatggtgaaacagcccgccaaattcacggtagatacgatatctgcagggcagggcgatgtgatggtgttcgttgaagaccccgagggcaacaaagaggaagcacaggtcacccccgattcagataagaataagacctattctgttgagtacctgcccaaagtaacgggactgcataaggtcacagtcctattcgctggccagcacatttctaagtcgccattcgaagtgagtgtggataaggcccagggcgatgcgtctaaggtaaccgccaagggtcccggattagaagccgtgggcaacatcgccaacaaaccaacgtactttgatatttacaccgccggagcgggtgttggcgatattggggtggaggtggaggatcctcagggcaaaaacactgtggaactcttggtggaagacaagggcaatcaggtgtatcgctgcgtctataaacccatgcagccagggccccacgtggtgaagatattcttcgccggagacacaatcccgaagagccctttcgtcgtgcaagtcggcgaagcctgcaaccctaacgcatgccgcgctagtgggcgcggactccagcccaagggcgttcggattcgggagaccaccgactttaaggttgatacaaaggccgctggctctggcgagttgggagttacaatgaagggacctaaaggacttgaagagctggtcaagcagaaagacttcctggacggagtgtacgctttcgaatactacccttctaccccaggaagatactccatcgctatcacgtggggcgggcaccacattcccaaatctccgtttgaagtgcaggtgggaccagaagccggcatgcaaaaggtccgggcttggggccccgggctgcacggggggattgtaggtaggtccgctgattttgtcgtggagtccatcggctctgaggttgggtctctgggtttcgccatagagggcccctcccaagcgaagattgaatataatgatcagaatgacggctcgtgtgatgtgaagtattggcctaaggagcctggggaatatgcggttcatatcatgtgcgatgatgaagacatcaaagacagtccttacatggcttttatccacccagctacgggtggctacaaccctgatctggtgagggcttatggcccaggcctggaaaagtccggctgcattgtaaacaacctcgctgaattcactgtggacccgaaggacgcgggcaaagccccactcaagatttttgctcaggacggcgaggggcagagaatagacatccagatgaaaaacaggatggacggtacctatgcgtgcagttatactccagtaaaagcgatcaagcatacaatcgccgtggtttgggggggagttaatatcccccactccccgtaccgggtcaatattggacagggcagtcaccctcagaaggtgaaggtatttggccccggggtggaaagatctggcttgaaagccaacgagcccacacactttacagtggactgcaccgaggctggagagggtgacgtctctgtgggaattaaatgtgatgcgcgggtactgagtgaagatgaggaagatgtagatttcgatattatccacaacgcgaatgatacatttacagttaaatacgttccccctgcagcaggaaggtacaccatcaaggtgttgtttgcgtcccaagagatccccgcctcgccattccgcgttaaggtcgatccttcccacgacgccagtaaagtaaaggccgagggtcccggcctctccaaggcaggcgtcgaaaatgggaaacctacacacttcaccgtgtatacaaaaggggcagggaaagcacccctaaacgtgcagttcaatagtccattgcccggtgatgctgtgaaggatctggatattattgataattacgattactctcataccgttaagtacacacccactcagcaaggcaacatgcaggtgctcgtgacatacggtggagaccctattccaaaatcccctttcaccgtgggagttgctgcccccctcgacttgagcaagattaaactcaatggtctggaaaacagagtggaagttgggaaagatcaggaattcaccgtggacactcgcggcgccggcgggcagggcaaactcgacgttacgattctttctccaagcaggaaagtggtgccatgtctggtcacaccagtgacaggtcgcgagaacagcacagcaaaatttattcctcgcgaagaaggtctttacgctgtggatgtaacctatgacgggcaccccgtacctggaagcccatataccgtggaggccagcctgcccccagacccctcaaaagtaaaggcacatggccctggtttggaaggggggttggttggtaagcccgccgaatttaccatagacaccaaaggcgccggaaccggaggccttggtctgacggtggagggaccatgtgaagcaaagatcgaatgcagcgataacggcgatggtacctgctctgtcagctacctacctaccaagccaggagaatattttgtgaatatactttttgaggaagtccatatcccaggctccccgttcaaagccgatattgagatgcccttcgaccccagcaaggtcgtggctagtgggcctgggctggagcatggaaaagtgggtgaggccggcctactttcagtagattgcagcgaagcagggccaggagcgcttggcttggaggccgtctccgactcaggcactaaagctgaggtaagcatccaaaacaataaggacggaacttacgccgtgacgtacgtgccactcacagctggcatgtatactttaactatgaagtatggaggcgaattggtccctcactttcctgcccgcgtgaaggttgagccggccgtcgacacctcacgcatcaaagtctttggcccaggtattgagggcaaggatgtcttcagagaggctacgaccgactttaccgtggatagtcgccccttaacgcaggtgggaggcgatcacatcaaagctcacatcgctaacccaagcggcgctagcacagagtgctttgttaccgacaatgccgacggtacatatcaggtggaatacacccccttcgagaagggcctgcatgtggtagaggtaacatatgacgacgtgccaatccccaattccccttttaaggtggctgtgacagaaggatgtcagccttcacgggtgcaggcccaaggtcccggcctgaaggaagcgtttactaataagccaaatgtcttcacagtggtgactaggggagccgggattggtgggctgggcatcactgtcgaaggaccctccgaatctaagatcaactgcagagacaataaggatgggagttgttcagctgagtacatccctttcgccccaggggactacgatgtcaacattacatacggcggcgcccacattcctggcagtcccttccgtgtcccagtcaaagatgtagtagacccatccaaagtgaagatcgcaggacctgggctcgggtccggtgtacgggctcgggttttgcagagcttcaccgtggactccagcaaggctgggcttgcgcctttggaagtgcgagtactcggacctcgcggactggtcgaaccggtcaatgtggtcgataacggagatggcacccatactgtcacctatacaccctctcaggaagggccttacatggtcagtgtgaagtatgccgacgaggagatccctcgctcgccattcaaggtgaaagtgctgcctacatatgacgccagtaaagtcactgcatctggcccagggctctccagctatggcgtgccagcttctctgcccgtggacttcgcaatcgacgcccgcgacgcaggcgaggggctgctggctgtgcaaatcaccgaccaggaaggaaagccaaaacgggccatcgttcatgataacaaagacggtacatacgccgttacttacatccctgataagactggtagatacatgatcggagtcacttacggcggcgatgacattcctctgagcccttacaggatacgggctacgcagaccggcgatgccagcaaatgcctggctacaggccccggcattgcaagtaccgtgaaaacaggagaggaggttggctttgtggtggacgcaaagactgccggcaagggcaaggtcacatgcactgtgctgacgcctgacgggacggaggctgaagctgacgtcattgagaacgaggacgggacctacgatattttctacacagccgctaagcctgggacttatgtcatttacgtgcgcttcggcggagtggatatcccaaacagcccctttaccgtcatggctaccgacggtgaagtgaccgccgtggaggaggcacccgtcaacgcatgtccaccaggcttccggccttgggttactgaagaggcctatgtgcctgtgtctgacatgaacggactggggtttaagccctttgatcttgtgatacccttcgccgtgcggaagggtgagataaccggagaggtacacatgccttctggaaaaacagctactccggaaattgtcgacaataaagatggcactgtgacagtgcgctatgcgcctactgaagtggggttgcacgaaatgcacataaaatacatgggatcccacatcccggagtccccattacagttttatgtgaattatcccaactctggctccgtatcagcatacggacctgggctcgtctatggcgtggctaacaaaactgctacttttacgattgtaacagaagatgcaggagaggggggtctcgatttagcaatcgaaggcccctccaaagctgagattagttgtatcgataataaggatggcacatgtacggtgacctatctccccacactgccaggagactatagtatcctggtgaagtataacgataaacatatacccggaagtcctttcactgctaaaattaccgacgactcacgtaggtgctctcaggtcaaactcggatcggcagcagattttctgctcgacatatccgagaccgatctttcatcactgaccgcgagcatcaaagcccccagcggtagggacgaaccatgcctcctaaagcggctccccaataaccatattggtatcagctttattcccagggaagtcggcgaacacctggtgtctatcaaaaagaatggtaaccacgtggccaactcgccagtgtctatcatggtggtgcagtcagaaataggagatgctcgacgagccaaggtttatggcaggggacttagtgaaggccggaccttcgagatgtcagatttcatagtcgacacacgtgatgcgggatatggtggcatctctttggctgtagagggcccgtccaaagtggatattcagacggaagacctcgaagacggcacctgtaaagtgtcctattttcccacagtgcctggagtgtacattgtgtccacaaaattcgccgatgagcacgtgcctgggagtccatttaccgtgaaaattagcggggaaggaagagtcaaggaatccataacgagaacttctagggctccaagcgtggctacggtgggttcaatttgcgatttaaaccttaagatccctgagattaatagcagcgacatgtcagcacatgtgacaagtccttctgggcgagttacagaggccgagatcgtgcctatgggcaagaatagccattgcgtccgattcgtgccacaggagatgggagttcacactgtgtctgtgaagtatcgaggccagcacgtgacgggatccccttttcagtttacagttgggccccttggtgaaggcggagcccacaaggtcagagctggaggtcctggacttgagaggggggaggccggagttcctgccgagttttctatttggactcgagaggcaggggctggcggtctgtccatagcagttgaaggcccttcaaaagctgagataacctttgacgaccataagaacggttcatgtggtgtgtcctatatcgcacaggaaccaggtaattacgaagtatcaattaaatttaatgatgagcacatcccagagagcccctacttggtgcctgtaatcgctccatccgacgacgctaggcgccttaccgtgatgtcattgcaagaatctggtctcaaagtgaaccagccagccagcttcgctatacggcttaacggtgctaagggaaaaatagacgctaaggtccatagcccaagtggcgccgtagaagagtgtcacgtgagtgaattagagccagataaatatgctgtccggtttatcccccacgagaatggtgtccataccattgacgtcaagtttaacggctcacatgtggttgggtctccattcaaggtcagggtaggagagccaggccaggcaggtaacccagctttagttagtgcctatggcaccggattggagggcggtactactggcatccagtctgagtttttcattaacaccactagggctggccccggcacactgtctgtcactatagaggggccttctaaagtgaagatggactgtcaagagactccagaaggctataaagtcatgtacaccccaatggcacctggcaattacctcatctccgtgaaatacgggggccccaaccacatcgtgggaagcccctttaaagcaaaagtcaccggccagcggctcgtgtctccggggtctgctaacgagacaagctctattctagttgagagcgtcacaagaagtagtaccgagacttgctactccgcaattcctaaggccagcagcgacgcctctaaggtgactagcaagggagctggcctcagtaaggcttttgttgggcaaaaatcatctttccttgttgattgtagcaaggcagggtctaatatgcttttaattggagtgcacggccccactacgccctgcgaagaggtgagtatgaagcacgttggaaaccaacaatataacgtcacatatgtggtgaaggagagaggtgactatgttctagcagttaaatggggtgaggaacatatccccggcagtccatttcatgtgaccgttccctag

SEQ ID NO: 117907 - DNA, 7686 bp, Artificial Sequence
  derived and/or modified sequence
atgccagtcacagagaaagacctcgccgaagacgccccatggaaaaagatccagcaaaacacattcacacgatggtgcaacgaacacctgaagtgcgtcaataaacggatcgggaacctacaaactgatctgagtgacggcctgcggctgattgccttactcgaggttctatctcagaagcgcatgtatcgaaagtatcaccaacgccccactttccgacagatgcagctagagaatgtgtccgtggctctggagttccttgatcgagagtcgattaaattggtcagcatagatagtaaggctatcgtcgacggtaacctgaagttgattctcggcctagtgtggacgctgattctccattacagcattagtatgccagtttgggaggatgaaggcgacgacgacgcaaaaaaacagacacccaaacaacgcctgcttggctggattcagaacaaaataccctacctgccgattactaacttcaaccagaactggcaggacggtaaggccctcggcgccctcgtggattcatgcgcccccggactctgtcctgattgggaatcctgggatcctcagaaaccagtggacaacgcccgggaggccatgcagcaggccgacgactggctcggtgtgccccaagtgatcactccggaggagataattcacccagacgtggatgaacattccgttatgacctacctgtcgcagtttcccaaggccaagctgaaaccaggcgccccactgaaacccaaactgaaccccaagaaagcacgggcctatgggcgggggattgagcctactgggaatatggtgaaacaacctgctaagtttaccgtggatacaatatccgccgggcaaggggacgtgatggtgtttgttgaagaccctgagggcaacaaggaggaggctcaggtcacccctgatagtgacaaaaacaagacatacagtgtagaatacctccccaaagtcaccggcttacacaaggtaaccgtgctctttgccggacaacacatcagtaaatcacctttcgaagtctccgtcgataaggcccagggtgatgctagcaaggttactgctaagggcccaggcctggaagctgtgggaaatatcgctaacaaacctacctactttgacatttacacagccggggccggcgtgggtgacattggggtggaggtggaggatccccagggcaagaatactgtcgaactgttggtggaggacaagggcaaccaggtttaccggtgcgtctacaagccaatgcaaccgggcccccatgtcgttaagatttttttcgctggcgacacaatccccaagtcacccttcgtagtgcaggtaggcgaagcatgtaaccccaacgcttgcagggcttccggtagaggacttcagcctaaaggggttagaatccgcgaaactaccgattttaaggtcgacaccaaggccgccgggtctggcgagctcggcgtaactatgaagggcccaaagggactggaggagctcgtgaaacagaaggacttcctggacggcgtttacgcgttcgaatactacccctctactcccggccggtatagtattgccatcacatgggggggtcaccacattcccaagtccccatttgaagttcaggtgggcccggaggctggcatgcagaaggtcagagcttgggggcctggattgcatggaggaatcgtgggccgctctgcagacttcgtagtggagagcatcgggtctgaggtgggcagtctgggctttgccattgagggccccagccaggctaaaatagagtataacgaccaaaacgatggaagttgtgacgttaagtattggccaaaggaacccggagagtatgcagtccacattatgtgtgatgatgaggacattaaggactcaccttatatggcgtttattcaccctgccacaggtggatataatcccgatctcgtcagggcttacggccctggccttgaaaagagtgggtgtatcgtcaataatctggctgaatttaccgtcgatccaaaggacgccggtaaagcaccattgaaaattttcgcacaggatggggagggacagcggatcgacattcagatgaagaaccgcatggacgggacttacgcctgcagctacacccctgtgaaggccatcaaacacaccatagcggttgtatgggggggagtgaatattcctcacagtccatacagggtgaacattgggcaagggagccacccgcaaaaagtgaaggtctttggacccggggtggagcgatcaggcctgaaggccaacgaaccaactcactttacggtggactgcacggaagccggcgaaggtgacgtgtccgtgggcattaaatgtgatgcaagagtactgtctgaggacgaagaagatgttgatttcgacattatacacaacgccaacgatacattcacagtcaaatacgttcccccagcagctggaagatatacaatcaaagttctgttcgcaagtcaggagatcccagccagccccttcagggtgaaggtagacccctcccacgacgcctctaaagtcaaggccgaaggccctggtctttccaaagctggagtggaaaatggaaagcctactcacttcacagtttacactaagggagccggaaaagcccccctcaatgtgcagtttaacagccctttacctggcgatgccgttaaagacctcgacatcatcgacaactacgattacagccatacggtgaagtatacaccaacgcagcagggaaacatgcaagtgctggttacttacggaggtgatccaatacctaagtctccctttaccgtgggggtcgctgccccattagatctatctaagattaagttaaacgggttggaaaatagagtcgaagtcggcaaagatcaggagttcaccgtggatacgcggggagctggcggccaagggaagctggacgtcacaatcctgtctccgtccagaaaagtagtgccgtgtctggtgacacccgtgactggacgcgagaactcaaccgcgaagttcattcctcgcgaagagggtctctacgctgtggacgtgacctatgacggtcaccccgtccccggctctccttacacagtggaagcctctctcccgcctgacccaagtaaagtgaaagctcatggacctgggctcgagggcggtctggtcggaaagccggcagaatttaccattgacacaaaaggcgcaggcaccgggggcctcgggctgaccgttgaaggcccctgcgaagccaagatcgagtgctccgacaacggcgacggtacatgctctgtatcctacctgcctacaaaacccggagagtattttgtgaatatactcttcgaggaagtccacatacctgggagtccctttaaagccgacattgagatgccattcgatccctctaaggtcgtggcgtccggcccgggtctggaacacggcaaggtgggcgaggcaggcttactcagtgtggattgctcagaggctggccccggcgctctgggcctcgaggctgtgtctgacagcggcaccaaagcagaggtttctatacagaataataaagacgggacgtacgcagtgacctatgtccccctgacggcaggaatgtataccctgacgatgaagtacgggggcgagttggttccacactttcccgctagagttaaggttgagccagctgtcgatacctcccgcataaaagtttttggaccaggcatcgaagggaaggacgtgtttcgcgaagcaactaccgactttacagtcgattcaaggccgcttacccaggtcgggggcgatcatatcaaggctcatatcgcaaacccttcaggggcctcgacagagtgttttgtgaccgataatgcagatggcacctaccaggttgagtacactccatttgaaaaaggcctgcacgtggttgaggttacctatgacgacgtgccgattccgaattctcccttcaaagtagcagttacggaaggctgccaaccctcaagggtccaggcacagggcccaggattgaaggaggccttcactaataaacccaacgttttcacagtggtgactcggggagccggaatcgggggactcggcataacggttgaaggcccttcagagagcaagattaactgtcgtgacaacaaggatggctcctgcagcgcagagtatatccctttcgcgccgggcgactacgacgtgaatattacctacggaggagcacatatcccaggctccccatttcgagtacctgtcaaagatgtcgtggacccttctaaggtcaaaattgctgggcccggactgggctctggcgttcgggcacgcgtcctccagtcattcaccgtcgacagctccaaggccggcctcgccccccttgaagtgagggtgctgggtccgcgcggcctggttgaacccgtcaatgtcgtcgacaatggcgacggcacccacaccgtgacatacacgcccagccaagagggcccttatatggtctccgtgaagtatgctgatgaagagataccccgctctcctttcaaggtgaaggtccttcccacttacgatgctagcaaggtgaccgcctcgggcccaggcctgagtagctacggcgtccctgccagtctccccgtggactttgccattgacgccagggatgccggagaagggcttcttgctgtccagataacagatcaagagggcaaaccaaagagggcaatcgtacacgataataaagacggtacatatgcggtgacctatatccctgacaagacagggcgctacatgattggggtgacttatggaggcgacgatatccctctctctccatatcgcattcgagcgactcagaccggtgacgctagtaaatgtctcgcaaccggacccgggatagcttcaaccgtgaagacgggggaggaggtcggattcgtcgtggacgcaaagaccgctggaaaggggaaagtgacctgcaccgtcctgacacccgacgggaccgaagccgaggctgacgttattgagaacgaagacggtacctacgacattttttacactgccgccaaacccggaacatatgtcatctacgtcaggttcggaggcgtggatatccctaattcaccatttacagtaatggcaacagacggcgaggtgacagctgtagaggaagcccccgtgaacgcctgtccaccaggttttagaccctgggtgaccgaggaagcctatgtacccgtgagcgatatgaacgggttaggctttaaacccttcgacctcgttatcccattcgccgtgcgtaaaggtgagattacgggtgaagtccatatgccttcaggaaagacagctactccagaaatcgtggacaacaaggatgggacagtgacagtgagatatgcccccacggaagtgggactacatgaaatgcacattaagtacatgggttctcatatacctgagtctccactgcaattttacgtgaattatcctaactccggcagcgtgtcagcctatggccccggcctcgtttacggagtggcaaacaaaactgcgacattcaccatcgtgacagaggatgccggcgagggtggcctcgatctggcaattgaggggcctagtaaagcagaaataagctgcattgacaataaagacggaacctgcactgtgacgtacttaccgacgctgcctggggactattctatcctggttaaatataacgataaacatattcccggctcaccctttactgccaagattaccgatgatagcagacgttgctcccaggtcaagctcggatctgccgcagatttcctcttggatatcagcgagaccgatctctcctccctgacagcgagcattaaggcaccctcggggagggacgaaccttgtctgctaaagcggcttcctaataaccatatagggatctcttttatccctcgcgaggtgggtgaacacctggtctcaattaaaaagaatgggaaccatgttgcgaattcaccggtatccatcatggtcgtgcagagtgagatcggggacgctagacgtgctaaggtttatgggaggggcttgtcagagggaagaacctttgagatgagtgactttatcgtggacaccagagacgccggatacggggggatctcactcgccgtggaaggaccgtctaaggtcgatattcagactgaggacctcgaagatggcacgtgtaaagtgagctactttccaaccgttccgggcgtgtacatcgtcagcactaaatttgctgatgagcacgtgccggagatcaacagcagcgatatgtcagctcatgtgacctcaccttccggccgcgtcaccgaagcagagatcgtgccgatggggaagaattctcactgcgtgcgttttgtgccgcaggaaatgggcgtccacaccgtttcagttaaatataggggccagcacgttacagggtctccctttcagttcaccgtgggacctttgggcgaaggtggggctcataaagtgagagcaggcgggcctggccttgagaggggggaagccggtgtgcccgcagagttctccatctggaccagggaggccggcgccggcgggctgtccatcgcggtggagggcccgagcaaggcggagatcacctttgacgatcataagaacggtagttgcggggtgagttatatcgctcaggagccgggaaactacgaagtatctataaaatttaacgacgagcacatcccggagtccccgtatttagtgcctgtcattgcacctagtgacgacgcccggagactgacggtcatgagcctgcaggaatccgggttgaaagtcaaccaacccgccagctttgccattagattgaacggagccaaaggcaaaattgatgccaaggtgcactcaccatctggggcagttgaggagtgccatgtttcggaattggagcctgacaagtatgccgtcaggttcattcctcacgagaacggagtacataccatagatgtgaaatttaacggaagtcacgtcgtgggtagcccttttaaagtacgagttggggaacctggtcaggccggaaaccccgccctggtgtcggcctatggcacaggtctggaagggggtacaaccggtattcaatctgaattttttatcaacactactcgggcgggccctgggacattgtcagtcaccatagaaggcccgtccaaagtgaaaatggattgccaggaaacacccgaggggtacaaagtcatgtacacaccaatggcccccgggaattaccttatctctgtgaaatacggtggtccaaaccacatcgtgggttcgccctttaaagctaaggtaacgggacagagattagtgagtccaggctccgctaacgagacatcatccatcttggtggagtctgtgaccagatcttcaacggaaacgtgctactcagccatccccaaagctagttccgatgcttccaaagtcacatccaaaggcgctggcctgagcaaagcctttgtcggacagaagtcttcgttccttgtcgactgttcaaaggctggctccaacatgcttttaatcggggtccatggcccgacaacaccgtgcgaagaagtctcaatgaagcatgttggcaaccagcagtacaacgtgacttacgtggtcaaggagcggggcgattatgttcttgcagtgaaatggggcgaggagcacataccaggttctccatttcatgtgacggtgccttag

SEQ ID NO: 117908 - DNA, 7809 bp, Artificial Sequence
  derived and/or modified sequence
atgcctgtgacagagaaggacctggccgaggatgccccctggaagaagatccagcagaacaccttcacccgctggtgcaatgagcacctgaagtgtgtgaacaagagaattggcaacctgcagacagacctgagtgatggcctgcggctgattgccctgctggaggtgctgagccagaagaggatgtacaggaagtaccaccagaggcccaccttccggcagatgcagctggagaatgtgtctgtggccctggagttcctggaccgggagagcatcaagctggtgtccattgacagcaaggccatcgtggatggcaacctgaagctgatcctgggcctggtgtggaccctcatcctgcactacagcatctccatgcctgtgtgggaggatgaaggagatgatgatgccaagaagcagacccccaagcagaggctgctgggctggatccagaacaagatcccctacctgcccatcaccaacttcaaccagaactggcaggacggcaaggccctgggcgccctggtggacagctgtgcccctggcctgtgcccagactgggagagctgggacccccagaagcctgtggacaatgcccgggaggccatgcagcaggctgatgactggctgggcgtgccccaggtgatcaccccagaggagatcatccacccagatgtggatgagcacagcgtgatgacctacctgagccagttccccaaggccaagctgaagccaggggcccccctgaagcccaagctgaaccccaagaaggcccgggcctacggccggggcatcgagcccactggaaacatggtgaagcagcctgccaagttcaccgtggacaccatctctgctggccagggagatgtgatggtgtttgtggaggaccctgagggcaacaaggaggaggcccaggtgaccccagacagcgacaagaacaagacctacagcgtggagtacctgcccaaggtgacaggcctgcacaaggtgacagtgctgtttgctggccagcacatcagcaagagcccctttgaggtgtctgtggacaaggcccagggagatgccagcaaggtgacagccaagggccctggcctggaggccgtgggcaacatcgccaacaagcccacctactttgacatctacacagctggggccggcgtgggggacattggagtggaggtggaggacccccagggcaagaacacagtggagctgctggtggaggacaagggcaaccaggtgtaccgctgtgtgtacaagcccatgcagcccggcccccacgtggtgaagatcttctttgctggggacaccatccccaagagcccctttgtggtgcaggtgggggaggcctgcaaccccaatgcctgccgggccagcggccggggcctgcagcccaagggcgtgcgcatccgggagaccacagacttcaaggtggacaccaaggccgccggcagcggggagctgggcgtgaccatgaagggccccaagggcctggaggagctggtgaagcagaaggacttcctggatggagtgtatgcctttgagtactaccccagcaccccaggccgctacagcatcgccatcacctggggcggccaccacatccccaagagcccctttgaggtgcaggtgggccctgaggccggcatgcagaaggtgcgggcctggggccctggcctgcacggcggcatcgtgggccgctctgctgactttgtggtggagagcatcggcagcgaggtgggcagcctgggctttgccatcgagggccccagccaggccaagattgagtacaatgaccagaatgatggcagctgtgatgtgaagtactggcccaaggagcctggagaatatgctgtgcacatcatgtgtgatgatgaggacatcaaggacagcccctacatggccttcatccacccagccaccggcggctacaacccagacctggtgcgggcctacggccctggcctggagaagagcggctgcatcgtgaacaacctggccgagttcaccgtggaccccaaggatgctgggaaggcccccctgaagatctttgcccaggatggagagggccagagaattgacatccagatgaagaacaggatggatggcacctacgcctgcagctacacccctgtgaaggccatcaagcacaccatcgctgtggtgtggggcggcgtgaacatcccccacagcccctacagagtgaacatcggccagggcagccacccccagaaggtgaaggtgtttggacctggggtggagaggagcggcctgaaggccaatgagcccacccacttcaccgtggactgcacagaggccggggagggagatgtgtctgtgggcatcaagtgtgatgcccgggtgctgtctgaagatgaagaagatgtggactttgacatcatccacaatgccaatgacaccttcaccgtgaagtatgtgcccccagctgctggccgctacaccatcaaggtgctgtttgccagccaggagatcccagccagccccttccgggtgaaggtggaccccagccatgatgccagcaaggtgaaggccgagggccctggcctgagcaaggccggcgtggagaatggcaagcccacccacttcaccgtgtacaccaagggagctgggaaggcccccctgaatgtgcagttcaacagccccctgcctggagatgctgtgaaggacctggacatcatcgacaactatgactacagccacacagtgaagtacacccccacccagcagggcaacatgcaggtgctggtgacctacggcggggaccccatccccaagagccccttcaccgtgggcgtggccgcccccctggacctgagcaagatcaagctgaatggcctggagaacagagtggaggtgggcaaggaccaggagttcaccgtggacaccagaggagctgggggccagggcaagctggatgtgaccatcctgagccccagcaggaaggtggtgccctgcctggtgacccctgtgacaggccgggagaacagcacagccaagttcatcccccgggaggagggcctgtatgctgtggatgtgacctatgatggccaccctgtgcccggcagcccctacacagtggaggccagcctgcccccagaccccagcaaggtgaaggcccacggccctggcctggagggcggcctggtgggcaagccagctgagttcaccatcgacaccaagggggccggcaccggcggcctgggcctgactgtggagggcccctgtgaggccaagattgagtgcagcgacaatggagatggcacctgcagcgtgtcctacctgcccaccaagccaggagagtactttgtgaacatcctgtttgaggaggtgcacatccctggcagccccttcaaggctgacatcgagatgccctttgaccccagcaaggtggtggccagcggccctggcctggagcacggcaaggtgggggaggccggcctgctgtctgtggactgcagcgaggccggccctggggccctgggcctggaggccgtgtctgacagcggcaccaaggccgaggtgtccatccagaacaacaaggatggcacctatgctgtgacctacgtgcccctgacagctggcatgtacaccctgaccatgaagtatggaggagagctggtgccccacttccctgcccgggtgaaggtggagcctgctgtggacaccagccgcatcaaggtgtttggacctggcatcgagggcaaggatgtgttccgggaggccaccacagacttcaccgtggacagccggcccctgacccaggtgggcggggaccacatcaaggcccacatcgccaaccccagcggggccagcacagaatgttttgtgacagacaatgctgatggcacctaccaggtggagtacaccccatttgagaagggcctgcacgtggtggaggtgacctatgatgatgtgcccatccccaacagccccttcaaggtggccgtgacagagggctgccagcccagccgggtgcaggcccagggccctggcctgaaggaggccttcaccaacaagcccaacgtgttcaccgtggtgaccaggggggccggcatcggcggcctgggcatcaccgtggagggccccagcgagagcaagatcaactgccgggacaacaaggatggcagctgcagcgctgagtacatcccctttgcccctggggactatgatgtgaacatcacctatggaggagcccacatccctggcagccccttccgggtgcctgtgaaggatgtggtggaccccagcaaggtgaagattgctggccctggcctgggcagcggcgtgcgggcccgggtgctgcagagcttcaccgtggacagcagcaaggccggcctggcccccctggaggtgcgggtgctgggcccccggggcctggtggagcctgtgaatgtggtggacaatggagatggcacccacacagtgacctacacccccagccaggagggcccctacatggtgtctgtgaagtatgcagatgaggagatccccaggagccccttcaaggtgaaggtgctgcccacctatgatgccagcaaggtgacagccagcggccctggcctgagcagctatggagtgcctgccagcctgcctgtggactttgccattgatgccagagatgctggggagggcctgctggccgtgcagatcacagaccaggagggcaagcccaagagggccatcgtgcatgacaacaaggatggcacctatgctgtgacctacatcccagacaagacaggccgctacatgattggagtgacctatggaggagatgacatccccctgagcccctaccgcatccgggccacccagacaggagatgccagcaagtgcctggccaccggccctggcatcgccagcacagtgaagacaggagaggaggtgggctttgtggtggatgccaagacagctgggaagggcaaggtgacctgcaccgtgctgaccccagatggaacagaggccgaggctgatgtgattgaaaatgaagatggcacctatgacatcttctacacagctgccaagccaggcacctacgtgatctacgtgcgctttggaggagtggacatccccaacagccccttcaccgtgatggccacagatggagaggtgacagctgtggaggaggcccctgtgaatgcctgccccccaggcttccggccctgggtgacagaggaggcctacgtgcctgtgtctgacatgaatggcctgggcttcaagccctttgacctggtgatcccctttgctgtgaggaaaggagagatcactggagaggtgcacatgcccagcggcaagacagccaccccagagatcgtggacaacaaggatggcaccgtgacagtgcgctatgcccccacagaggtgggcctgcacgagatgcacatcaagtacatgggcagccacatccctgagagccccctgcagttctacgtgaactaccccaacagcggctctgtgtctgcctacggccctggcctggtgtatggagtggccaacaagacagccaccttcaccatcgtgacagaagatgctggggagggcggcctggacctggccatcgagggccccagcaaggccgagatcagctgcatcgacaacaaggatggcacctgcaccgtgacctacctgcccaccctgcccggggactacagcatcctggtgaagtacaatgacaagcacatccctggcagccccttcaccgccaagatcacagatgacagccgccgctgcagccaggtgaagctgggcagcgctgctgacttcctgctggacatcagcgagacagacctgagcagcctgacagccagcatcaaggcccccagcggcagagatgagccctgcctgctgaagaggctgcccaacaaccacatcggcatctccttcatcccccgggaggtgggggagcacctggtgtccatcaagaagaatggaaaccacgtggccaacagccctgtgtccatcatggtggtgcagagcgagattggagatgcccggcgggccaaggtgtatggccggggcctgtctgagggccgcacctttgagatgtctgacttcatcgtggacaccagagatgctggctacggcggcatcagcctggccgtggagggccccagcaaggtggacatccagacagaggacctggaggatggcacctgcaaggtgtcctacttccccaccgtgcctggggtgtacatcgtgtccaccaagtttgctgatgaacatgtgcccggcagccccttcaccgtgaagatcagcggggagggccgggtgaaggagagcatcaccaggaccagccgggcccccagcgtggccaccgtgggcagcatctgtgacctgaacctgaagatccctgagatcaacagcagtgacatgtctgcccacgtgaccagccccagcggccgggtgacagaagctgagatcgtgcccatgggcaagaacagccactgtgtgcgctttgtgccccaggagatgggcgtgcacacagtgtctgtgaagtaccggggccagcacgtgacaggcagccccttccagttcaccgtgggccccctgggggagggcggggcccacaaggtgcgggccggcggccctggcctggagcggggggaggccggcgtgcctgctgagttcagcatctggacccgggaggccggggccggcggcctgagcattgctgtggagggccccagcaaggccgagatcacctttgatgaccacaagaatggcagctgtggggtgtcctacatcgcccaggagcccggcaactatgaggtgtccatcaagttcaatgatgagcacatccctgagagcccctacctggtgcctgtgattgcccccagtgatgatgcccggcggctgactgtgatgagcctgcaggagagcggcctgaaggtgaaccagcctgccagctttgccatccggctgaatggagccaagggcaagattgatgccaaggtgcacagccccagcggggctgtggaggagtgccacgtgtctgagctggagccagacaagtatgctgtgcgcttcatcccccatgaaaatggagtgcacaccattgatgtgaagttcaacggcagccacgtggtgggcagccccttcaaggtgcgggtgggggagcccggccaggccggcaacccagccctggtgtctgcctacggcaccggcctggagggcggcaccaccggcatccagagcgagttcttcatcaacaccacccgggccggccctggcaccctgtctgtgaccatcgagggccccagcaaggtgaagatggactgccaggagaccccagagggctacaaggtgatgtacacccccatggcccctggcaactacctgatctctgtgaagtatggaggccccaaccacatcgtgggcagccccttcaaggccaaggtgacaggccagaggctggtgtccccaggcagcgccaatgagaccagcagcatcctggtggagagcgtgaccaggagcagcacagagacctgctacagcgccatccccaaggccagcagtgatgccagcaaggtgaccagcaagggggccggcctgagcaaggcctttgtgggccagaagagcagcttcctggtggactgcagcaaggccggcagcaacatgctgctgattggagtgcacggccccaccaccccctgtgaggaggtgtccatgaagcacgtgggcaaccagcagtacaacgtgacctacgtggtgaaggagcggggggactatgtgctggccgtgaagtggggcgaggagcacatccctggcagccccttccacgtgacagtgccctag

SEQ ID NO: 117909 - DNA, 7686 bp, Artificial Sequence
  derived and/or modified sequence
atgcctgtgacagagaaggacctggccgaggatgccccctggaagaagatccagcagaacaccttcacccgctggtgcaatgagcacctgaagtgtgtgaacaagagaattggcaacctgcagacagacctgagtgatggcctgcggctgattgccctgctggaggtgctgagccagaagaggatgtacaggaagtaccaccagaggcccaccttccggcagatgcagctggagaatgtgtctgtggccctggagttcctggaccgggagagcatcaagctggtgtccattgacagcaaggccatcgtggatggcaacctgaagctgatcctgggcctggtgtggaccctcatcctgcactacagcatctccatgcctgtgtgggaggatgaaggagatgatgatgccaagaagcagacccccaagcagaggctgctgggctggatccagaacaagatcccctacctgcccatcaccaacttcaaccagaactggcaggacggcaaggccctgggcgccctggtggacagctgtgcccctggcctgtgcccagactgggagagctgggacccccagaagcctgtggacaatgcccgggaggccatgcagcaggctgatgactggctgggcgtgccccaggtgatcaccccagaggagatcatccacccagatgtggatgagcacagcgtgatgacctacctgagccagttccccaaggccaagctgaagccaggggcccccctgaagcccaagctgaaccccaagaaggcccgggcctacggccggggcatcgagcccactggaaacatggtgaagcagcctgccaagttcaccgtggacaccatctctgctggccagggagatgtgatggtgtttgtggaggaccctgagggcaacaaggaggaggcccaggtgaccccagacagcgacaagaacaagacctacagcgtggagtacctgcccaaggtgacaggcctgcacaaggtgacagtgctgtttgctggccagcacatcagcaagagcccctttgaggtgtctgtggacaaggcccagggagatgccagcaaggtgacagccaagggccctggcctggaggccgtgggcaacatcgccaacaagcccacctactttgacatctacacagctggggccggcgtgggggacattggagtggaggtggaggacccccagggcaagaacacagtggagctgctggtggaggacaagggcaaccaggtgtaccgctgtgtgtacaagcccatgcagcccggcccccacgtggtgaagatcttctttgctggggacaccatccccaagagcccctttgtggtgcaggtgggggaggcctgcaaccccaatgcctgccgggccagcggccggggcctgcagcccaagggcgtgcgcatccgggagaccacagacttcaaggtggacaccaaggccgccggcagcggggagctgggcgtgaccatgaagggccccaagggcctggaggagctggtgaagcagaaggacttcctggatggagtgtatgcctttgagtactaccccagcaccccaggccgctacagcatcgccatcacctggggcggccaccacatccccaagagcccctttgaggtgcaggtgggccctgaggccggcatgcagaaggtgcgggcctggggccctggcctgcacggcggcatcgtgggccgctctgctgactttgtggtggagagcatcggcagcgaggtgggcagcctgggctttgccatcgagggccccagccaggccaagattgagtacaatgaccagaatgatggcagctgtgatgtgaagtactggcccaaggagcctggagaatatgctgtgcacatcatgtgtgatgatgaggacatcaaggacagcccctacatggccttcatccacccagccaccggcggctacaacccagacctggtgcgggcctacggccctggcctggagaagagcggctgcatcgtgaacaacctggccgagttcaccgtggaccccaaggatgctgggaaggcccccctgaagatctttgcccaggatggagagggccagagaattgacatccagatgaagaacaggatggatggcacctacgcctgcagctacacccctgtgaaggccatcaagcacaccatcgctgtggtgtggggcggcgtgaacatcccccacagcccctacagagtgaacatcggccagggcagccacccccagaaggtgaaggtgtttggacctggggtggagaggagcggcctgaaggccaatgagcccacccacttcaccgtggactgcacagaggccggggagggagatgtgtctgtgggcatcaagtgtgatgcccgggtgctgtctgaagatgaagaagatgtggactttgacatcatccacaatgccaatgacaccttcaccgtgaagtatgtgcccccagctgctggccgctacaccatcaaggtgctgtttgccagccaggagatcccagccagccccttccgggtgaaggtggaccccagccatgatgccagcaaggtgaaggccgagggccctggcctgagcaaggccggcgtggagaatggcaagcccacccacttcaccgtgtacaccaagggagctgggaaggcccccctgaatgtgcagttcaacagccccctgcctggagatgctgtgaaggacctggacatcatcgacaactatgactacagccacacagtgaagtacacccccacccagcagggcaacatgcaggtgctggtgacctacggcggggaccccatccccaagagccccttcaccgtgggcgtggccgcccccctggacctgagcaagatcaagctgaatggcctggagaacagagtggaggtgggcaaggaccaggagttcaccgtggacaccagaggagctgggggccagggcaagctggatgtgaccatcctgagccccagcaggaaggtggtgccctgcctggtgacccctgtgacaggccgggagaacagcacagccaagttcatcccccgggaggagggcctgtatgctgtggatgtgacctatgatggccaccctgtgcccggcagcccctacacagtggaggccagcctgcccccagaccccagcaaggtgaaggcccacggccctggcctggagggcggcctggtgggcaagccagctgagttcaccatcgacaccaagggggccggcaccggcggcctgggcctgactgtggagggcccctgtgaggccaagattgagtgcagcgacaatggagatggcacctgcagcgtgtcctacctgcccaccaagccaggagagtactttgtgaacatcctgtttgaggaggtgcacatccctggcagccccttcaaggctgacatcgagatgccctttgaccccagcaaggtggtggccagcggccctggcctggagcacggcaaggtgggggaggccggcctgctgtctgtggactgcagcgaggccggccctggggccctgggcctggaggccgtgtctgacagcggcaccaaggccgaggtgtccatccagaacaacaaggatggcacctatgctgtgacctacgtgcccctgacagctggcatgtacaccctgaccatgaagtatggaggagagctggtgccccacttccctgcccgggtgaaggtggagcctgctgtggacaccagccgcatcaaggtgtttggacctggcatcgagggcaaggatgtgttccgggaggccaccacagacttcaccgtggacagccggcccctgacccaggtgggcggggaccacatcaaggcccacatcgccaaccccagcggggccagcacagaatgttttgtgacagacaatgctgatggcacctaccaggtggagtacaccccatttgagaagggcctgcacgtggtggaggtgacctatgatgatgtgcccatccccaacagccccttcaaggtggccgtgacagagggctgccagcccagccgggtgcaggcccagggccctggcctgaaggaggccttcaccaacaagcccaacgtgttcaccgtggtgaccaggggggccggcatcggcggcctgggcatcaccgtggagggccccagcgagagcaagatcaactgccgggacaacaaggatggcagctgcagcgctgagtacatcccctttgcccctggggactatgatgtgaacatcacctatggaggagcccacatccctggcagccccttccgggtgcctgtgaaggatgtggtggaccccagcaaggtgaagattgctggccctggcctgggcagcggcgtgcgggcccgggtgctgcagagcttcaccgtggacagcagcaaggccggcctggcccccctggaggtgcgggtgctgggcccccggggcctggtggagcctgtgaatgtggtggacaatggagatggcacccacacagtgacctacacccccagccaggagggcccctacatggtgtctgtgaagtatgcagatgaggagatccccaggagccccttcaaggtgaaggtgctgcccacctatgatgccagcaaggtgacagccagcggccctggcctgagcagctatggagtgcctgccagcctgcctgtggactttgccattgatgccagagatgctggggagggcctgctggccgtgcagatcacagaccaggagggcaagcccaagagggccatcgtgcatgacaacaaggatggcacctatgctgtgacctacatcccagacaagacaggccgctacatgattggagtgacctatggaggagatgacatccccctgagcccctaccgcatccgggccacccagacaggagatgccagcaagtgcctggccaccggccctggcatcgccagcacagtgaagacaggagaggaggtgggctttgtggtggatgccaagacagctgggaagggcaaggtgacctgcaccgtgctgaccccagatggaacagaggccgaggctgatgtgattgaaaatgaagatggcacctatgacatcttctacacagctgccaagccaggcacctacgtgatctacgtgcgctttggaggagtggacatccccaacagccccttcaccgtgatggccacagatggagaggtgacagctgtggaggaggcccctgtgaatgcctgccccccaggcttccggccctgggtgacagaggaggcctacgtgcctgtgtctgacatgaatggcctgggcttcaagccctttgacctggtgatcccctttgctgtgaggaaaggagagatcactggagaggtgcacatgcccagcggcaagacagccaccccagagatcgtggacaacaaggatggcaccgtgacagtgcgctatgcccccacagaggtgggcctgcacgagatgcacatcaagtacatgggcagccacatccctgagagccccctgcagttctacgtgaactaccccaacagcggctctgtgtctgcctacggccctggcctggtgtatggagtggccaacaagacagccaccttcaccatcgtgacagaagatgctggggagggcggcctggacctggccatcgagggccccagcaaggccgagatcagctgcatcgacaacaaggatggcacctgcaccgtgacctacctgcccaccctgcccggggactacagcatcctggtgaagtacaatgacaagcacatccctggcagccccttcaccgccaagatcacagatgacagccgccgctgcagccaggtgaagctgggcagcgctgctgacttcctgctggacatcagcgagacagacctgagcagcctgacagccagcatcaaggcccccagcggcagagatgagccctgcctgctgaagaggctgcccaacaaccacatcggcatctccttcatcccccgggaggtgggggagcacctggtgtccatcaagaagaatggaaaccacgtggccaacagccctgtgtccatcatggtggtgcagagcgagattggagatgcccggcgggccaaggtgtatggccggggcctgtctgagggccgcacctttgagatgtctgacttcatcgtggacaccagagatgctggctacggcggcatcagcctggccgtggagggccccagcaaggtggacatccagacagaggacctggaggatggcacctgcaaggtgtcctacttccccaccgtgcctggggtgtacatcgtgtccaccaagtttgctgatgaacatgtgcctgagatcaacagcagtgacatgtctgcccacgtgaccagccccagcggccgggtgacagaggccgagatcgtgcccatgggcaagaacagccactgtgtgcgctttgtgccccaggagatgggcgtgcacacagtgtctgtgaagtaccggggccagcacgtgacaggcagccccttccagttcaccgtgggccccctgggggagggcggggcccacaaggtgcgggccggcggccctggcctggagcggggggaggccggcgtgcctgctgagttcagcatctggacccgggaggccggggccggcggcctgagcattgctgtggagggccccagcaaggccgagatcacctttgatgaccacaagaatggcagctgtggggtgtcctacatcgcccaggagcccggcaactatgaggtgtccatcaagttcaatgatgagcacatccctgagagcccctacctggtgcctgtgattgcccccagtgatgatgcccggcggctgactgtgatgagcctgcaggagagcggcctgaaggtgaaccagcctgccagctttgccatccggctgaatggagccaagggcaagattgatgccaaggtgcacagccccagcggggctgtggaggagtgccacgtgtctgagctggagccagacaagtatgctgtgcgcttcatcccccatgaaaatggagtgcacaccattgatgtgaagttcaacggcagccacgtggtgggcagccccttcaaggtgcgggtgggggagcccggccaggccggcaacccagccctggtgtctgcctatggaacaggcctggagggcggcaccaccggcatccagagcgagttcttcatcaacaccaccagggctggccctggcaccctgtctgtgaccatcgagggccccagcaaggtgaagatggactgccaggagaccccagagggctacaaggtgatgtacacccccatggcccctggcaactacctgatctctgtgaagtatggaggccccaaccacatcgtgggcagccccttcaaggccaaggtgacaggccagaggctggtgtccccaggcagcgccaatgagaccagcagcatcctggtggagagcgtgaccaggagcagcacagagacctgctacagcgccatccccaaggccagcagtgatgccagcaaggtgaccagcaaaggagctggcctgagcaaggcctttgtgggccagaagagcagcttcctggtggactgcagcaaggccggcagcaacatgctgctgattggagtgcacggccccaccaccccctgtgaggaggtgtccatgaagcacgtgggcaaccagcagtacaacgtgacctacgtggtgaaggagcggggggactatgtgctggccgtgaagtggggcgaggagcacatccctggcagccccttccacgtgacagtgccctag

SEQ ID NO: 117910 - DNA, 7809 bp, Artificial Sequence
  derived and/or modified sequence
atgcccgtgaccgagaaggacctggccgaggacgccccctggaagaagatccagcagaacacgttcactaggtggtgcaatgagcatcttaagtgcgttaacaagcgcattggcaacttacagactgaccttagcgacggattgaggttaatagctttgttggaggtcctgagtcagaagaggatgtatagaaaatatcaccagcggcccacttttcgtcagatgcagctcgaaaacgtctctgtggcgctcgaattcctcgaccgggaatcaatcaagttggtttctatcgactctaaggccatcgttgacggtaatctcaaacttattcttggtctggtgtggactttgatccttcactatagtatctctatgcccgtctgggaggacgagggagatgatgacgcaaaaaagcaaacccctaaacagcgtctgctgggatggattcagaacaagataccctacctgcccattactaactttaaccaaaactggcaggacggtaaagctctgggggctctggtcgacagttgcgcaccaggactgtgtccggattgggaatcctgggacccgcagaagccggttgataatgctcgggaagctatgcagcaggcagacgattggctcggggtgccacaggttattactcctgaggaaattattcatccagatgtggatgagcactccgtgatgacctatctgagtcaatttcctaaggctaagctgaagcccggggccccactgaagcccaaactcaatccaaaaaaggctagagcctatggcaggggcatcgagcccacaggaaatatggttaaacagcccgctaagttcaccgtcgacacgatctcagctggccaaggagatgtgatggtcttcgtagaagacccagagggaaacaaagaagaggcacaggtgacacctgatagtgacaaaaacaaaacctacagtgtcgaatatttaccaaaggtcactggacttcacaaggtgaccgttctgtttgcaggccagcatattagcaaaagcccatttgaagtcagcgtcgacaaggcacagggggacgcctcaaaagttaccgcgaaaggcccaggcctcgaagcagtgggaaacattgctaataagcctacctattttgacatatacactgcaggagccggtgtcggcgatataggggtcgaggtggaagacccccaaggtaagaacactgtggagttacttgtggaagataagggaaatcaggtatatcgatgtgtgtataaacctatgcagccgggcccgcacgtcgtgaaaatcttctttgccggtgatactataccaaagagccctttcgtggtgcaggtcggtgaggcctgtaatcctaacgcatgccgggcctcgggtcggggtctgcagcccaaaggggtccgcatccgggagaccacagatttcaaggtcgacacaaaagccgccggatccggagagctgggagtgacgatgaaagggcccaaaggcctggaagaactagtgaagcagaaggattttctggacggggtttacgcctttgagtactatcccagcacccccggccgatactctatcgcaatcacctggggcggccaccacatcccaaagagcccatttgaggtgcaagtgggacctgaagctggcatgcaaaaggttagggcttgggggccaggactgcacgggggcattgttgggcgttccgcagactttgtcgttgagagcatagggtccgaggtcggctccctcgggttcgctattgaaggcccatctcaagccaaaatagaatacaatgatcagaacgacggatcttgcgatgtaaaatattggcctaaggagccaggggagtatgctgtgcacataatgtgcgacgacgaggatattaaagattcaccatatatggcttttatccatccagcaacgggaggatataacccagatctggtgcgagcctatggtccaggtctggaaaaatctgggtgtattgtcaacaatctggctgagttcactgtcgacccaaaagatgctggcaaagcccctcttaagatttttgcacaagatggcgaaggtcaaaggattgacatccagatgaaaaatcggatggacgggacatatgcgtgctcatatacgcccgtgaaggccatcaagcacacgattgcagtggtgtgggggggggtcaatatcccacacagcccttacagagtgaatatcggacaggggagtcaccctcagaaggtcaaggtctttggacctggtgtggaaagaagtggcttaaaggctaatgagcctactcactttacagtcgactgcaccgaagcgggcgagggagacgtgtcagttgggatcaagtgcgacgctagggtgctgagtgaggacgaggaggacgtggacttcgatattatacataatgcaaacgacacttttacagttaagtacgtaccaccagctgctggtagatacacaattaaagtcctgtttgcctcgcaggaaatccctgccagccccttcagggtgaaggtcgacccttcacacgatgctagtaaagtcaaggcagagggccctggtctgtctaaggctggagtggagaacggcaaaccaactcattttacagtgtacaccaagggcgctggcaaggctccgttaaatgtgcagttcaatagtccccttcccggtgacgcagtaaaagacctggacataattgataattatgactattcccacaccgtaaaatacacgcctacacagcaagggaatatgcaagtactggttacctacggcggggatccaatcccaaaaagtcccttcacagtgggggtcgctgctcccctggatctgtccaaaataaaactgaacggtctagagaatagagttgaagtcggcaaagatcaagagtttacagtcgataccaggggagccgggggccagggcaaactggacgtgaccattctctccccatcaaggaaagtagtgccctgccttgtaacccctgtgaccggaagagagaactccacagcaaagtttattccacgcgaagaaggtctctatgccgtggatgtcacatatgacggtcaccctgtccccggcagtccatatacagtggaagcgagtttaccacctgacccatccaaggtgaaagctcatggacccggactcgagggaggcctggtgggaaaaccagctgagtttactatcgacaccaaaggagccggcacaggtggcctgggactgactgtggaaggcccatgcgaggccaaaatcgaatgcagtgataatggcgacggaacctgttctgtgtcttacctgcctaccaagcctggagagtactttgtgaatatcctgttcgaagaggtgcatatccccggctcgccgttcaaagctgacatcgaaatgccgttcgacccttctaaagttgtggcctctggcccaggcttagaacacggtaaggtgggggaggccggactcttatccgtagactgttccgaggccgggcccggtgccctcggattggaagccgttagcgatagcggtactaaagcggaggtatcaattcagaacaacaaggacggaacctatgcagtgacgtacgtacccctaactgccggaatgtataccctgacaatgaagtacggcggggaactcgtcccacatttccccgcacgcgtgaaagtggaacctgcggtggatacaagccgcataaaagtgtttggccccgggatcgagggcaaagatgtcttccgggaggccacgaccgatttcacagttgatagcagacccctgactcaggttggaggagatcatataaaggcccacattgcgaatccttcaggcgcttctactgaatgtttcgtgacagacaacgctgatggaacctaccaggtggagtacacaccattcgaaaagggcctgcatgttgttgaagtcacatacgatgacgttccaatccctaatagcccattcaaagtggccgtgactgagggttgtcagccctccagagtgcaggcccaaggccccggtcttaaagaggcatttaccaacaagcccaacgtattcacagtcgtgacacgcggggccggcatcggcggcttgggcattaccgtcgaaggtcctagcgagagcaagatcaactgccgggacaacaaggacggatcctgcagcgccgaatacatcccctttgccccaggagactatgatgtaaatatcacatacggaggcgcccacatcccgggatcacccttccgcgtgcctgtcaaggacgttgtggaccctagcaaagtaaagattgcgggacctgggcttggtagcggagtccgcgctagagtacttcagagtttcactgtcgactctagcaaggccggtctcgctcctcttgaggttagggtgctcggacctaggggactggtggagcctgttaatgtcgtggacaacggggatgggacacacacagtaacgtataccccttcacaggaggggccctacatggtatccgtgaaatacgccgacgaggaaattccgcggtccccctttaaagtcaaagtcctgccgacctacgacgcctcaaaggtgaccgccagtggacctggattgtcttcttacggggtgcccgcctctttgccagtcgactttgcaatcgatgcgcgggacgcaggcgagggcctactggccgtccaaatcactgaccaagaaggcaaaccaaaacgggctatcgttcacgacaataaggacggcacctacgctgtaacctacattcctgataaaaccggccgctacatgattggcgtgacatacggaggtgacgacatccccctttcaccctatcggattcgggcgacacaaaccggcgacgcatctaagtgcctcgcgacaggtcccggtatcgctagcaccgtcaaaacaggggaggaggtgggctttgtggtggacgctaagactgccggaaagggaaaggttacttgcaccgtgctgacacccgacggcactgaggccgaggcagatgtcatagaaaatgaagacggcacgtacgacattttttacactgcggccaaacctggcacatacgtgatttacgttaggtttggcggggtggacattccgaactcaccttttactgttatggccacagacggtgaagtgaccgccgttgaggaagcaccagtcaatgcttgtcctcccgggttccgaccctgggttaccgaggaagcttacgttcccgtgtccgacatgaatgggctaggcttcaagccattcgatctagtaattcctttcgccgtgaggaagggcgaaattacgggcgaggttcacatgcccagtgggaaaaccgccacacctgagatcgttgacaataaagatgggaccgtgacagttagatatgctcccaccgaggtcggattgcacgagatgcatatcaaatatatgggtagccatattccagaaagcccacttcagttctacgtgaattatccaaactctggatctgtttcagcctacggccctggactggtatacggggttgccaataagacggctacatttaccatcgtcactgaggacgccggagaaggtgggctggacctcgctatcgagggcccttccaaggctgaaatttcttgtattgataacaaagatggcacgtgcactgtcacttatcttccaacactccctggcgactatagcatcttggtgaaatacaacgataagcacataccaggctctccctttacggctaaaatcacggacgactcccggagatgttctcaggtcaagcttggcagcgctgccgacttcctgttggacataagcgagacagacttgagctcattgaccgcctccatcaaagctccttccggtcgggatgagccttgcctcctgaagagacttccaaacaaccacattgggatctcattcatccccagggaagtgggagaacatctggtgtccattaaaaaaaatggaaaccatgtggcaaatagcccggtgtctataatggtggtacagagcgagattggcgacgcgcggcgggccaaagtttacggtcgggggctaagcgaaggccgcactttcgagatgtccgattttatagtggatacacgcgatgccgggtatggcgggatctccctggcggttgagggcccttccaaggtggatattcagaccgaagatctcgaggacggcacctgtaaagtgagctactttcctaccgtgcctggcgtgtacattgttagtaccaaattcgccgacgagcacgtgccgggtagcccgtttactgttaagatctctggggaaggcagagtgaaggaaagcattactagaacctcacgagcccccagcgtggccaccgtggggtccatctgcgacctgaacctgaaaatccccgagatcaactctagcgatatgagcgctcatgtgacatcaccctccggtagagtgacggaggcagagatcgtgcctatgggcaagaactctcactgcgtcaggtttgtccctcaggagatgggcgtacacaccgtgagcgtgaaatatagaggtcagcatgtgactggctcacccttccagtttacagtgggacctctgggtgaagggggcgcgcataaggtgcgcgccgggggccccggtttggaacgaggagaagccggcgtgcctgccgagtttagcatatggaccagagaggccggggccggcggactgtccatcgctgtagagggcccttccaaagccgagatcacttttgatgatcacaagaacgggtcatgcggtgtctcctatatcgcacaggagcctgggaattatgaggtgtcgatcaaatttaatgatgagcatatccccgagtcgccctacctggtgcccgtgatcgcaccaagtgacgatgcccgcagattgaccgtgatgagcctccaggaatctggcttaaaggttaaccagcctgcttcattcgctatccgactgaatggcgccaagggaaagattgatgccaaggtgcacagtccgagcggagccgtagaagaatgccatgtgtcagagctggagcccgacaaatatgccgttcggtttatccctcacgagaatggggtgcacacgatcgacgttaagtttaacggctcgcatgtcgtggggagcccgtttaaggttagagtaggcgagcccggccaggcagggaaccctgcactggtgtctgcctacggcacagggctggaaggcgggacgacaggtattcagagcgagttctttattaatactactagggccggtcccggcacattgtccgtcaccatagagggcccctcaaaggtcaaaatggattgtcaggagaccccagaggggtataaggtgatgtacaccccaatggccccagggaattacctcataagcgtcaaatatgggggaccaaatcacatcgtgggctcaccgtttaaggctaaagtgacagggcagagattggtaagtccgggctctgcgaatgagacttcttcaatcctggtggagagcgtgacgaggtcatccactgagacctgttacagtgctatacccaaagcctccagtgacgccagtaaggtcacgtccaagggagctggcctgagcaaagcattcgtcggccagaaaagctctttccttgtggattgctccaaggcgggctctaacatgctcttgataggcgttcacggccctacaaccccatgcgaggaagtatctatgaaacacgttggcaaccagcaatataatgtgacctatgtcgtcaaagaaaggggcgactacgtgctggcagtgaaatggggggaggagcatatcccagggtctccattccacgttacggtgccttag

SEQ ID NO: 117911 - DNA, 7686 bp, Artificial Sequence
  derived and/or modified sequence
atgcccgtgaccgagaaggacctggccgaggacgccccctggaagaagatacaacagaacacatttacacgatggtgcaatgaacacttgaaatgcgtcaacaagcgcatcggcaatctccaaaccgatctgagcgatggtctgcgtctgatcgcgctcctcgaagtcctttctcagaagagaatgtatcggaagtaccatcagaggcctacttttcgtcagatgcagctagagaacgtctctgttgctctggaattcttggatagggagagcatcaagctcgtctccatcgactctaaagctatcgtggacgggaacctcaaactgatcctcggcctggtgtggacactgattctccactactcaatttccatgcccgtgtgggaagacgaaggagacgatgacgccaagaagcagacccccaagcagaggctcttgggatggatccagaataagatcccatatctacctattacgaattttaatcagaattggcaggacggcaaggcactgggcgcattggtggacagttgtgctcctgggctgtgtcccgactgggaatcttgggacccgcagaaaccagtggataacgctagagaagctatgcagcaagctgatgactggctcggcgtgccgcaggtgatcaccccagaggaaatcatccatcctgatgtggatgaacactccgtcatgacttatcttagtcaatttcccaaggccaaactgaaaccaggcgcccctctgaaacccaaactaaatccaaagaaggcccgcgcttacggaaggggcatagagcctaccggcaacatggtaaagcagccggccaagtttaccgtcgatacgatttccgctggtcagggcgacgtgatggtgttcgtggaggatcccgagggcaacaaggaggaagctcaggtcacccctgacagcgacaagaacaaaacatactccgttgagtacctgccgaaagtcaccggccttcacaaagtaaccgtgctattcgctgggcagcacatcagtaagtctccatttgaagtatctgtggacaaggcccagggtgacgctagcaaggtcaccgccaaggggcccgggctagaggctgtgggaaatatagctaataaaccaacatattttgatatttacaccgctggagcaggggttggggacatcggtgtcgaggtggaggatcctcaagggaaaaacaccgtcgagcttcttgtggaggacaagggaaaccaggtgtataggtgtgtatacaagcccatgcagcctgggccccatgttgtgaaaattttttttgcaggcgacaccattcctaagtcgccttttgtcgtccaggttggggaagcttgtaatcccaacgcatgccgggcttctggacgggggctccaacccaagggcgtgcgaattcgggaaactacggactttaaggtggataccaaagcagcaggaagtggagaactgggggtgaccatgaaaggccccaagggccttgaagagttggtgaagcagaaggattttttggacggtgtgtacgcttttgagtattacccctccacccccgggcgttattctattgcaatcacgtggggcggtcatcatattcccaagagcccgttcgaggttcaggtgggtcccgaggccggaatgcagaaagtgcgggcctgggggcccggtctgcacgggggcatcgtaggcagaagtgctgacttcgtggttgaaagcataggttcagaagtgggaagtctgggatttgccattgaaggtccctctcaggcaaagatcgagtataatgatcaaaacgatggcagttgtgatgtgaaatattggccaaaagagcccggcgagtacgcggttcacatcatgtgcgacgatgaggacatcaaggattcgccatacatggcctttatccatcctgctactgggggttataaccccgatcttgtgcgggcctacgggcctggtctggaaaagagtgggtgcatcgtgaacaatctggcggagttcaccgtcgatcctaaagatgctggcaaagccccactgaagattttcgcgcaggatggagagggacagaggatcgatatacagatgaaaaatcgcatggacggcacatacgcatgctcatacaccccagttaaggctatcaaacatactatcgccgttgtgtggggtggagtcaacatccctcactctccgtaccgagtgaacatcggacaggggtcccatccccagaaggtgaaagttttcggcccaggagtcgaaaggtccgggctcaaggctaacgaaccaacccatttcactgtggactgcaccgaggccggggaaggcgatgtgagcgtgggtataaagtgcgacgctcgcgtactgtcagaggatgaggaagatgtcgatttcgacatcattcacaatgcgaacgatacttttactgtcaagtacgtgccacctgctgccggccgttacaccatcaaggtactttttgcatcgcaggagattccggcgtcaccatttcgggtgaaggtcgaccccagccacgatgcgtcaaaggtgaaggccgagggacctggactgagcaaggcgggagtggaaaacgggaagcctacccacttcaccgtgtacaccaagggggccggtaaggcccccttgaatgtgcaattcaacagcccgttgcccggggatgccgtcaaggatttggacattatcgataattatgattattcacacaccgtcaagtatactccaactcagcaggggaatatgcaggtgcttgtgacctacggaggcgaccccatccctaaaagtcccttcactgtgggggtggccgcaccccttgatttgtccaagatcaagctgaatggccttgagaacagagtcgaagtgggcaaggaccaggaattcactgttgacaccagaggagctggagggcaaggaaaactggacgtcacaatcctctcacccagccgtaaagtggtcccatgccttgtgacacccgtcacaggccgcgaaaatagcacagcaaaattcattccgcgagaagaggggttgtacgccgtagacgtgacatacgacgggcacccagtgccaggttccccatacaccgtcgaggcgagccttcccccggaccccagcaaggtgaaggcccatggtcccggattagagggcgggctggtgggtaaaccagctgagttcacaattgatacaaaaggcgccggcacgggtgggctcggattgaccgtggaaggtccttgtgaggcaaagatagaatgttccgacaatggtgatggcacctgtagtgtttcctatctcccaaccaaacctggagaatactttgtcaatatactgtttgaagaggtgcacatcccgggaagtcccttcaaagcggacatagaaatgcctttcgacccgtctaaagtggtggctagcgggcctggtctcgaacacggcaaggtgggggaagcagggttgctttctgtcgattgctccgaggcaggtccgggagctctgggcttagaagccgtaagtgacagcgggacaaaggccgaggtgtccatccagaacaataaggatggaacctacgccgtgacctacgtcccactgaccgcgggcatgtacaccctcactatgaagtatggtggcgaactggttcctcacttccccgcaagagtgaaggtggaacccgcagtggatacttcccgcataaaagtcttcggccctggaatcgaggggaaggacgtattccgtgaagccaccacagactttaccgttgacagcaggccgctaacacaggtaggtggagaccatattaaagctcacattgcgaatccttccggggcaagtaccgagtgtttcgtgacggacaatgctgatgggacttatcaagtggagtatactcctttcgaaaagggcttgcacgtagttgaggtcacctatgacgacgtgcctatccccaatagccccttcaaggtggctgtgacagaaggctgccagccatctcgggtgcaagcacaaggtcccggcctgaaggaggcattcaccaataaacccaatgtgttcaccgttgtgacccgtggcgcgggaattgggggtctgggcatcaccgtagaaggcccatccgagtctaagattaattgccgggacaacaaagacgggtcttgcagcgctgaatacataccatttgcccccggggactatgacgttaacatcacatacggcggtgcgcacattcccgggtcccctttccgagttccggttaaggatgtggtcgatccctccaaagtcaaaatcgccggccctgggctcggatctggcgtaagggcgagggtgttgcagtctttcaccgtggattcctcgaaggctggcctagccccattagaggtgcgggtactggggccaagggggctggttgagccagtgaacgtcgtggataatggtgacggaactcacacagtgacctacacgccatctcaagaagggccttatatggtgagcgtcaagtatgctgacgaggaaatccccagatctccattcaaggtcaaggtgctcccgacgtatgatgcaagcaaggtgaccgcttccggccctggcctgagtagctacggtgtcccagcctctctgccggtggatttcgctatagacgcacgcgatgccggggagggcttgctcgcagtgcagatcactgaccaagaggggaagcctaaaagggccatcgttcacgataataaggatggtacttatgcggttacctacataccggataagacaggtcgatacatgatcggtgtaacatatggtggcgatgatattcctctgtcaccctaccggattagagccacacagaccggagacgcctccaaatgtctcgccaccggccctggcatagccagtacagtgaaaacaggagaggaggtagggtttgtggttgatgccaaaactgcaggaaaaggcaaggtgacatgtactgtgctgacccctgacgggaccgaggctgaggccgatgtgatcgagaatgaggatggtacgtatgatatcttttacacagcggccaaacctggcacgtatgtcatatacgttaggttcgggggggtcgacattccaaacagtccattcactgtgatggccactgacggcgaggtcacggctgtagaagaagcacctgttaacgcctgtccacccggttttagaccatgggtaactgaagaagcttacgttccagtctcagatatgaacggactgggattcaagcctttcgatctggtaattcccttcgcagtccgaaagggtgagattacgggtgaagttcatatgccgtccggtaagaccgctactcccgaaatcgtggataataaggatggcaccgtcactgtgagatacgctccgaccgaggtcggcctccacgagatgcacatcaagtatatggggtcacatatacccgagtctccgctgcagttttacgttaactatcccaacagcggtagtgtgagcgcttacggcccaggcctggtgtacggcgtggctaacaaaactgctaccttcactattgtcacagaagacgctggagagggcgggctcgatttggctattgagggtccaagcaaagccgaaatcagctgcatagacaataaggatggtacatgcactgttacttatttaccaactctccccggagactattcaattctggtgaaatacaatgataaacacattcctggaagcccttttacagcgaaaatcaccgacgatagcagacgctgtagtcaggtcaagctgggctccgctgccgatttccttctcgacatctctgaaactgacttgtcaagcctgactgcgtctattaaggccccatctggacgtgacgagccctgccttcttaagcggctcccaaataatcatatagggatttcattcattccgcgcgaggtaggggaacatctggtatccatcaaaaaaaacggaaaccatgtggccaactcccctgtgagcattatggtggtacagagtgagattggggacgctcgtcgagcgaaagtgtacggtagaggactctcagaaggtcgcacattcgaaatgagcgactttattgttgatacaagggacgcaggatacggagggatatccttggcagtggagggtccgtccaaagttgatatacagaccgaagacttagaggatggaacctgcaaagtgtcctacttcccaactgtgcctggagtttacattgtatctacgaaattcgccgacgaacacgtccccgagatcaattcatccgacatgagcgcccacgtcacttcaccctcagggcgcgttacggaagcagaaattgtgcccatgggcaaaaacagtcattgtgtgcgatttgtgcctcaggagatgggcgtacataccgtcagcgtcaaataccggggccaacacgtaaccggttcaccctttcagttcactgtggggccacttggcgaaggcggggctcacaaggtgagagccggagggcccgggctggagaggggggaggccggtgtgcccgccgaattcagtatctggactagggaagccggggccgggggcctgtccatcgccgttgaaggaccttctaaggccgagatcacctttgacgaccacaagaacggatcctgcggcgtctcctatatcgcccaggagccgggaaactacgaagtatcaatcaagtttaatgacgaacatattcccgagtccccttacctcgtcccagtgattgccccctccgacgacgcgaggcgcctgaccgtgatgtcattgcaggagtcaggcctgaaagtgaatcagcccgcatctttcgccataagactcaacggcgcgaaagggaagatagacgcgaaggtgcactccccatccggggccgtggaggagtgtcatgtctcagagttggaacctgacaagtatgcagttcggttcatccctcatgagaacggagtccacactatcgatgtgaagtttaatggctcccatgtagtcggctccccatttaaggtgcgggtaggcgagccagggcaggccggcaatcccgccctggtgagtgcctatgggactggcttggaggggggaactaccggtatccagagcgagttcttcattaacactacgagggccggcccaggtaccctcagcgtcactatcgaaggtcccagcaaggtcaaaatggattgccaggaaacgcccgagggatataaagttatgtacactcccatggctcccggcaattacctgatcagcgtgaaatacggaggaccaaaccacattgtggggagcccttttaaggccaaggttactgggcagcggctggtgtcacctggttctgcgaacgagactagctccattctcgtggagtccgtgacacgtagtagcacagaaacctgctactccgctatccccaaggccagtagcgatgccagcaaagtaacttccaagggtgccggcctgtctaaagcattcgtggggcagaagtcttccttcctggtcgactgctccaaagccggcagtaatatgctgctcattggcgtgcatggccccactacaccctgtgaggaagtttctatgaagcacgtcggcaaccaacagtataacgtgacttacgttgtgaaggaacggggcgattatgtgctggcggtaaaatggggggaggagcatattccagggtctcctttccacgtgaccgtgccatag

SEQ ID NO: 117912 - DNA, 7808 bp, Artificial Sequence
  derived and/or modified sequence
atgccggtgacagaaaaagacctcgccgaggacgccccatggaagaagatacagcagaacacctttacccgatggtgtaacgaacacttaaaatgcgtcaacaagagaatcggcaacctacagacggatctgagcgacggccttaggctgatagccctgctggaggtgctgtcccagaagagaatgtataggaagtaccaccagcgccctacctttcgccagatgcagctggagaatgtgagtgtagccctggaattcttggatcgcgagtcaattaagttagtctctatcgacagcaaggcgatcgtggacggcaatctcaagctgattcttggattggtgtggaccctgattctgcattactccatcagtatgcccgtttgggaagacgagggtgacgacgacgccaaaaaacagacacccaagcagaggctgctaggttggatccaaaataagattccgtacttaccaatcacaaacttcaatcagaattggcaggatggtaaagccctcggcgcacttgtggactcctgcgctcctggactttgccccgattgggaaagttgggacccccagaaaccggtcgacaacgccagagaggccatgcagcaggccgacgattggctgggggtaccccaagtcattacacccgaagagataatccatcccgatgttgatgagcacagtgtgatgacgtacctttcccagtttccgaaagcaaaactgaagccaggggctccgctgaagcccaaactgaatcctaaaaaggctagggcctatgggagggggatagagccaacgggcaatatggtgaaacagcccgctaaattcactgtggataccatcagcgctggacaaggagatgtcatggtattcgtggaggacccagaaggcaataaggaagaagcgcaagtaacgcccgattcggacaaaaacaagacttattcggtagagtatctgcctaaggtcacaggattacacaaagtaacagttctgtttgccggtcagcacatctccaagtctcctttcgaagtgtcagtggacaaagcacaaggggatgccagcaaagtgactgctaagggaccagggcttgaggcagtgggcaacattgcgaataagccaacttatttcgacatttacacagccggagccggtgtgggggacattggagtggaggtggaagatccccagggaaagaatacagtggaactcttggtggaagataagggcaatcaagtctatcgttgcgtatataaacctatgcagcctggtccgcatgttgttaagattttttttgcaggcgacacaataccaaagtctccatttgttgtgcaggtgggagaagcctgcaacccaaacgcttgccgtgcatcaggcaggggtctccaaccgaagggcgtcaggattcgagaaaccactgacttcaaggtagatactaaagctgcgggatccggcgagctgggtgtgaccatgaaagggcctaagggactcgaggagctggtcaaacagaaggacttcctagatggcgtgtatgcctttgagtactacccatcaactcccggtcgatactctattgctatcacctgggggggtcaccacatacccaaaagtcctttcgaggttcaggtcggtccagaggccggaatgcagaaggtgcgcgcttggggccctgggcttcacggcggaatcgtggggaggtccgcggatttcgtggtggagtccataggcagtgaggtgggatctcttggttttgcaattgagggtcccagtcaggccaaaatagaatataacgaccaaaacgacggtagctgtgatgtgaaatattggcccaaggagcccggagagtacgctgtacacattatgtgtgatgacgaagacataaaggactccccatacatggccttcatacaccctgcaacagggggatataacccagatctggtccgggcttacggacccggactggagaaaagcgggtgcatcgtcaataacttggcggaattcactgtagaccccaaagacgccggaaaagcaccgctcaagatcttcgcacaggacggtgagggccaaaggatcgacattcagatgaaaaacagaatggacggaacatacgcctgcagctacaccccagtgaaagccatcaaacacacgatagccgtcgtgtgggggggtgtcaacattccacattccccttaccgagtgaatatcgggcagggaagtcatccccagaaagtcaaagtttttggaccaggagtggaaaggtccggattgaaggcaaatgaacccacccacttcacagtggactgtactgaagccggagaaggcgatgtgtctgtcggcatcaaatgtgatgcaagagttctgagcgaggatgaggaagacgttgatttcgacataatccacaatgccaatgatactttcaccgttaagtacgtccctccggctgctggacgatacacaatcaaagtcctgtttgcttcacaggagattcccgctagtccattccgtgttaaggtagatccaagccacgatgcgtccaaggtcaaggcagagggacctggactctccaaggccggagtcgaaaatgggaagccaacccatttcacagtgtatactaaaggagccggaaaggctcccctcaacgtgcaatttaactctcccctgcctggcgacgctgtcaaggatctggatattattgacaactacgattatagccataccgtgaagtatacccccacgcagcaaggcaatatgcaagtgctggtgacttacggcggagatcctatccctaagtctccgttcactgtaggagtggcagccccactagatttgtctaaaattaagctgaatggactagaaaacagagtggaagtaggtaaggatcaggagtttactgtggacactagaggtgccggtgggcaaggcaagctagacgtcacaatattgagcccatcacgaaaggtggtgccatgccttgtgactcccgtcacgggacgcgaaaattcgacagcaaagtttattccgagagaggaagggctgtacgccgtggatgtcacatatgacggccaccccgtccccggatcgccctatactgtggaggctagcttgccccctgatccgtcaaaagtcaaggctcatgggcctgggctggagggaggactggtgggaaaaccggctgagttcacgattgatactaagggggctggaacgggcggactcggtctcactgtggaaggtccttgcgaggctaaaatagagtgtagtgacaatggcgacggcacgtgttctgtttcataccttcctaccaaaccaggggagtactttgtgaatatcctgtttgaggaagtgcacattcctggctcaccattcaaggccgatattgagatgccatttgacccctctaaagtagtcgccagcggaccagggttagagcatggtaaggtcggtgaggccggtttactgagcgtcgactgctcagaagcaggcccaggggctctgggcttggaggcggtctctgattctggtaccaaggcggaggtgtcgatacaaaataacaaagacgggacgtacgcagtaacttatgtgccactgacagccggtatgtataccctgaccatgaaatacgggggtgagctggttccccacttccccgctcgggtaaaagtggaacccgcagttgatactagtcggatcaaagtgtttggcccaggaattgaaggcaaagatgtgtttcgagaagcaacaacagactttacagtggatagccgccctctcacacaggtcggcggtgaccatattaaggcccacattgccaacccttctggtgcgagtacagagtgtttcgtgaccgacaatgctgatgggacctatcaggtcgaatacactccattcgagaaggggcttcatgtagtggaagttacctatgacgacgtgcctattcctaattccccatttaaagtggccgtgacagagggctgccagccttcccgggtccaggctcagggacctgggctaaaggaagcctttacgaataagcccaatgtgttcacggtggtaacccgaggtgcagggatcggcggtcttggcataacagttgaaggcccatctgaaagtaagatcaattgtagggataataaagacggctcttgttcagcagagtatattccatttgcacccggtgattacgacgtgaacatcacatacggtggagcgcacataccagggagccctttcagggtgcccgttaaggacgtggtcgatcccagcaaggtcaagatcgctggcccaggacttgggagtggggtgcgagcaagagtgctgcagtcctttaccgtagacagtagcaaagcaggccttgcaccgctcgaggtacgtgttttgggcccacgcggtttagtagagcccgtaaacgtagtcgacaacggcgatgggacgcataccgttacttacaccccatcacaagagggcccttacatggtgtcggttaaatacgccgacgaggagattcctcgcagtcccttcaaggtgaaggtgctgccgacttatgacgccagtaaagtcaccgcttcagggcctggtttatcaagctatggagtaccagcctcccttcccgtggatttcgccatcgatgcaagggatgctggcgaggggctgctggctgtccagattaccgatcaagaggggaagcccaaacgcgcaattgtccacgacaacaaggacggaacctatgcagttacatacatcccagataagacaggccgatacatgataggtgtcacttacgggggagatgatatcccactctccccttacagaatcagagctacccagactggcgacgcctctaagtgtctggctacaggcccagggatcgcgagcacagtgaagaccggggaggaggtaggctttgtcgtcgacgcgaaaaccgccggaaaagggaaggtgacatgcaccgtgctcacaccagatggcactgaagctgaggcagatgtaattgagaatgaggatgggacctatgacatattctacaccgccgctaaacccggaacctatgtgatctacgtgcggtttgggggagttgatattccgaacagcccgttcacggtaatggccaccgacggtgaggtgacggcagtggaggaagctccagttaatgcctgcccacctgggtttcggccttgggtaaccgaggaggcctacgtgcctgtgtctgacatgaacggtctgggtttcaagccctttgacctcgttattccatttgccgtcaggaagggcgagattaccggggaggttcatatgcccagtggtaagaccgccacccctgagattgtcgataacaaggacgggaccgtaaccgtcaggtacgcccctactgaggtaggccttcatgagatgcatataaagtatatgggctcacacatccctgaaagcccccttcagttctacgtgaactacccaaactccggtagcgtctctgcatatggacccggattggtctatggtgtcgccaataaaaccgccacattcaccatcgtgactgaggacgcaggggagggcggactggacctggcgattgaagggccttccaaggccgaaatcagttgtatcgacaataaggacgggacctgcaccgtgacatatctccctacattgcctggagactattccatcttggtgaagtacaacgacaagcacatcccagggtcaccgtttaccgctaagatcaccgacgattctagaaggtgtagtcaggttaaactcggaagcgcagcggatttcctcctggacattagcgaaaccgatctgagcagtttgaccgccagcataaaagcgccttcgggaagggacgaaccttgtctgctcaaacgcctccccaataaccacataggaatcagctttataccacgggaggtgggggaacacctggtctcgattaaaaaaaatggtaatcacgtggcgaacagcccagtgtctattatggtggtgcagagcgaaattggtgatgcgaggcgagctaaagtctacgggagaggcctgagcgaaggcagaacattcgaaatgagcgactttatcgtagatactcgcgacgcaggctacgggggtatcagtttagcagtcgagggtcctagtaaagtcgatatacagactgaagatttagaagatggaacttgtaaggtgtcctatttccccaccgtgcctggagtatacatagtgagcacaaagtttgccgacgagcacgtacccggaagcccgttcaccgtgaagatatctggagagggtagggttaaagagagcattacacgaactagtcgagccccatcagtcgcgacggtgggttccatttgtgatcttaatctgaaaatccctgaaattaacagttccgacatgagcgcacacgtgacaagcccttctggaagagtgaccgaggccgaaattgtccccatgggcaagaattcacattgcgtgcggtttgtcccccaggagatgggtgttcatacagtgtccgtgaagtaccggggacagcatgtgaccggatcccctttccaattcactgtcgggcctctaggagagggcggagctcataaggttcgcgctggcggacctggcctggaacggggagaggccggagttcctgccgagttttcaatctggacacgtgaagccggagcaggcggtctgagtatcgccgtggagggaccatcaaaagccgagataacgttcgacgatcacaagaacgggtcttgtggggtatcatatatcgctcaggagccaggtaactatgaagtttctatcaagtttaatgatgaacatattcctgaaagcccctacctggtccccgtcattgccccatctgatgacgctaggcgacttactgtaatgagtttgcaggagtcgggcctgaaagtaaaccagccagcatctttcgcaattcggctgaatggcgctaaggggaaaatagatgctaaagtgcactcaccctctggcgctgtggaggaatgccacgtgtccgagttggaacccgataaatatgccgtccgcttcataccccacgaaaatggcgttcacaccatagacgtgaaatttaatgggtcccatgtagtcggctccccttttaaggtgcgcgtaggggagcccggacaggcgggaaaccctgcgctcgtctccgcctatgggactgggcttgaggggggtacaaccggtattcagagcgaatttttcattaacactaccagagctggacctggcaccctgagcgtgaccattgagggcccttctaaagttaaaatggattgccaggagacacctgaaggatacaaggtgatgtacactccaatggcccctggcaattatcttattagcgtcaagtatggaggccctaaccacatcgtgggcagccccttcaaggccaaggtcactggacaaaggctggtgtctccaggatccgcgaacgagacttccagcattttggtggagagcgtgactcggtcatccactgagacttgctactctgccatccctaaggcctcttccgatgcctccaaagtaacctccaagggtgctggcctctcaaaagcgtttgttgggcagaagtcatcttttcttgtggattgttccaaggcaggaagtaacatgctgttgattggggtgcacggacccactactccctgtgaggaagtaagtatgaagcatgtggggaatcagcagtacaacgtgacatatgtcgtaaaggagcgtggagactatgtcttggctgtcaagtggggggaggaacacattccgggatcccctttccacgttaccgtgccgta

SEQ ID NO: 117913 - DNA, 7685 bp, Artificial Sequence
  derived and/or modified sequence
atgcccgttacagaaaaggatctggcggaagacgcaccgtggaaaaaaatccagcaaaacaccttcacccgatggtgcaacgaacacctgaaatgcgttaacaaacgaattggaaacctgcaaacagacctgtctgatggcctcaggctgatcgccctcctcgaagttctctctcaaaaaagaatgtacaggaagtatcaccaacggccaacgttcaggcagatgcagctcgaaaatgtctctgtcgcccttgagttcctggatcgggagagtattaagctcgttagtattgactccaaagcaattgtcgatgggaatttaaagttaatccttggcctggtgtggaccctgatcctgcactactcaatctcgatgccggtttgggaggacgaaggcgacgacgatgccaagaaacagacaccaaagcagcgcctgctgggatggatacagaacaagatcccgtacctcccaatcacaaatttcaatcagaactggcaggatgggaaggcacttggtgccctggtggattcctgtgcccctggcctgtgccctgattgggaaagctgggacccacaaaagcctgtcgataacgccagggaggcgatgcagcaggcggacgactggctaggggtgccgcaggttatcacacccgaagaaatcatccatccggacgtggatgagcactcggtcatgacatacttaagccagtttccgaaagccaagctaaaacctggagccccattaaaacccaaactcaaccccaagaaagcaagggcatatgggcgagggatcgagcctacaggtaacatggtcaaacagccagctaaattcactgtcgatacaatcagcgccggacaaggagacgtgatggtcttcgttgaagatccagaaggcaacaaggaggaagcacaggttacccctgactcagacaaaaataagacctattctgtggagtacctccccaaagtgaccggactccacaaggtcaccgtgttgtttgctggccaacatatcagcaaaagcccatttgaggtttcagtcgacaaggctcagggcgatgcttcaaaagtgaccgcaaaaggtcctggattagaggcagtcggaaacatcgcaaataagcccacttactttgacatctacaccgctggcgctggcgtcggagatattggagtggaggtggaagatccccaaggcaagaataccgtcgagttgctggtggaagataaagggaatcaggtgtacagatgcgtgtacaaaccaatgcagcccggaccccacgtggtgaaaatcttttttgctggcgacactatccccaagtccccattcgtcgtccaggtgggagaggcttgtaatcccaatgcctgcagagcttccggtcgaggactgcagccaaagggcgttcgcattcgggagaccactgatttcaaagtcgacactaaggccgcaggatcaggcgagctgggcgtgaccatgaaagggccaaagggcctcgaagagcttgtcaagcaaaaagactttctggacggggtgtacgcttttgaatactatccctcaacaccaggacgctacagcatcgccatcacttggggaggacatcatatcccaaagtcgcctttcgaagttcaggtgggtcctgaggccggtatgcagaaagtacgagcctggggaccaggcctccacggcggaatcgtaggaagatcagctgacttcgtagtggaatcaatcggttcagaggtgggcagcctgggcttcgccatagagggcccttcccaggctaagattgaatataatgaccagaatgacggctcctgcgatgtgaagtattggccaaaggagcccggagagtacgcagtccacataatgtgcgatgacgaagatataaaggattccccatacatggctttcattcaccctgcaaccggcggttataatccagatctcgtgagagcctatggaccaggcttagagaagagcggctgcatcgtgaataacctcgcagaatttaccgtcgaccctaaagacgccggtaaagcccctctgaagattttcgcccaggatggcgaaggtcagcggatcgatatacaaatgaagaatagaatggacggcacatacgcttgttcatatacaccagtgaaggccatcaagcacaccattgcagtcgtgtgggggggtgttaatatcccccactctccctacagggtgaatattggacaggggtcacaccctcagaaggtcaaggtattcggcccaggggttgaacgttctggactcaaagccaacgaacccacccactttacagtggattgcacagaagctggggagggggatgtgtccgtcggcatcaagtgcgacgccagagtattgtctgaggacgaggaagatgtggactttgacatcattcacaatgccaacgacaccttcacagtgaagtatgttcccccagcagcaggacggtacacgattaaagtcctcttcgcgtctcaggagatcccggcatcacctttccgcgttaaggtcgacccatcacatgatgcctccaaagtcaaggccgaaggacctggactgagtaaggcaggcgttgagaacggaaaaccgacacattttacagtgtacacaaagggagcagggaaggcacctcttaacgtgcaatttaactcccctttaccgggagacgcagttaaggacctcgatattatcgataattacgactactcccacacagtgaagtacacccctactcaacaaggaaatatgcaggtgctggttacatatggcggtgaccccattccgaaaagtccttttacagtgggagtggccgctcctttggatctgtctaaaatcaagttaaacggcctggagaaccgggtggaagtaggaaaggatcaggagttcacggtggacacccgtggagccggaggtcagggcaagctggatgtaaccatattgtccccaagccggaaagtcgtaccctgtctagtcactcccgtaactggaagggaaaattctactgccaaattcattccccgtgaagaaggactctacgcagttgacgtaacgtacgacggacacccagtacccggttccccctacaccgtggaagctagtctgcccccagatccctcaaaggtcaaggcgcatggacccggtctggaggggggactggtcggtaaaccggctgagttcaccatcgacaccaagggcgctggaacaggcggtctaggcttaaccgtggagggcccatgtgaggcgaagatcgaatgcagcgacaatggcgacggtacctgttctgtctcataccttcccacaaagcctggggaatactttgttaatatcctcttcgaagaagtgcacattcctggaagtccctttaaagcggacatcgaaatgccttttgacccaagtaaggtcgtcgcatctggcccagggttggagcacggaaaagtcggagaggctggcctgttatccgtcgactgtagtgaagctggacctggtgctttaggcctggaggccgtgtcagacagtggcacgaaggctgaagtgtcaattcagaataacaaggatggcacctacgcagtgacttatgtgcctcttactgctggaatgtacactttgacaatgaagtatgggggtgagcttgttccgcactttccggcaagggtgaaggtggaacccgctgtggacacatcccggattaaggtgttcggacctggtatcgagggcaaagacgttttcagggaggcgacaacggatttcaccgtcgatagccgccctctgacccaggtgggtggcgaccacataaaggcacacattgctaacccttccggagcatcaaccgagtgctttgtgaccgacaatgccgacggcacataccaggtagaatacactccattcgagaaagggctccacgtcgtggaggttacctacgatgacgtgcctattcccaattccccatttaaagtagccgtcactgagggatgtcagcctagcagggtgcaggcacaaggacccggtttaaaagaggcctttaccaataaaccgaatgtgtttacggtcgtgacacgaggcgctggaattgggggactgggaataacagtcgaaggacccagcgagtcaaaaatcaattgccgggacaataaggacggttcttgctccgccgagtacatcccctttgcccctggagattacgatgttaatattacctatggcggtgctcatatccccggatctccttttcgggtacccgttaaggacgtggtggacccaagcaaggtgaaaatcgccggaccgggactgggatccggagtgcgtgcgagagttctacagtcctttacagtggatagcagtaaagccggtctagcgcctctcgaggtacgcgtgctgggtcccagggggctggttgagccagtgaatgtggtcgacaatggggacgggacacacacggtgacctatactcccagtcaggaaggcccttatatggtgtctgtgaagtacgccgatgaggagattccaagaagtccattcaaagtgaaagtgctacccacgtatgatgctagcaaggtcaccgcttcgggacccggtctaagttcatacggtgttcccgcttccctgcccgtcgactttgctatagatgcacgcgatgccggagaggggttgctggctgtccaaatcacagatcaggaagggaagcctaagagagccatcgtgcacgacaacaaggacggaacatacgcagttacatatattccagataaaacaggacggtacatgataggagtgacgtacggtggcgacgatattccactaagcccttaccgaattagagctactcagaccggcgatgcatccaagtgcctggccaccggacctggaatagcatctactgtgaagactggggaagaggtcgggtttgtggttgatgccaagacagctggtaagggaaaggtgacgtgcaccgtcctgacgccagacggaacagaagctgaagctgacgtgatcgaaaacgaggacgggacatatgatatcttctataccgccgctaaacccggaacttacgtgatctacgttaggtttggcggagtggatatccccaacagtccttttacagttatggccacagacggcgaggtgacagcagtggaggaagcaccagtcaacgcctgtcctccaggctttagaccctgggtaacagaagaggcatatgttccagtgtcagatatgaacggcctgggcttcaagccgtttgatcttgtgattccatttgctgtgaggaaaggcgagatcaccggtgaagtgcatatgccgagcgggaagactgctacaccagaaattgtagacaataaagacggtactgtgaccgtaagatatgcccctacggaggtgggattgcacgagatgcacatcaagtacatgggtagtcacatcccagagtctccgttgcagttctacgttaattaccccaacagcggctcggtctcagcctatggtcctggcctggtatatggcgtagccaataaaacggccacttttacgatagtcactgaagacgctggcgaaggtggactggacctggctatagagggtccttcaaaggcagagatctcatgtatcgataacaaagacggcacttgcacagtgacttatctccccactttgcccggtgactacagcatccttgtgaagtacaacgataaacatatacccggttcaccctttaccgcgaagataactgatgacagcagaagatgttcacaagtgaagcttggaagtgccgctgacttcctgcttgacatttcagagacagatctatcgagtctgacagcgagtattaaggcccctagcgggcgagacgagccttgcctgcttaagcgactcccaaacaaccatattggtatttcttttatcccgagagaggtcggggaacatctggtgagtatcaagaagaacggcaaccacgtagcaaatagcccggtgtcgatcatggtcgtgcaaagcgagattggagacgcaaggagagccaaggtctacggcaggggcttgagcgaaggcagaacattcgagatgtcagactttattgtggacacacgggacgcgggatacggcggaatctctctggccgttgagggcccatcaaaagtggatatccagacagaagatctcgaagacggtacttgtaaagtctcttattttcctacagtgcccggagtgtatattgtgtctaccaagtttgctgacgagcacgtacccgaaattaatagttcggacatgagtgcccacgttacctctccttcaggacgggtaaccgaggcagaaatcgtgcccatgggcaaaaattcccattgtgtgcggttcgtaccacaggaaatgggggtgcacacagttagcgtcaaataccggggtcaacatgtaaccggtagtcctttccagtttacagtcgggccactgggcgagggcggagcacacaaagttcgcgcaggaggcccaggactggaacggggagaagctggtgtgcctgcagagttttccatctggacgcgggaggctggggctgggggactctctattgcagtggaaggccctagtaaggctgagatcacctttgatgatcataagaatgggagctgtggtgtcagctatatagcacaggagcctgggaattacgaggtttcaattaagtttaatgatgaacacatacccgaaagtccgtatctagtcccggtgatcgccccttctgatgacgcccgacgcctcactgtgatgagtctccaggagtcagggctcaaggtgaatcaacctgccagcttcgctataaggcttaacggtgcaaagggcaagatcgacgctaaggtgcatagccccagcggagccgttgaagagtgccacgtttctgaactagagcccgacaagtatgctgtacgtttcatcccccatgagaatggcgtccacacgattgacgtgaagttcaatggctcacatgtagtggggtcacctttcaaggtgcgagtgggcgagcctggacaggccggaaatccagccctggtgagcgcatatggtactgggctggaaggcggaaccacaggcatccagtccgaatttttcatcaataccaccagggctggaccgggtaccctatctgttactattgaaggtccttcgaaagttaaaatggactgccaagagacccctgaagggtataaggtcatgtacaccccaatggcccctggtaactatctgatttctgtgaaatacggcggacccaatcacatcgtgggttccccgtttaaagccaaagtaactggtcagaggcttgttagtcccggttccgccaacgaaactagttccatcctggtggagagtgttacccgctcttcaaccgagacttgttacagcgctattcccaaggcttcttccgatgcgtccaaggtgacatccaagggagctggactcagcaaagcctttgtgggccagaaatcctcattcctggttgactgttctaaggccggtagtaacatgttgcttattggagtccacggccctactaccccctgtgaggaggtgtcgatgaaacacgtgggcaaccaacagtataatgtcacttacgttgtaaaggagcgtggggactatgtgcttgcagttaagtggggagaggaacacattccagggtcaccatttcatgtgaccgtgccata

SEQ ID NO: 117914 - DNA, 7809 bp, Artificial Sequence
  derived and/or modified sequence
atgcccgtgaccgagaaggacctggccgaggacgccccctggaagaagatccagcagaacaccttcaccagatggtgcaacgagcacctgaagtgcgtgaacaagagaatcggcaacctgcagaccgacctgagcgacggcctgagactgatcgccctgctggaggtgctgagccagaagagaatgtacagaaagtaccaccagagacccaccttcagacagatgcagctggagaacgtgagcgtggccctggagttcctggacagagagagcatcaagctggtgagcatcgacagcaaggccatcgtggacggcaacctgaagctgatcctgggcctggtgtggaccctgatcctgcactacagcatcagcatgcccgtgtgggaggacgagggcgacgacgacgccaagaagcagacccccaagcagagactgctgggctggatccagaacaagatcccctacctgcccatcaccaacttcaaccagaactggcaggacggcaaggccctgggcgccctggtggacagctgcgcccccggcctgtgccccgactgggagagctgggacccccagaagcccgtggacaacgccagagaggccatgcagcaggccgacgactggctgggcgtgccccaggtgatcacccccgaggagatcatccaccccgacgtggacgagcacagcgtgatgacctacctgagccagttccccaaggccaagctgaagcccggcgcccccctgaagcccaagctgaaccccaagaaggccagagcctacggcagaggcatcgagcccaccggcaacatggtgaagcagcccgccaagttcaccgtggacaccatcagcgccggccagggcgacgtgatggtgttcgtggaggaccccgagggcaacaaggaggaggcccaggtgacccccgacagcgacaagaacaagacctacagcgtggagtacctgcccaaggtgaccggcctgcacaaggtgaccgtgctgttcgccggccagcacatcagcaagagccccttcgaggtgagcgtggacaaggcccagggcgacgccagcaaggtgaccgccaagggccccggcctggaggccgtgggcaacatcgccaacaagcccacctacttcgacatctacaccgccggcgccggcgtgggcgacatcggcgtggaggtggaggacccccagggcaagaacaccgtggagctgctggtggaggacaagggcaaccaggtgtacagatgcgtgtacaagcccatgcagcccggcccccacgtggtgaagatcttcttcgccggcgacaccatccccaagagccccttcgtggtgcaggtgggcgaggcctgcaaccccaacgcctgcagagccagcggcagaggcctgcagcccaagggcgtgagaatcagagagaccaccgacttcaaggtggacaccaaggccgccggcagcggcgagctgggcgtgaccatgaagggccccaagggcctggaggagctggtgaagcagaaggacttcctggacggcgtgtacgccttcgagtactaccccagcacccccggcagatacagcatcgccatcacctggggcggccaccacatccccaagagccccttcgaggtgcaggtgggccccgaggccggcatgcagaaggtgagagcctggggccccggcctgcacggcggcatcgtgggcagaagcgccgacttcgtggtggagagcatcggcagcgaggtgggcagcctgggcttcgccatcgagggccccagccaggccaagatcgagtacaacgaccagaacgacggcagctgcgacgtgaagtactggcccaaggagcccggcgagtacgccgtgcacatcatgtgcgacgacgaggacatcaaggacagcccctacatggccttcatccaccccgccaccggcggctacaaccccgacctggtgagagcctacggccccggcctggagaagagcggctgcatcgtgaacaacctggccgagttcaccgtggaccccaaggacgccggcaaggcccccctgaagatcttcgcccaggacggcgagggccagagaatcgacatccagatgaagaacagaatggacggcacctacgcctgcagctacacccccgtgaaggccatcaagcacaccatcgccgtggtgtggggcggcgtgaacatcccccacagcccctacagagtgaacatcggccagggcagccacccccagaaggtgaaggtgttcggccccggcgtggagagaagcggcctgaaggccaacgagcccacccacttcaccgtggactgcaccgaggccggcgagggcgacgtgagcgtgggcatcaagtgcgacgccagagtgctgagcgaggacgaggaggacgtggacttcgacatcatccacaacgccaacgacaccttcaccgtgaagtacgtgccccccgccgccggcagatacaccatcaaggtgctgttcgccagccaggagatccccgccagccccttcagagtgaaggtggaccccagccacgacgccagcaaggtgaaggccgagggccccggcctgagcaaggccggcgtggagaacggcaagcccacccacttcaccgtgtacaccaagggcgccggcaaggcccccctgaacgtgcagttcaacagccccctgcccggcgacgccgtgaaggacctggacatcatcgacaactacgactacagccacaccgtgaagtacacccccacccagcagggcaacatgcaggtgctggtgacctacggcggcgaccccatccccaagagccccttcaccgtgggcgtggccgcccccctggacctgagcaagatcaagctgaacggcctggagaacagagtggaggtgggcaaggaccaggagttcaccgtggacaccagaggcgccggcggccagggcaagctggacgtgaccatcctgagccccagcagaaaggtggtgccctgcctggtgacccccgtgaccggcagagagaacagcaccgccaagttcatccccagagaggagggcctgtacgccgtggacgtgacctacgacggccaccccgtgcccggcagcccctacaccgtggaggccagcctgccccccgaccccagcaaggtgaaggcccacggccccggcctggagggcggcctggtgggcaagcccgccgagttcaccatcgacaccaagggcgccggcaccggcggcctgggcctgaccgtggagggcccctgcgaggccaagatcgagtgcagcgacaacggcgacggcacctgcagcgtgagctacctgcccaccaagcccggcgagtacttcgtgaacatcctgttcgaggaggtgcacatccccggcagccccttcaaggccgacatcgagatgcccttcgaccccagcaaggtggtggccagcggccccggcctggagcacggcaaggtgggcgaggccggcctgctgagcgtggactgcagcgaggccggccccggcgccctgggcctggaggccgtgagcgacagcggcaccaaggccgaggtgagcatccagaacaacaaggacggcacctacgccgtgacctacgtgcccctgaccgccggcatgtacaccctgaccatgaagtacggcggcgagctggtgccccacttccccgccagagtgaaggtggagcccgccgtggacaccagcagaatcaaggtgttcggccccggcatcgagggcaaggacgtgttcagagaggccaccaccgacttcaccgtggacagcagacccctgacccaggtgggcggcgaccacatcaaggcccacatcgccaaccccagcggcgccagcaccgagtgcttcgtgaccgacaacgccgacggcacctaccaggtggagtacacccccttcgagaagggcctgcacgtggtggaggtgacctacgacgacgtgcccatccccaacagccccttcaaggtggccgtgaccgagggctgccagcccagcagagtgcaggcccagggccccggcctgaaggaggccttcaccaacaagcccaacgtgttcaccgtggtgaccagaggcgccggcatcggcggcctgggcatcaccgtggagggccccagcgagagcaagatcaactgcagagacaacaaggacggcagctgcagcgccgagtacatccccttcgcccccggcgactacgacgtgaacatcacctacggcggcgcccacatccccggcagccccttcagagtgcccgtgaaggacgtggtggaccccagcaaggtgaagatcgccggccccggcctgggcagcggcgtgagagccagagtgctgcagagcttcaccgtggacagcagcaaggccggcctggcccccctggaggtgagagtgctgggccccagaggcctggtggagcccgtgaacgtggtggacaacggcgacggcacccacaccgtgacctacacccccagccaggagggcccctacatggtgagcgtgaagtacgccgacgaggagatccccagaagccccttcaaggtgaaggtgctgcccacctacgacgccagcaaggtgaccgccagcggccccggcctgagcagctacggcgtgcccgccagcctgcccgtggacttcgccatcgacgccagagacgccggcgagggcctgctggccgtgcagatcaccgaccaggagggcaagcccaagagagccatcgtgcacgacaacaaggacggcacctacgccgtgacctacatccccgacaagaccggcagatacatgatcggcgtgacctacggcggcgacgacatccccctgagcccctacagaatcagagccacccagaccggcgacgccagcaagtgcctggccaccggccccggcatcgccagcaccgtgaagaccggcgaggaggtgggcttcgtggtggacgccaagaccgccggcaagggcaaggtgacctgcaccgtgctgacccccgacggcaccgaggccgaggccgacgtgatcgagaacgaggacggcacctacgacatcttctacaccgccgccaagcccggcacctacgtgatctacgtgagattcggcggcgtggacatccccaacagccccttcaccgtgatggccaccgacggcgaggtgaccgccgtggaggaggcccccgtgaacgcctgcccccccggcttcagaccctgggtgaccgaggaggcctacgtgcccgtgagcgacatgaacggcctgggcttcaagcccttcgacctggtgatccccttcgccgtgagaaagggcgagatcaccggcgaggtgcacatgcccagcggcaagaccgccacccccgagatcgtggacaacaaggacggcaccgtgaccgtgagatacgcccccaccgaggtgggcctgcacgagatgcacatcaagtacatgggcagccacatccccgagagccccctgcagttctacgtgaactaccccaacagcggcagcgtgagcgcctacggccccggcctggtgtacggcgtggccaacaagaccgccaccttcaccatcgtgaccgaggacgccggcgagggcggcctggacctggccatcgagggccccagcaaggccgagatcagctgcatcgacaacaaggacggcacctgcaccgtgacctacctgcccaccctgcccggcgactacagcatcctggtgaagtacaacgacaagcacatccccggcagccccttcaccgccaagatcaccgacgacagcagaagatgcagccaggtgaagctgggcagcgccgccgacttcctgctggacatcagcgagaccgacctgagcagcctgaccgccagcatcaaggcccccagcggcagagacgagccctgcctgctgaagagactgcccaacaaccacatcggcatcagcttcatccccagagaggtgggcgagcacctggtgagcatcaagaagaacggcaaccacgtggccaacagccccgtgagcatcatggtggtgcagagcgagatcggcgacgccagaagagccaaggtgtacggcagaggcctgagcgagggcagaaccttcgagatgagcgacttcatcgtggacaccagagacgccggctacggcggcatcagcctggccgtggagggccccagcaaggtggacatccagaccgaggacctggaggacggcacctgcaaggtgagctacttccccaccgtgcccggcgtgtacatcgtgagcaccaagttcgccgacgagcacgtgcccggcagccccttcaccgtgaagatcagcggcgagggcagagtgaaggagagcatcaccagaaccagcagagcccccagcgtggccaccgtgggcagcatctgcgacctgaacctgaagatccccgagatcaacagcagcgacatgagcgcccacgtgaccagccccagcggcagagtgaccgaggccgagatcgtgcccatgggcaagaacagccactgcgtgagattcgtgccccaggagatgggcgtgcacaccgtgagcgtgaagtacagaggccagcacgtgaccggcagccccttccagttcaccgtgggccccctgggcgagggcggcgcccacaaggtgagagccggcggccccggcctggagagaggcgaggccggcgtgcccgccgagttcagcatctggaccagagaggccggcgccggcggcctgagcatcgccgtggagggccccagcaaggccgagatcaccttcgacgaccacaagaacggcagctgcggcgtgagctacatcgcccaggagcccggcaactacgaggtgagcatcaagttcaacgacgagcacatccccgagagcccctacctggtgcccgtgatcgcccccagcgacgacgccagaagactgaccgtgatgagcctgcaggagagcggcctgaaggtgaaccagcccgccagcttcgccatcagactgaacggcgccaagggcaagatcgacgccaaggtgcacagccccagcggcgccgtggaggagtgccacgtgagcgagctggagcccgacaagtacgccgtgagattcatcccccacgagaacggcgtgcacaccatcgacgtgaagttcaacggcagccacgtggtgggcagccccttcaaggtgagagtgggcgagcccggccaggccggcaaccccgccctggtgagcgcctacggcaccggcctggagggcggcaccaccggcatccagagcgagttcttcatcaacaccaccagagccggccccggcaccctgagcgtgaccatcgagggccccagcaaggtgaagatggactgccaggagacccccgagggctacaaggtgatgtacacccccatggcccccggcaactacctgatcagcgtgaagtacggcggccccaaccacatcgtgggcagccccttcaaggccaaggtgaccggccagagactggtgagccccggcagcgccaacgagaccagcagcatcctggtggagagcgtgaccagaagcagcaccgagacctgctacagcgccatccccaaggccagcagcgacgccagcaaggtgaccagcaagggcgccggcctgagcaaggccttcgtgggccagaagagcagcttcctggtggactgcagcaaggccggcagcaacatgctgctgatcggcgtgcacggccccaccaccccctgcgaggaggtgagcatgaagcacgtgggcaaccagcagtacaacgtgacctacgtggtgaaggagagaggcgactacgtgctggccgtgaagtggggcgaggagcacatccccggcagccccttccacgtgaccgtgccctag

SEQ ID NO: 117915 - DNA, 7686 bp, Artificial Sequence
  derived and/or modified sequence
atgcccgtgaccgagaaggacctggccgaggacgccccctggaagaagatccagcagaacaccttcaccagatggtgcaacgagcacctgaagtgcgtgaacaagagaatcggcaacctgcagaccgacctgagcgacggcctgagactgatcgccctgctggaggtgctgagccagaagagaatgtacagaaagtaccaccagagacccaccttcagacagatgcagctggagaacgtgagcgtggccctggagttcctggacagagagagcatcaagctggtgagcatcgacagcaaggccatcgtggacggcaacctgaagctgatcctgggcctggtgtggaccctgatcctgcactacagcatcagcatgcccgtgtgggaggacgagggcgacgacgacgccaagaagcagacccccaagcagagactgctgggctggatccagaacaagatcccctacctgcccatcaccaacttcaaccagaactggcaggacggcaaggccctgggcgccctggtggacagctgcgcccccggcctgtgccccgactgggagagctgggacccccagaagcccgtggacaacgccagagaggccatgcagcaggccgacgactggctgggcgtgccccaggtgatcacccccgaggagatcatccaccccgacgtggacgagcacagcgtgatgacctacctgagccagttccccaaggccaagctgaagcccggcgcccccctgaagcccaagctgaaccccaagaaggccagagcctacggcagaggcatcgagcccaccggcaacatggtgaagcagcccgccaagttcaccgtggacaccatcagcgccggccagggcgacgtgatggtgttcgtggaggaccccgagggcaacaaggaggaggcccaggtgacccccgacagcgacaagaacaagacctacagcgtggagtacctgcccaaggtgaccggcctgcacaaggtgaccgtgctgttcgccggccagcacatcagcaagagccccttcgaggtgagcgtggacaaggcccagggcgacgccagcaaggtgaccgccaagggccccggcctggaggccgtgggcaacatcgccaacaagcccacctacttcgacatctacaccgccggcgccggcgtgggcgacatcggcgtggaggtggaggacccccagggcaagaacaccgtggagctgctggtggaggacaagggcaaccaggtgtacagatgcgtgtacaagcccatgcagcccggcccccacgtggtgaagatcttcttcgccggcgacaccatccccaagagccccttcgtggtgcaggtgggcgaggcctgcaaccccaacgcctgcagagccagcggcagaggcctgcagcccaagggcgtgagaatcagagagaccaccgacttcaaggtggacaccaaggccgccggcagcggcgagctgggcgtgaccatgaagggccccaagggcctggaggagctggtgaagcagaaggacttcctggacggcgtgtacgccttcgagtactaccccagcacccccggcagatacagcatcgccatcacctggggcggccaccacatccccaagagccccttcgaggtgcaggtgggccccgaggccggcatgcagaaggtgagagcctggggccccggcctgcacggcggcatcgtgggcagaagcgccgacttcgtggtggagagcatcggcagcgaggtgggcagcctgggcttcgccatcgagggccccagccaggccaagatcgagtacaacgaccagaacgacggcagctgcgacgtgaagtactggcccaaggagcccggcgagtacgccgtgcacatcatgtgcgacgacgaggacatcaaggacagcccctacatggccttcatccaccccgccaccggcggctacaaccccgacctggtgagagcctacggccccggcctggagaagagcggctgcatcgtgaacaacctggccgagttcaccgtggaccccaaggacgccggcaaggcccccctgaagatcttcgcccaggacggcgagggccagagaatcgacatccagatgaagaacagaatggacggcacctacgcctgcagctacacccccgtgaaggccatcaagcacaccatcgccgtggtgtggggcggcgtgaacatcccccacagcccctacagagtgaacatcggccagggcagccacccccagaaggtgaaggtgttcggccccggcgtggagagaagcggcctgaaggccaacgagcccacccacttcaccgtggactgcaccgaggccggcgagggcgacgtgagcgtgggcatcaagtgcgacgccagagtgctgagcgaggacgaggaggacgtggacttcgacatcatccacaacgccaacgacaccttcaccgtgaagtacgtgccccccgccgccggcagatacaccatcaaggtgctgttcgccagccaggagatccccgccagccccttcagagtgaaggtggaccccagccacgacgccagcaaggtgaaggccgagggccccggcctgagcaaggccggcgtggagaacggcaagcccacccacttcaccgtgtacaccaagggcgccggcaaggcccccctgaacgtgcagttcaacagccccctgcccggcgacgccgtgaaggacctggacatcatcgacaactacgactacagccacaccgtgaagtacacccccacccagcagggcaacatgcaggtgctggtgacctacggcggcgaccccatccccaagagccccttcaccgtgggcgtggccgcccccctggacctgagcaagatcaagctgaacggcctggagaacagagtggaggtgggcaaggaccaggagttcaccgtggacaccagaggcgccggcggccagggcaagctggacgtgaccatcctgagccccagcagaaaggtggtgccctgcctggtgacccccgtgaccggcagagagaacagcaccgccaagttcatccccagagaggagggcctgtacgccgtggacgtgacctacgacggccaccccgtgcccggcagcccctacaccgtggaggccagcctgccccccgaccccagcaaggtgaaggcccacggccccggcctggagggcggcctggtgggcaagcccgccgagttcaccatcgacaccaagggcgccggcaccggcggcctgggcctgaccgtggagggcccctgcgaggccaagatcgagtgcagcgacaacggcgacggcacctgcagcgtgagctacctgcccaccaagcccggcgagtacttcgtgaacatcctgttcgaggaggtgcacatccccggcagccccttcaaggccgacatcgagatgcccttcgaccccagcaaggtggtggccagcggccccggcctggagcacggcaaggtgggcgaggccggcctgctgagcgtggactgcagcgaggccggccccggcgccctgggcctggaggccgtgagcgacagcggcaccaaggccgaggtgagcatccagaacaacaaggacggcacctacgccgtgacctacgtgcccctgaccgccggcatgtacaccctgaccatgaagtacggcggcgagctggtgccccacttccccgccagagtgaaggtggagcccgccgtggacaccagcagaatcaaggtgttcggccccggcatcgagggcaaggacgtgttcagagaggccaccaccgacttcaccgtggacagcagacccctgacccaggtgggcggcgaccacatcaaggcccacatcgccaaccccagcggcgccagcaccgagtgcttcgtgaccgacaacgccgacggcacctaccaggtggagtacacccccttcgagaagggcctgcacgtggtggaggtgacctacgacgacgtgcccatccccaacagccccttcaaggtggccgtgaccgagggctgccagcccagcagagtgcaggcccagggccccggcctgaaggaggccttcaccaacaagcccaacgtgttcaccgtggtgaccagaggcgccggcatcggcggcctgggcatcaccgtggagggccccagcgagagcaagatcaactgcagagacaacaaggacggcagctgcagcgccgagtacatccccttcgcccccggcgactacgacgtgaacatcacctacggcggcgcccacatccccggcagccccttcagagtgcccgtgaaggacgtggtggaccccagcaaggtgaagatcgccggccccggcctgggcagcggcgtgagagccagagtgctgcagagcttcaccgtggacagcagcaaggccggcctggcccccctggaggtgagagtgctgggccccagaggcctggtggagcccgtgaacgtggtggacaacggcgacggcacccacaccgtgacctacacccccagccaggagggcccctacatggtgagcgtgaagtacgccgacgaggagatccccagaagccccttcaaggtgaaggtgctgcccacctacgacgccagcaaggtgaccgccagcggccccggcctgagcagctacggcgtgcccgccagcctgcccgtggacttcgccatcgacgccagagacgccggcgagggcctgctggccgtgcagatcaccgaccaggagggcaagcccaagagagccatcgtgcacgacaacaaggacggcacctacgccgtgacctacatccccgacaagaccggcagatacatgatcggcgtgacctacggcggcgacgacatccccctgagcccctacagaatcagagccacccagaccggcgacgccagcaagtgcctggccaccggccccggcatcgccagcaccgtgaagaccggcgaggaggtgggcttcgtggtggacgccaagaccgccggcaagggcaaggtgacctgcaccgtgctgacccccgacggcaccgaggccgaggccgacgtgatcgagaacgaggacggcacctacgacatcttctacaccgccgccaagcccggcacctacgtgatctacgtgagattcggcggcgtggacatccccaacagccccttcaccgtgatggccaccgacggcgaggtgaccgccgtggaggaggcccccgtgaacgcctgcccccccggcttcagaccctgggtgaccgaggaggcctacgtgcccgtgagcgacatgaacggcctgggcttcaagcccttcgacctggtgatccccttcgccgtgagaaagggcgagatcaccggcgaggtgcacatgcccagcggcaagaccgccacccccgagatcgtggacaacaaggacggcaccgtgaccgtgagatacgcccccaccgaggtgggcctgcacgagatgcacatcaagtacatgggcagccacatccccgagagccccctgcagttctacgtgaactaccccaacagcggcagcgtgagcgcctacggccccggcctggtgtacggcgtggccaacaagaccgccaccttcaccatcgtgaccgaggacgccggcgagggcggcctggacctggccatcgagggccccagcaaggccgagatcagctgcatcgacaacaaggacggcacctgcaccgtgacctacctgcccaccctgcccggcgactacagcatcctggtgaagtacaacgacaagcacatccccggcagccccttcaccgccaagatcaccgacgacagcagaagatgcagccaggtgaagctgggcagcgccgccgacttcctgctggacatcagcgagaccgacctgagcagcctgaccgccagcatcaaggcccccagcggcagagacgagccctgcctgctgaagagactgcccaacaaccacatcggcatcagcttcatccccagagaggtgggcgagcacctggtgagcatcaagaagaacggcaaccacgtggccaacagccccgtgagcatcatggtggtgcagagcgagatcggcgacgccagaagagccaaggtgtacggcagaggcctgagcgagggcagaaccttcgagatgagcgacttcatcgtggacaccagagacgccggctacggcggcatcagcctggccgtggagggccccagcaaggtggacatccagaccgaggacctggaggacggcacctgcaaggtgagctacttccccaccgtgcccggcgtgtacatcgtgagcaccaagttcgccgacgagcacgtgcccgagatcaacagcagcgacatgagcgcccacgtgaccagccccagcggcagagtgaccgaggccgagatcgtgcccatgggcaagaacagccactgcgtgagattcgtgccccaggagatgggcgtgcacaccgtgagcgtgaagtacagaggccagcacgtgaccggcagccccttccagttcaccgtgggccccctgggcgagggcggcgcccacaaggtgagagccggcggccccggcctggagagaggcgaggccggcgtgcccgccgagttcagcatctggaccagagaggccggcgccggcggcctgagcatcgccgtggagggccccagcaaggccgagatcaccttcgacgaccacaagaacggcagctgcggcgtgagctacatcgcccaggagcccggcaactacgaggtgagcatcaagttcaacgacgagcacatccccgagagcccctacctggtgcccgtgatcgcccccagcgacgacgccagaagactgaccgtgatgagcctgcaggagagcggcctgaaggtgaaccagcccgccagcttcgccatcagactgaacggcgccaagggcaagatcgacgccaaggtgcacagccccagcggcgccgtggaggagtgccacgtgagcgagctggagcccgacaagtacgccgtgagattcatcccccacgagaacggcgtgcacaccatcgacgtgaagttcaacggcagccacgtggtgggcagccccttcaaggtgagagtgggcgagcccggccaggccggcaaccccgccctggtgagcgcctacggcaccggcctggagggcggcaccaccggcatccagagcgagttcttcatcaacaccaccagagccggccccggcaccctgagcgtgaccatcgagggccccagcaaggtgaagatggactgccaggagacccccgagggctacaaggtgatgtacacccccatggcccccggcaactacctgatcagcgtgaagtacggcggccccaaccacatcgtgggcagccccttcaaggccaaggtgaccggccagagactggtgagccccggcagcgccaacgagaccagcagcatcctggtggagagcgtgaccagaagcagcaccgagacctgctacagcgccatccccaaggccagcagcgacgccagcaaggtgaccagcaagggcgccggcctgagcaaggccttcgtgggccagaagagcagcttcctggtggactgcagcaaggccggcagcaacatgctgctgatcggcgtgcacggccccaccaccccctgcgaggaggtgagcatgaagcacgtgggcaaccagcagtacaacgtgacctacgtggtgaaggagagaggcgactacgtgctggccgtgaagtggggcgaggagcacatccccggcagccccttccacgtgaccgtgccctag

SEQ ID NO: 117916 - protein, 2725 aa, Artificial Sequence
  derived and/or modified sequence
MMNNSGYSDAGLGLGDETDEMPSTEKDLAEDAPWKKIQQNTFTRWCNEHLKCVGKRLTDLQRDLSDGLRLIALLEVLSQKRMYRKFHPRPNFRQMKLENVSVALEFLEREHIKLVSIDSKAIVDGNLKLILGLIWTLILHYSISMPMWEDEDDEDARKQTPKQRLLGWIQNKVPQLPITNFNRDWQDGKALGALVDNCAPGLCPDWEAWDPNQPVENAREAMQQADDWLGVPQVIAPEEIVDPNVDEHSVMTYLSQFPKAKLKPGAPVRSKQLNPKKAIAYGPGIEPQGNTVLQPAHFTVQTVDAGVGEVLVYIEDPEGHTEEAKVVPNNDKDRTYAVSYVPKVAGLHKVTVLFAGQNIERSPFEVNVGMALGDANKVSARGPGLEPVGNVANKPTYFDIYTAGAGTGDVAVVIVDPQGRRDTVEVALEDKGDSTFRCTYRPAMEGPHTVHVAFAGAPITRSPFPVHVSEACNPNACRASGRGLQPKGVRVKEVADFKVFTKGAGSGELKVTVKGPKGTEEPVKVREAGDGVFECEYYPVVPGKYVVTITWGGYAIPRSPFEVQVSPEAGVQKVRAWGPGLETGQVGKSADFVVEAIGTEVGTLGFSIEGPSQAKIECDDKGDGSCDVRYWPTEPGEYAVHVICDDEDIRDSPFIAHILPAPPDCFPDKVKAFGPGLEPTGCIVDKPAEFTIDARAAGKGDLKLYAQDADGCPIDIKVIPNGDGTFRCSYVPTKPIKHTIIISWGGVNVPKSPFRVNVGEGSHPERVKVYGPGVEKTGLKANEPTYFTVDCSEAGQGDVSIGIKCAPGVVGPAEADIDFDIIKNDNDTFTVKYTPPGAGRYTIMVLFANQEIPASPFHIKVDPSHDASKVKAEGPGLNRTGVEVGKPTHFTVLTKGAGKAKLDVQFAGTAKGEVVRDFEIIDNHDYSYTVKYTAVQQGNMAVTVTYGGDPVPKSPFVVNVAPPLDLSKIKVQGLNSKVAVGQEQAFSVNTRGAGGQGQLDVRMTSPSRRPIPCKLEPGGGAEAQAVRYMPPEEGPYKVDITYDGHPVPGSPFAVEGVLPPDPSKVCAYGPGLKGGLVGTPAPFSIDTKGAGTGGLGLTVEGPCEAKIECQDNGDGSCAVSYLPTEPGEYTINILFAEAHIPGSPFKATIRPVFDPSKVRASGPGLERGKVGEAATFTVDCSEAGEAELTIEILSDAGVKAEVLIHNNADGTYHITYSPAFPGTYTITIKYGGHPVPKFPTRVHVQPAVDTSGVKVSGPGVEPHGVLREVTTEFTVDARSLTATGGNHVTARVLNPSGAKTDTYVTDNGDGTYRVQYTAYEEGVHLVEVLYDEVAVPKSPFRVGVTEGCDPTRVRAFGPGLEGGLVNKANRFTVETRGAGTGGLGLAIEGPSEAKMSCKDNKDGSCTVEYIPFTPGDYDVNITFGGRPIPGSPFRVPVKDVVDPGKVKCSGPGLGAGVRARVPQTFTVDCSQAGRAPLQVAVLGPTGVAEPVEVRDNGDGTHTVHYTPATDGPYTVAVKYADQEVPRSPFKIKVLPAHDASKVRASGPGLNASGIPASLPVEFTIDARDAGEGLLTVQILDPEGKPKKANIRDNGDGTYTVSYLPDMSGRYTITIKYGGDEIPYSPFRIHALPTGDASKCLVTVSIGGHGLGACLGPRIQIGQETVITVDAKAAGEGKVTCTVSTPDGAELDVDVVENHDGTFDIYYTAPEPGKYVITIRFGGEHIPNSPFHVLACDPLPHEEEPSEVPQLRQPYAPPRPGARPTHWATEEPVVPVEPMESMLRPFNLVIPFAVQKGELTGEVRMPSGKTARPNITDNKDGTITVRYAPTEKGLHQMGIKYDGNHIPGSPLQFYVDAINSRHVSAYGPGLSHGMVNKPATFTIVTKDAGEGGLSLAVEGPSKAEITCKDNKDGTCTVSYLPTAPGDYSIIVRFDDKHIPGSPFTAKITGDDSMRTSQLNVGTSTDVSLKITESDLSQLTASIRAPSGNEEPCLLKRLPNRHIGISFTPKEVGEHVVSVRKSGKHVTNSPFKILVGPSEIGDASKVRVWGKGLSEGHTFQVAEFIVDTRNAGYGGLGLSIEGPSKVDINCEDMEDGTCKVTYCPTEPGTYIINIKFADKHVPGSPFTVKVTGEGRMKESITRRRQAPSIATIGSTCDLNLKIPGNWFQMVSAQERLTRTFTRSSHTYTRTERTEISKTRGGETKREVRVEESTQVGGDPFPAVFGDFLGRERLGSFGSITRQQEGEASSQDMTAQVTSPSGKVEAAEIVEGEDSAYSVRFVPQEMGPHTVAVKYRGQHVPGSPFQFTVGPLGEGGAHKVRAGGTGLERGVAGVPAEFSIWTREAGAGGLSIAVEGPSKAEIAFEDRKDGSCGVSYVVQEPGDYEVSIKFNDEHIPDSPFVVPVASLSDDARRLTVTSLQETGLKVNQPASFAVQLNGARGVIDARVHTPSGAVEECYVSELDSDKHTIRFIPHENGVHSIDVKFNGAHIPGSPFKIRVGEQSQAGDPGLVSAYGPGLEGGTTGVSSEFIVNTLNAGSGALSVTIDGPSKVQLDCRECPEGHVVTYTPMAPGNYLIAIKYGGPQHIVGSPFKAKVTGPRLSGGHSLHETSTVLVETVTKSSSSRGSSYSSIPKFSSDASKVVTRGPGLSQAFVGQKNSFTVDCSKAGTNMMMVGVHGPKTPCEEVYVKHMGNRVYNVTYTVKEKGDYILIVKWGDESVPGSPFKVKVP

SEQ ID NO: 117917 - DNA, 9188 bp, Artificial Sequence
  derived and/or modified sequence
ttcttaaaccccccgccccggcccagcccgcccttcccgagcaccgctccggccctggagggagagagagccagagagcggccgagcgcctaggaggcccgccgagcctcgccgagccccgccagccccggcgcgagagaagttggagaggagagcagcgcagcgcagcgagtcccgtggtcgcgccccaacagcgcccgacagcccccgatagcccaaaccgcggccctagccccggccgcacccccagcccgcgccagcatgatgaacaacagcggctactcagacgccggcctcggcctgggcgatgagacagacgagatgccgtccacggagaaggacctggcggaggacgcgccgtggaagaagatccagcagaacacattcacgcgctggtgcaatgagcacctcaagtgcgtgggcaagcgcctgaccgacctgcagcgcgacctcagcgacgggctccggctcatcgcgctgctcgaggtgctcagccagaagcgcatgtaccgcaagttccatccgcgccccaacttccgccaaatgaagctggagaacgtgtccgtggccctcgagttcctcgagcgcgagcacatcaagctcgtgtccatagacagcaaggccatcgtggatgggaacctgaagctgatcctgggcctgatctggacgctgatcctgcactactccatctccatgcccatgtgggaggatgaagatgatgaggatgcccgcaaacagacgcccaagcagcggctgcttggctggatccagaacaaggtgccccagctgcccatcaccaacttcaaccgtgactggcaggacggcaaagctctgggcgccctggtggacaactgcgcccccggtctctgccccgactgggaggcctgggaccccaaccagcccgtggagaacgcccgggaggccatgcagcaggccgacgactggcttggggtgccccaggtcattgcccctgaggagattgtggaccccaacgtggatgagcattctgttatgacctacctgtcccagttccccaaggccaagctcaaacctggtgcccctgttcgatccaagcagctgaaccccaagaaagccatcgcctatgggcctggcatcgagccacagggcaacaccgtgctgcagcctgcccacttcaccgtgcagacggtggacgcgggcgtgggcgaggtgctggtctacatcgaggaccctgaaggccacaccgaggaggctaaggtggttcccaacaatgacaaggatcgcacctatgctgtctcctatgtgcccaaggtcgctgggttacacaaggtgaccgtgctctttgctggccagaacattgaacgcagtccctttgaggtgaacgtgggcatggccctgggagatgccaacaaggtgtcagcccgtggccctggcctggaacctgtgggcaatgtggccaacaaacccacctactttgacatctacactgcgggggccggcactggcgatgttgctgtggtgatcgtggacccacagggccggcgggacacagtggaggtggccctggaggacaagggtgacagcacgttccgctgcacatacagacctgccatggaggggccacataccgtgcatgtggcctttgcgggtgcccccatcacccgcagtcccttccctgtccatgtgtcggaagcctgtaaccccaacgcctgccgcgcctctgggcgaggcctgcagcccaagggtgttcgcgtgaaagaggtggctgacttcaaggtgtttaccaagggtgccggcagcggggagctcaaggtcacggtcaaggggccaaagggcacagaggagccagtgaaggtgcgggaggctggggatggtgtgttcgagtgcgagtactacccggtggtgcctgggaagtatgtggtgaccatcacgtggggcggctacgccatccctcgcagcccctttgaggtacaggtgagcccagaggcaggagtgcaaaaggtccgggcctggggtcctggtttggagactggccaggtgggcaagtcagccgattttgtggtggaagccattggcaccgaggtggggacactgggcttctccatcgaggggccctcacaagccaagatcgaatgtgacgacaagggggatggctcctgcgatgtgcggtactggcccacggagcctggggagtacgctgtgcacgtcatctgtgacgatgaggacatccgagactcacccttcattgcccacatcctgcccgccccacctgactgcttcccagataaggtgaaggcctttgggcctggcctggagcctaccggctgcatcgtggacaagcccgctgagttcaccattgatgctcgtgcagctggcaagggagacctgaagctctatgcccaggacgccgacggctgtcccatcgacatcaaggtgatccccaacggcgacggcaccttccgctgctcctacgtgcccaccaagcccattaagcacaccatcatcatctcctggggaggcgtaaacgtgcccaagagccccttccgggtgaacgtgggcgagggcagccaccccgagcgggtaaaggtgtacggccccggagtggagaagacaggcctcaaggccaatgagcccacctacttcacggtggactgcagcgaggcggggcaaggcgacgtgagcatcggcatcaagtgcgccccaggcgtggtgggccctgcagaggctgacattgacttcgacatcatcaagaatgacaacgacaccttcaccgtcaagtacacgccaccaggggcgggccgctacaccatcatggtgctgtttgccaaccaggagatccccgccagccccttccacatcaaggtggacccatcccacgatgccagcaaagtcaaggccgagggccctgggctgaatcgcacaggtgtggaagtcgggaagcccacccacttcacggtgctgaccaagggagccggcaaggccaagctggatgtgcagtttgcagggacagccaagggcgaggttgtgcgggactttgagatcatagacaaccatgactactcctacactgtcaagtacaccgctgtccagcagggcaacatggcagtgacagtgacttatggcggggaccctgtccccaagagcccctttgtggtgaatgtggcacccccgctggacctcagcaaaatcaaagttcagggccttaatagcaaggtggctgtgggacaggaacaagcattctctgtgaacacacgaggggctggcggtcagggccaactggatgtgcggatgacttcgccctctcgccggcccatcccctgcaagctggagccaggcggtggagcggaagcccaggctgtgcgctacatgcccccggaggaggggccctacaaggtggatatcacctacgatggtcacccggtgcctggcagcccgtttgctgtggagggtgtcctgccccctgatccctccaaggtctgtgcttatggcccgggtctcaagggtggactggtaggcacccccgcgccattctccatcgacaccaagggggctggcacaggtggcctggggctgaccgtagagggcccctgcgaggccaagatcgagtgccaggacaatggtgatggctcatgtgctgtcagctacctgcccacggagcctggcgagtacaccatcaacatcctgtttgctgaggcccacatccctggctcgcccttcaaagccaccattcggcctgtgtttgacccgagcaaggtgcgggccagtggaccgggcctggagcgcggcaaggtcggtgaggcagccaccttcactgtggactgctcagaggcaggcgaggcggagctgaccattgagatcctgtcggatgccggggtcaaggccgaggtgctgatccacaacaacgcggatggcacctaccacatcacctacagccctgccttccctggcacctacaccattaccatcaagtatggcgggcatcccgtgcccaaattccccacccgtgtccatgtgcagcctgcggtcgataccagtggcgtcaaggtctcagggcctggtgttgagccacacggtgtcctgcgggaggtgaccactgagttcactgtggatgcaagatccctaacagccacaggcggcaaccacgtgacggctcgtgtgctcaacccctcgggggccaagacagacacctatgtgacagacaatggggacggcacctaccgagtgcagtacaccgcctacgaggagggcgtgcatctggtggaggtcctgtatgatgaggtcgctgtgcccaagagccccttccgagtgggcgtgaccgagggctgtgatcccacccgcgtccgagccttcgggccaggcctggagggtggcttggtcaacaaggccaaccgattcactgtggagaccaggggagcgggcaccgggggccttggcctagccatcgagggtccctcggaagccaagatgtcctgcaaggacaacaaggatggtagctgcaccgtggagtacatccccttcactcctggagactatgacgtcaacatcaccttcggggggcggcccatcccagggagcccgttccgcgtgccagtgaaggatgtggtggaccctgggaaggtgaagtgctcagggccagggctgggggctggtgtcagggcccgggttcctcagaccttcacagtggattgcagtcaagctggccgggcgcccctgcaggtggctgtgctgggccccacaggtgtggccgagcctgtggaggtgcgggacaatggagatggcacccacactgtccactacaccccagccactgacgggccctacacggtagccgtcaagtatgctgaccaggaggtgccacgcagccccttcaagatcaaggtcctcccagctcatgatgccagcaaggtgcgggccagcggcccaggcctcaacgcctctggcatccctgccagcctgcctgtggagttcaccatcgacgcacgggacgcgggcgaggggttgctcactgtccagatcttggaccccgagggtaagcccaagaaggccaacatccgggacaatggggatggcacgtacactgtgtcctacctgccggacatgagtggccggtacaccatcaccatcaagtatggcggtgatgagatcccctactcgcccttccgcatccatgctctgcccactggggatgccagcaagtgcctcgtcacagtgtccattggaggccatggcctgggtgcctgcctgggccctcgaatccagattgggcaggagacggtgatcacggtggatgccaaggcagccggtgaggggaaggtgacatgcacggtgtccacgccggatggggcagagctcgatgtggatgtggttgagaaccatgacggtacctttgacatctactacacagcgcccgagccgggcaagtacgtcatcaccatccgcttcgggggtgagcacatccccaacagccccttccacgtgctggcgtgtgaccccctgccgcacgaggaggagccctctgaagtgccacagctgcgccagccctacgctcctccccggcccggcgcccgccccacacactgggccacagaggagccagtggtgcctgtggagccaatggagtccatgctgaggcccttcaacctggtcatccccttcgcggtgcagaaaggggagctcacaggagaggtgcggatgccctcggggaagacggcacggcccaacatcaccgacaacaaggacggcaccatcacggtgaggtatgcacccactgagaaaggcctgcaccagatggggatcaagtatgacggcaaccacatccctgggagccccttacagttctatgtggatgccatcaacagccgccatgtcagtgcctatgggccaggcctgagccatggcatggtcaacaagccagccaccttcactattgtcaccaaagatgctggagaagggggtctgtcactggccgtggagggcccatccaaggcagagatcacctgtaaggacaacaaggatggcacctgcaccgtgtcctatctgccgactgcgcctggagactacagcatcatcgtgcgcttcgatgacaagcacatcccggggagccccttcacagccaagatcacaggtgatgactccatgaggacctcacagctgaatgtgggcacctccacggacgtgtcactgaagatcaccgagagtgatctgagccagctgaccgccagcatccgtgccccctcgggcaacgaggagccctgcctgctgaagcgcctgcccaaccggcacattgggatctccttcacccccaaggaggtcggggagcacgtggtgagcgtgcgcaagagtggcaagcatgtcaccaacagccccttcaagatcctggtggggccatctgagatcggggacgccagcaaggtgcgggtctggggcaaggggctttccgagggacacacattccaggtggcagagttcatcgtggacactcgcaatgcaggttatgggggcttggggctgagtattgaaggcccaagcaaggtggacatcaactgtgaggacatggaggacgggacatgcaaagtcacctactgccccaccgagcccggcacctacatcatcaacatcaagtttgctgacaagcacgtgcctggaagccccttcactgtgaaggtgaccggcgagggccgcatgaaggagagcatcacccggcggagacaggcaccttccatcgccaccatcggcagcacctgtgacctcaacctcaagatcccaggaaactggttccagatggtgtctgcccaggagcgcctgacacgcaccttcacacgcagcagccacacctacacccgcacggagcgcacggagatcagcaagacgcggggcggggagacaaagcgcgaggtgcgggtggaggagtccacccaggtcggcggggaccccttccctgctgtgtttggggacttcctgggccgggagcgcctgggatccttcggcagcatcacccggcagcaggagggtgaggccagctctcaggacatgactgcacaggtgaccagcccatcgggcaaggtggaagccgcagagatcgtcgagggcgaggacagcgcctacagcgtgcgctttgtgccccaggaaatggggccccatacggtcgctgtcaagtaccgtggccagcacgtgcccggcagcccctttcagttcactgtggggccgctgggtgaaggtggtgcccacaaggtgcgggccggaggcacagggctggagcgaggtgtggccggcgtgccagccgagttcagcatctggacccgggaggctggcgctgggggcctgtccattgctgtggagggtcctagcaaagcggagattgcatttgaggatcgcaaagatggctcctgcggcgtctcctatgtcgtccaggaaccaggtgactatgaggtctccatcaagttcaatgatgagcacatcccagacagcccctttgtggtgcctgtggcctccctctcggatgacgctcgccgtctcactgtcaccagcctccaggagacggggctcaaggtgaaccagccagcgtcctttgccgtgcagctgaacggtgcccggggcgtgattgatgcccgggtgcacacaccctcgggggctgtggaggagtgctacgtctctgagctggacagtgacaagcacaccatccgcttcatcccccacgagaatggcgtccactccatcgatgtcaagttcaacggtgcccacatccctggaagtcccttcaagatccgcgttggggagcagagccaggctggggacccaggcttggtgtcagcctacggtcctgggctcgagggaggcactaccggtgtgtcatcagagttcatcgtgaacaccctgaatgccggctcgggggccttgtctgtcaccattgatggcccctccaaggtgcagctggactgtcgggagtgtcctgagggccatgtggtcacttatactcccatggcccctggcaactacctcattgccatcaagtacggtggcccccagcacatcgtgggcagccccttcaaggccaaggtcactggtccgaggctgtccggaggccacagccttcacgaaacatccacggttctggtggagactgtgaccaagtcctcctcaagccggggctccagctacagctccatccccaagttctcctcagatgccagcaaggtggtgactcggggccctgggctgtcccaggccttcgtgggccagaagaactccttcaccgtggactgcagcaaagcaggcaccaacatgatgatggtgggcgtgcacggccccaagaccccctgtgaggaggtgtacgtgaagcacatggggaaccgggtgtacaatgtcacctacactgtcaaggagaaaggggactacatcctcattgtcaagtggggtgacgaaagtgtccctggaagccccttcaaagtcaaggtcccttgaatcccaaaagtgcctccccagcctcagcccccacctccagccacacacacattacacacacacacacacacacacaaatgtgccacacccagacacgcacagaatcagacactacaaacacctgccttgggggtgaagtgaaggcccagcctccccaccccaccgcgccccaggggttggaggaccttgtctgtgtcaggacagtgtccctccctgggaatgtgacatgagggccgactggggccaggctcaggggcagaggctgggacacaaggggctggcgagggctgcgaggccagggaagccctgagtttctggcggggctgagcagtgggggagcattgtgttgtgggtgtctgtgtgtgaggtcaccctcaaactgcaccgccggccagataccctcctgaccccgaggacttggtctggtctctctggtggctacaaccccagagttttaaggacttggaaaggaaagcacaatcagagaagaaaacagcccccgaaccagcaggagtggcctggcacatggaccggcctgagcgatgtgcactccacccaagccaggctcccagggggcctgatttctctctcactgtctctttttttaaaatggttgcacggctctgccccatggggggccttttttacacactgcgaggcccagctttctaggggacttttgcacatgtcatgcagctcagctgggagctgcttaggtggaaaactccaaataaagtgcggctgtcgca

SEQ ID NO: 117918 - DNA, 8178 bp, Artificial Sequence
  derived and/or modified sequence
atgatgaacaattctggatactctgacgccgggctgggcctgggcgatgagaccgacgaaatgcctagtacagagaaggatctggccgaggacgctccctggaagaagatccagcagaataccttcacacgctggtgcaacgaacacctgaaatgtgtcggaaaaagactcactgacctgcagcgggacctgtcagacggcctcagacttatcgccctgctggaagtgctgtcacaaaagcgcatgtataggaaattccacccgagaccaaacttccgccaaatgaagcttgaaaatgtgtctgtggccctcgagtttcttgagagggaacatataaagttggtctccattgactctaaggctatagtggatgggaatctgaagctgattctgggcctcatatggacactcatcctgcactactccataagcatgcctatgtgggaagatgaagacgacgaagacgccaggaagcagacccctaaacagcgtctgctgggctggatccagaacaaagtaccacagctgcctattaccaattttaaccgcgactggcaggatggtaaggcgctcggagcccttgtcgacaactgtgcgccaggcctttgcccagactgggaggcctgggatcccaaccagccagtggagaatgcacgggaggcgatgcagcaagccgacgattggctgggtgtgccccaggtgattgcccctgaagagatcgtggatcccaatgtggatgagcattcagtcatgacatacctcagtcagttccctaaggccaaattgaagcccggagccccggttcgcagcaaacaacttaatccgaagaaagccatcgcctacgggcctggcatagaacctcaaggcaacacagtccttcagcccgcgcacttcacagtgcagactgtcgatgcgggggttggcgaggtgctggtgtacatcgaggaccctgaaggccacaccgaggaggctaaagtggtgcccaataacgataaggatagaacgtacgctgtgagctatgtgcctaaagttgctggattgcataaggtaactgtcctttttgccgggcaaaacatagagagatcacctttcgaagtgaatgttggcatggccctaggcgacgctaataaggttagtgctcggggtcctgggctggagcctgtgggcaacgtcgccaataaacccacatactttgacatttatacagctggcgctgggaccggtgacgttgccgtggtaatcgtggatcctcaaggccgtagagacacggtggaagttgcattagaggacaaaggagacagtacattcaggtgtacatatcgcccagcgatggaaggacctcacaccgttcacgtggcatttgcaggcgcccccatcacccggagccctttccccgtgcacgtcagtgaagcctgcaaccctaacgcgtgtagagcttccggccgaggactccagccaaagggtgttcgagtgaaagaggtagcagacttcaaagttttcaccaaaggtgctggatcgggtgaactgaaggtgactgtgaagggccccaaaggcactgaagagccagtgaaggtcagggaggccggggacggcgtgtttgagtgtgagtattaccccgttgtccctggaaaatatgtggtaaccatcacctggggcggatacgcgattccccgaagtccctttgaagtccaggtttcgcccgaggcaggcgtgcagaaagtgcgggcttggggcccaggcctcgaaactggccaggtggggaaatctgccgatttcgtggttgaggccatcggcaccgaagtaggaaccctgggattttctatagagggcccaagccaggcaaaaattgagtgtgatgacaagggcgacggatcttgtgacgttcgatactggcccaccgaaccaggagagtatgccgtccacgtcatctgtgacgatgaggatattcgagattctccatttatagcacacattttacccgccccacctgattgcttccctgacaaggtgaaagcatttggcccgggtctggaacctacaggctgtatagtagataaaccagcagaatttactattgacgctcgggccgctggtaagggagacctgaagctgtacgcccaggatgcagacgggtgtcccatagacattaaagtaattcccaacggagacggcacttttcgctgctcttatgtgcccacaaaacctattaaacacaccatcatcatctcatggggaggggtgaacgtccctaaatctccattccgggtgaatgtcggggagggcagccacccagagcgtgttaaagtctatggtccgggtgtggagaaaaccggtctgaaagcgaatgaaccgacgtatttcaccgtcgattgcagcgaagcaggccagggggacgtgagtattggtataaaatgcgcccccggtgtcgttggtcccgctgaagccgatattgattttgacattataaaaaacgataatgacacgtttacagtgaaatacaccccacccggtgctggaagatacacaatcatggtactatttgcaaatcaggaaattcctgcaagcccctttcatataaaagtggatccaagtcacgatgcctccaaggtgaaagcagaagggcctggccttaacaggacaggtgtagaggtagggaaacctacccacttcaccgtcttgaccaagggggccggcaaggccaagttagacgtccagttcgctggtaccgcaaaaggtgaggttgtcagggacttcgaaataatcgacaaccacgattactcctatacagtgaaatatactgcagtgcagcaggggaatatggccgtgaccgtgacgtacggtggcgaccctgttcccaagagccccttcgtggtgaacgtggctcccccactggatttaagcaaaatcaaagtgcagggcctgaacagcaaagttgccgttggtcaggagcaggcattttccgtcaacactagaggggccgggggtcagggtcagctggacgtccgaatgacaagtccttctagaagaccgataccttgcaagctggagcctggcggcggcgcggaagctcaggctgtgcgttacatgccgcctgaggagggcccatacaaagtggacatcacctacgacggacaccccgttcccggtagcccatttgccgtcgaaggagtgctgccacccgacccctcgaaggtgtgcgcgtacgggcccgggctgaaaggcgggctggtcggcactccagccccattctccatcgacactaagggggccggcacaggagggctgggtttgacagtcgagggcccttgcgaggcgaagatcgaatgccaagacaatggagacggatcgtgtgcggtgtcctacctccccacggagccgggcgagtacaccattaatatcctgttcgccgaagcacacataccaggtagtccctttaaggcaacaattcgccccgttttcgatccgtccaaggtgagagctagtgggccagggctggagcggggtaaagtgggagaagcggcaaccttcacagtagactgtagtgaggctggggaggccgagttaacaatcgaaatcctgtccgatgccggcgtaaaggccgaagtgcttatccacaacaatgccgatgggacgtaccatatcacctactctcctgctttccccggcacctatacaattacaatcaagtacgggggacatccggtccccaagttcccaactcgcgttcacgtccagccagcagtagatacctcgggtgtgaaggtctcaggtccaggggtggaacctcacggcgtgctaagggaagtgaccactgagtttactgtagacgcccgatctcttaccgctactggcggcaatcacgtgacagccagagtactgaacccttccggcgctaagactgacacctacgtcactgataatggagatgggacatatagggttcaatatacggcctatgaggaaggcgtgcatctggtggaggtgctctatgacgaggtcgccgtacctaagtcaccattccgcgtgggcgtaactgagggatgtgatcccaccagggtgcgcgccttcggccccggcctggaagggggactggtaaacaaagcgaatagattcacagtggaaacacgcggggctggaacaggtggtcttggattagctatcgagggaccctccgaggcgaagatgagctgtaaagataacaaggacggctcttgcactgtcgagtacatccctttcaccccaggtgattacgacgtgaacataaccttcgggggccgccccatacctggctcgccatttcgggtacccgtcaaggatgttgttgacccaggaaaagtgaagtgtagcgggcccggcctcggagctggcgtccgtgctcgggtaccgcagacctttacagtagactgtagccaagcagggcgagcccccctacaggtggcggtcttggggcccaccggcgtcgcagaacctgtggaagtccgcgataacggggatggaactcataccgttcattatacaccggcaaccgacgggccttacacagtggccgtgaagtatgcagaccaggaggtccctagaagtccatttaagattaaagtgctcccggcacacgacgcgtctaaggtgagggccagcggacctggcctgaacgccagcggaatcccagcttccctgcccgttgaatttacgattgatgcgcgggacgccggggagggactgctgaccgtacaaatacttgaccctgagggcaagcctaaaaaagccaatattcgggacaatggagatggtacgtatacagtgagttatttgcctgacatgtccggtcgctacaccataacaattaaatacggaggtgatgagatcccctattctccttttcgcattcacgcccttcctacaggagacgccagtaagtgtcttgtgacagtgtccatcggaggccacgggctgggagcatgcctcgggccacgaattcagatcggacaggaaacagtgatcactgtggatgcgaaggccgccggcgaaggcaaagtgacgtgcactgtaagcactccggacggggcggaactggatgtcgatgtagtggagaatcacgacggtacctttgacatttattacactgcccctgaaccgggaaaatacgtgatcacgattcgatttgggggtgaacacatccctaattcaccatttcatgtgttagcctgcgacccactgccccatgaggaggaaccttctgaggtgccccagttacgacagccgtatgctccgccccggccaggcgcaaggccgacccactgggcaaccgaagagccagtggttcctgtcgaaccaatggaaagtatgctgagaccttttaatctggtgattccgtttgccgttcagaagggcgagctcacgggtgaggttcgcatgccaagcggcaaaacagcccgacctaatattacagacaacaaagacggtaccatcactgtgaggtacgccccgactgaaaagggtctgcaccagatggggataaagtatgacggtaaccacattcctggcagcccactccagttttatgtggacgctattaactctcgccacgtttcagcctatggtcccggactgtctcacggaatggttaataaacccgctacttttactatcgttacaaaggatgccggcgagggcggcctcagcctggcagtggagggcccatcaaaagctgaaatcacctgcaaggacaataaggacgggacttgcaccgtcagttatctgcctactgcaccaggggattactccattattgtgaggttcgacgacaaacatatccctggtagcccattcaccgcaaaaattaccggggacgattctatgcggacaagccagcttaatgtcgggacctccaccgacgtttctctgaagattacagagtctgatttgtcccaactgactgcctcgatccgggctccaagcggcaatgaggaaccctgtctcctaaaaaggctccctaatcgtcacatcggaatcagctttacccccaaggaagtcggcgagcacgtggtgtccgtgcgcaaaagcgggaaacacgtgacaaattctccattcaagatcctggtgggcccctccgagatcggggatgcctcaaaagtccgcgtatgggggaaaggcttatccgagggacacactttccaggtggcggagtttatcgttgatacgcggaacgccggctacggtgggcttggcttaagcattgaaggtcccagtaaggttgacattaactgcgaggacatggaggatggaacttgcaaggtgacatactgtcccacagagccaggtacctacatcatcaacatcaaattcgcagacaagcatgtgccgggatccccatttactgtgaaggttactggagaaggcaggatgaaggagagcattacacgtaggcgacaagctccttccattgcaacaatcggctcaacatgcgacttgaatctgaagatacccggaaattggttccaaatggtcagcgcacaggaacgtttaaccaggacttttacacggtctagccacacctacactaggactgagaggaccgaaatctccaagacacgcggtggtgagacaaagagagaggtgagagtggaagagtctactcaagtcgggggggacccttttcccgcagtgttcggcgatttcttgggtcgtgagcgtcttggtagcttcggatccatcaccagacagcaggagggcgaagctagctcccaggatatgaccgctcaagtgacttcaccttctgggaaagtggaggctgccgaaatcgtggagggagaagactcagcctattcagttaggtttgtaccccaggagatggggcctcataccgtcgccgtgaagtataggggacagcatgtgcctggttctccattccagtttactgtcggtcctctgggtgagggaggagcgcataaagtgagggcgggaggaactggacttgaaagaggggtggctggagtgcccgccgaattctcaatatggactagagaggccggcgctggggggctgagtatcgctgtcgaaggccccagtaaagcagaaattgcattcgaggataggaaggacggcagctgcggagtttcttatgttgtccaggagccaggtgactatgaggtatcgatcaagtttaatgatgagcacatccccgactcgccttttgtagtacctgtggccagcctctcggatgatgcacggcgcttgacggttacaagtcttcaggagacgggcctgaaggtgaatcagccggcttcattcgcagtgcagctgaacggtgccagaggcgtcatagatgcaagagtgcacacgccatcaggggccgtggaggaatgttacgtgtcagaacttgatagcgataaacataccatccgcttcataccccacgagaacggtgttcacagcattgacgtcaaatttaacggggcccatataccaggtagcccattcaagattagagttggtgagcagtcccaggcaggcgatccaggccttgtatctgcttacggccccgggctggaaggaggaacaacaggcgtaagctctgagttcatagtcaacaccctgaacgccggcagcggagccttatctgttacaatagatggccccagtaaggtgcagttggattgtagggaatgtcctgagggacacgtcgttacatacacacccatggcccccggtaactacttaatcgcgatcaaatacggtggccctcagcatattgtcggaagtcctttcaaggcaaaggtgacaggaccccgcctctcaggggggcactcactgcatgaaaccagcacggtacttgtggaaaccgttaccaaatcttccagctctcgcggctcatcttattcttctatccccaagtttagctccgatgcctccaaggtggtaacccgaggacccggtctgtctcaagcatttgttggccagaaaaacagctttaccgtggattgtagcaaggccgggactaatatgatgatggttggcgtgcacgggcccaagacaccctgcgaagaggtgtacgttaagcacatgggaaaccgcgtctacaacgtcacctacaccgtgaaggaaaaaggagattacattctaatcgtgaagtggggggacgaatctgtgcccgggtccccatttaaagtgaaggtgccctag

SEQ ID NO: 117919 - DNA, 8178 bp, Artificial Sequence
  derived and/or modified sequence
atgatgaacaacagcggctacagtgatgctggcctgggcctgggagatgaaacagatgagatgcccagcacagagaaggacctggccgaggatgccccctggaagaagatccagcagaacaccttcacccgctggtgcaatgagcacctgaagtgtgtgggcaagaggctgacagacctgcagagggacctgagtgatggcctgcggctgattgccctgctggaggtgctgagccagaagaggatgtacaggaagttccacccccggcccaacttccggcagatgaagctggagaatgtgtctgtggccctggagttcctggagcgggagcacatcaagctggtgtccattgacagcaaggccatcgtggatggcaacctgaagctgatcctgggcctcatctggaccctcatcctgcactacagcatctccatgcccatgtgggaggatgaagatgatgaagatgccaggaagcagacccccaagcagaggctgctgggctggatccagaacaaggtgccccagctgcccatcaccaacttcaacagagactggcaggacggcaaggccctgggcgccctggtggacaactgtgcccctggcctgtgcccagactgggaggcctgggaccccaaccagcctgtggagaatgcccgggaggccatgcagcaggctgatgactggctgggcgtgccccaggtgattgcccctgaggagatcgtggaccccaacgtggatgagcacagcgtgatgacctacctgagccagttccccaaggccaagctgaagccaggggcccctgtgcgcagcaagcagctgaaccccaagaaggccatcgcctacggccctggcatcgagccccagggcaacacagtgctgcagcctgcccacttcaccgtgcagacagtggatgctggggtgggggaggtgctggtgtacattgaagatcctgagggccacacagaggaggccaaggtggtgcccaacaatgacaaggacaggacctatgctgtgtcctatgtgcccaaggtggccggcctgcacaaggtgacagtgctgtttgctggccagaacatcgagaggagcccctttgaggtgaatgtgggcatggccctgggagatgccaacaaggtgtctgcccggggccctggcctggagcctgtgggcaatgtggccaacaagcccacctactttgacatctacacagctggagctggcactggagatgtggccgtggtgattgtggacccccagggccggcgggacacagtggaggtggccctggaggacaagggggacagcaccttccgctgcacctacagacctgccatggagggcccccacacagtgcacgtggcctttgctggggcccccatcaccaggagccccttccctgtgcacgtgtctgaggcctgcaaccccaatgcctgccgggccagcggccggggcctgcagcccaagggcgtgcgggtgaaggaggtggccgacttcaaggtgttcaccaagggggccggcagcggggagctgaaggtgacagtgaagggccccaagggcacagaggagcctgtgaaggtgcgggaggccggagatggagtgtttgaatgtgagtactaccctgtggtgcctgggaagtatgtggtgaccatcacctggggcggctacgccatccccaggagcccctttgaggtgcaggtgtccccagaggccggcgtgcagaaggtgcgggcctggggccctggcctggagaccggccaggtgggcaagtctgctgactttgtggtggaggccatcggcacagaggtgggcaccctgggcttcagcattgagggccccagccaggccaagattgaatgtgatgacaagggagatggcagctgtgatgtgcgctactggcccacagagcctggagaatatgctgtgcacgtgatctgtgatgatgaggacatccgggacagccccttcatcgcccacatcctgcctgcccccccagactgcttcccagacaaggtgaaggcctttggacctggcctggagcccaccggctgcatcgtggacaagccagctgagttcaccattgatgcccgggctgctggaaaaggagacctgaagctgtatgcccaggatgctgatggctgccccatcgacatcaaggtgatccccaatggagatggcaccttccgctgcagctatgtgcccaccaagcccatcaagcacaccatcatcatctcctggggcggcgtgaatgtgcccaagagccccttccgggtgaatgtgggggagggcagccaccctgagcgggtgaaggtgtatggccctggggtggagaagacaggcctgaaggccaatgagcccacctacttcaccgtggactgcagcgaggccggccagggagatgtgtccatcggcatcaagtgtgcccctggggtggtgggccctgctgaggccgacatcgactttgacatcatcaagaatgacaatgacaccttcaccgtgaagtacaccccacctggggccggccgctacaccatcatggtgctgtttgccaaccaggagatcccagccagccccttccacatcaaggtggaccccagccatgatgccagcaaggtgaaggccgagggccctggcctgaacagaactggagtggaggtgggcaagcccacccacttcaccgtgctgaccaagggagctgggaaggccaagctggatgtgcagtttgctggaacagccaagggggaggtggtgcgggactttgagatcatcgacaaccacgactacagctacacagtgaagtacacagctgtgcagcagggcaacatggctgtgacagtgacctacggcggggaccctgtgcccaagagcccctttgtggtgaatgtggccccacccctggacctgagcaagatcaaggtgcagggcctgaacagcaaggtggccgtgggccaggagcaggccttctctgtgaacaccagaggagctgggggccagggccagctggatgtgaggatgaccagccccagccggcggcccatcccctgcaagctggagcccggcggcggcgctgaggcccaggccgtgcgctacatgcctcctgaggagggcccctacaaggtggacatcacctatgatggccaccctgtgcccggcagcccctttgctgtggagggcgtgctgcccccagaccccagcaaggtgtgtgcctacggccctggcctgaagggcggcctggtgggcaccccagcccccttcagcattgacaccaagggggccggcaccggcggcctgggcctgactgtggagggcccctgtgaggccaagattgagtgccaggacaatggagatggcagctgtgctgtgtcctacctgcccacagagcccggggagtacaccatcaacatcctgtttgctgaggcccacatccctggcagccccttcaaggccaccatccggcctgtgtttgaccccagcaaggtgcgggccagcggccctggcctggagcggggcaaggtgggggaggccgccaccttcaccgtggactgcagcgaggccggggaggccgagctgaccatcgagatcctgagtgatgctggggtgaaggccgaggtgctgatccacaacaatgctgatggcacctaccacatcacctacagccctgccttccctggcacctacaccatcaccatcaagtatggaggccaccctgtgcccaagttccccaccagggtgcacgtgcagcctgctgtggacaccagcggcgtgaaggtgtctggccctggggtggagccccatggagtgctgcgggaggtgaccacagagttcaccgtggatgcccggagcctgacagccactggaggcaaccacgtgacagcccgggtgctgaaccccagcggggccaagacagacacctacgtgacagacaatggagatggcacctacagagtgcagtacacagcctatgaggagggcgtgcacctggtggaggtgctgtatgatgaggtggccgtgcccaagagccccttccgggtgggcgtgacagagggctgtgaccccaccagggtgcgggccttcggccctggcctggagggcggcctggtgaacaaggccaaccgcttcaccgtggagaccaggggggccggcaccggcggcctgggcctggccatcgagggccccagcgaggccaagatgagctgcaaggacaacaaggatggcagctgcaccgtggagtacatccccttcacccctggggactatgatgtgaacatcacctttggaggccggcccatccctggcagccccttccgggtgcctgtgaaggatgtggtggaccccgggaaggtgaagtgcagcggccctggcctgggcgccggcgtgcgggcccgggtgccccagaccttcaccgtggactgcagccaggccggccgggcccccctgcaggtggccgtgctgggccccactggagtggccgagcctgtggaggtgcgggacaatggagatggcacccacacagtgcactacaccccagccacagatggcccctacacagtggccgtgaagtatgctgaccaggaggtgcccaggagccccttcaagatcaaggtgctgcctgcccatgatgccagcaaggtgcgggccagcggccctggcctgaatgccagcggcatcccagccagcctgcctgtggagttcaccattgatgccagagatgctggggagggcctgctgactgtgcagatcctggaccctgagggcaagcccaagaaggccaacatccgggacaatggagatggcacctacacagtgtcctacctgcctgacatgagcggccgctacaccatcaccatcaagtatggaggagatgagatcccctacagccccttccgcatccacgccctgcccactggagatgccagcaagtgcctggtgacagtgtccattggaggccacggcctgggcgcctgcctgggcccccgcatccagatcggccaggagaccgtcatcaccgtggatgccaaggctgctggggagggcaaggtgacctgcaccgtgtccaccccagatggagctgagctggatgtggatgtggtggagaaccatgatggcacctttgacatctactacacagcccctgagcccgggaagtatgtgatcaccatccgctttggaggagagcacatccccaacagccccttccacgtgctggcctgtgaccccctgccccatgaggaggagcccagcgaggtgccccagctgcggcagccctatgccccacccaggcctggggcccggcccacccactgggccacagaggagcctgtggtgcctgtggagcccatggagagcatgctgcggcccttcaacctggtgatcccctttgctgtgcagaagggggagctgactggagaggtgaggatgcccagcggcaagacagcccggcccaacatcacagacaacaaggatggcaccatcaccgtgcgctatgcccccacagagaagggcctgcaccagatgggcatcaagtatgatggcaaccacatccctggcagccccctgcagttctacgtggatgccatcaacagcagacatgtgtctgcctacggccctggcctgagccacggcatggtgaacaagccagccaccttcaccatcgtgaccaaggatgctggggagggcggcctgagcctggccgtggagggccccagcaaggccgagatcacctgcaaggacaacaaggatggcacctgcaccgtgtcctacctgcccacagcccctggggactacagcatcatcgtgcgctttgatgacaagcacatccctggcagccccttcaccgccaagatcactggagatgacagcatgaggaccagccagctgaatgtgggcaccagcacagatgtgtccctgaagatcacagaaagtgacctgagccagctgacagccagcatccgggcccccagcggaaatgaggagccctgcctgctgaagaggctgcccaacagacacatcggcatctccttcacccccaaggaggtgggggagcacgtggtgtctgtgaggaagagcggcaagcacgtgaccaacagccccttcaagatcctggtgggccccagcgagattggagatgccagcaaggtgcgggtgtggggcaagggcctgtctgagggccacaccttccaggtggccgagttcatcgtggacaccagaaatgccggctatggaggcctgggcctgagcattgagggccccagcaaggtggacatcaactgtgaggacatggaggatggcacctgcaaggtgacctactgccccacagagcccggcacctacatcatcaacatcaagtttgctgacaagcacgtgcccggcagccccttcaccgtgaaggtgactggagagggccgcatgaaggagagcatcacccggcggcggcaggcccccagcatcgccaccatcggcagcacctgtgacctgaacctgaagatccctggcaactggttccagatggtgtctgcccaggagcggctgaccaggaccttcaccaggagcagccacacctacaccaggacagagaggacagagatcagcaagacccggggcggggagaccaagcgggaggtgcgggtggaggagagcacccaggtgggcggggaccccttccctgctgtgtttggagacttcctgggccgggagcggctgggcagctttggcagcatcacccggcagcaggagggggaggccagcagccaggacatgacagcccaggtgaccagccccagcggcaaggtggaggccgctgagatcgtggagggggaggacagcgcctacagcgtgcgctttgtgccccaggagatgggcccccacacagtggccgtgaagtaccggggccagcacgtgcccggcagccccttccagttcaccgtgggccccctgggggagggcggggcccacaaggtgcgggccggcggcaccggcctggagcggggcgtggccggcgtgcctgctgagttcagcatctggacccgggaggccggggccggcggcctgagcattgctgtggagggccccagcaaggccgagatcgcctttgaggacaggaaggatggcagctgtggggtgtcctatgtggtgcaggagcccggggactatgaggtgtccatcaagttcaatgatgagcacatcccagacagcccctttgtggtgcctgtggccagcctgagtgatgatgcccggcggctgactgtgaccagcctgcaggagaccggcctgaaggtgaaccagcctgccagctttgctgtgcagctgaatggagcccggggcgtgattgatgcccgggtgcacacccccagcggggctgtggaggagtgctacgtgtctgagctggacagcgacaagcacaccatccgcttcatcccccatgaaaatggagtgcacagcattgatgtgaagttcaatggagcccacatccctggcagccccttcaagatccgggtgggggagcagagccaggccggggaccccggcctggtgtctgcctacggccctggcctggagggcggcaccaccggggtgagcagcgagttcatcgtgaacaccctgaatgccggcagcggggccctgtctgtgaccattgatggccccagcaaggtgcagctggactgccgggagtgcccagagggccacgtggtgacctacacccccatggcccctggcaactacctgattgccatcaagtatggaggcccccagcacatcgtgggcagccccttcaaggccaaggtgacaggcccccggctgagcggcggccacagcctgcacgagaccagcacagtgctggtggagaccgtgaccaagagcagcagcagccggggcagcagctacagcagcatccccaagttcagcagtgatgccagcaaggtggtgacccggggccctggcctgagccaggcctttgtgggccagaagaacagcttcaccgtggactgcagcaaggccggcaccaacatgatgatggtgggcgtgcacggccccaagaccccctgtgaggaggtgtatgtgaagcacatgggcaacagagtgtacaacgtgacctacacagtgaaggagaagggggactacatcctgattgtgaagtggggagatgagagcgtgcccggcagccccttcaaggtgaaggtgccctag

SEQ ID NO: 117920 - DNA, 8178 bp, Artificial Sequence
  derived and/or modified sequence
atgatgaacaacagcggctacagcgacgccggcctgggcctgggcgacgagactgacgaaatgccatcaaccgagaaggacctagcggaagatgcaccatggaagaaaatccagcagaatacttttacccgctggtgcaatgaacacttgaaatgtgtgggaaagcggctgacagatctccaacgcgacttaagcgatggcctgcggctgatcgcgctgctagaggtcttgtctcagaagaggatgtataggaaattccaccctcgaccaaatttccgccagatgaaactggagaatgtgagcgttgcattggaattcctggaacgggagcacattaagcttgtctcaattgattccaaagctatcgtagatggaaacttaaagctgattttgggcctgatctggacactgatactccattactccataagcatgcctatgtgggaggatgaagacgatgaggacgctcggaagcagacaccaaagcaaaggttactgggatggattcagaataaagtgccccaacttcccatcaccaattttaacagagactggcaggacggcaaagccctgggggcactggtggacaactgtgcaccaggactgtgcccagactgggaagcctgggacccaaatcaacccgtggagaacgccagggaggccatgcagcaagctgacgactggctcggcgtcccgcaagtaatcgcgccagaagagattgtcgatccaaatgtggacgagcacagtgtgatgacttatctaagccagttccccaaggccaagctgaagccaggggccccagtccgatctaaacaactcaacccaaaaaaagcgatcgcgtatggtcccgggatcgaacctcaaggtaatactgtcttgcaaccagcccattttacggtccaaacagtcgatgcaggggtcggagaagtgcttgtgtacattgaagaccctgagggacacaccgaagaggccaaggtggtccccaacaatgacaaagaccgaacctacgcggtgtcctatgtgcccaaggtagccggcctgcacaaagtgacggtcctatttgccggccaaaacatcgagcgatcccctttcgaagtcaacgtgggtatggccctgggggatgcgaacaaagtttccgctcgaggccccggccttgagccagtgggtaatgtggcgaataagcctacctacttcgacatttataccgccggagccgggacaggcgatgtagccgttgttattgtcgatccacagggacgcagggatactgtcgaggtggcactggaggataaaggagatagtacattccgctgcacttacagacccgccatggaggggccacacacagtgcacgtcgcattcgcgggagcacctatcaccagatccccgtttccagtacatgtctctgaagcgtgtaatccaaacgcatgtcgggcttccgggcgcggactgcagcctaagggggtgcgcgtcaaagaggtggcagatttcaaggtcttcactaagggagccggaagcggcgagttgaaagttacagtgaaaggcccaaagggaaccgaagaacccgtgaaggtgagggaggcaggggatggcgtgtttgaatgcgaatattatccagtggtgcccggcaaatacgtggtgactatcacatggggcggctacgccatcccacgctcaccatttgaggtgcaggtatcccctgaggccggtgtacagaaggtacgtgcttggggaccggggctggagaccggacaggtgggcaagtccgccgattttgttgtcgaggctatcggcactgaggtaggtacactgggctttagtatagaaggtccgagccaggccaagatcgagtgcgacgataagggagatggctcctgcgacgtgcgttattggccaactgagcctggagagtatgctgtgcatgtgatctgtgacgacgaagatattcgggattcaccttttattgcccacatcctgcccgctccacctgattgttttccggataaagttaaggcatttgggcccgggctcgaacccacggggtgcatcgtcgataagccagctgagtttaccattgatgcgagagcagcgggcaagggggatctaaagctgtacgcccaggatgctgatggctgccccatcgatattaaggtgataccaaatggagacggtacctttcgatgcagctacgtgcctacgaaacccataaagcacaccatcatcatctcctggggaggagttaacgtgcctaagtctccattcagagtcaatgtgggcgagggatcccatcccgaacgcgttaaggtgtacggacccggtgtagaaaaaaccgggctgaaggccaacgagccaacatacttcactgtggattgttcagaggccggccaaggggatgtttctatcgggatcaagtgtgcccccggagtagtaggtccggccgaagccgatattgacttcgatattatcaaaaacgacaatgacactttcaccgtgaagtacaccccacctggggcaggcagatataccatcatggtgctgttcgctaaccaggaaattccagcctccccgttccacataaaagtcgatccatcccacgatgccagtaaggtgaaggccgaaggccccggcctgaatcgcactggggtcgaagtgggtaagccaacccacttcaccgtattaaccaagggtgctggcaaagccaaactcgatgtgcaattcgcgggaacagcaaaaggtgaagtagtcagggacttcgaaatcatcgataaccacgactattcctatacagtgaagtatactgccgtccaacagggcaatatggccgttaccgttacctatggcggcgaccctgttcctaagagtccttttgtcgttaacgtcgcacctcctctcgatttgagtaagatcaaagtgcagggactaaattcaaaggtggccgtggggcaggagcaggcattcagcgtcaacacaagaggtgccggaggacaaggacaactcgatgtgagaatgacgagcccttctagaagacctattccctgtaaactggaaccgggcggaggcgccgaagcccaggctgtcagatatatgccgcctgaagagggtccatataaggtggacataacctacgatggccatcccgtgcccggcagtccttttgctgtggagggcgttttacctcctgacccaagcaaggtgtgcgcctacgggcctggtctgaaaggcgggctggtcggaacacccgcaccgttctctattgatacaaagggtgcgggcactggcgggttagggcttacagtggaggggccgtgtgaagcgaagatcgagtgtcaggataatggtgatggcagctgtgcggtcagctatttgcccaccgagcctggggagtataccatcaatatcctttttgccgaggcgcatatacccggctctccattcaaggctacgattcgccctgtcttcgacccgtccaaggtgagggccagtgggcctggcctagagcgaggaaaggtcggggaggccgccacttttaccgtggattgctcagaggcaggcgaagcagaactgactattgaaattttgtccgatgccggggtgaaggctgaggtcctgatacacaacaacgccgacggcacgtatcacatcacatacagccccgcgtttccaggcacttatacaattacaatcaagtacggcgggcatcctgtccctaagtttcctacaagggtgcatgttcaaccagctgtagatacatccggggtgaaggtgagcggtcctggcgtcgaaccccacggagtgcttcgtgaagtgaccaccgagtttactgtggacgccagatctttaactgctaccggggggaaccacgtaaccgctagagtgctgaaccccagcggcgccaagacagatacctacgtcaccgacaatggggacgggacctaccgggtgcaatacaccgcctatgaagagggagtgcacctggtggaggtgctgtacgacgaggtggccgtgccaaagtccccgtttagggtaggcgtcaccgaggggtgtgatcctacacgcgtgagggcattcgggccaggacttgagggcggtctagtgaacaaagccaatagatttacagtggaaacgagaggcgctgggacaggggggctgggtctggccattgaaggtccttctgaagccaagatgtcctgcaaagataacaaggatggaagctgcactgtggaatatatacctttcactcccggtgattacgacgtgaatattacttttggcggacgccctatccccggctctccattccgggtgcctgtaaaggatgtcgtggaccccgggaaggtcaagtgttccggcccgggactgggtgcaggagttagagctcgggtgcctcaaacctttacagttgactgcagtcaggctggaagagcccctctccaggtagcagttcttggccctaccggagtggcagagccagtggaggtccgagacaacggcgacggaacccacaccgttcattatacacctgctacagacggtccatatacagtggctgtgaagtacgccgaccaggaggttcctcgcagccccttcaagatcaaggtactacctgcacacgacgcttcaaaggtacgtgcgtccggacccggtttgaatgcaagcggtatccccgccagcttacccgtggaatttaccatcgacgcccgtgacgccggggagggattgctcacagttcagattttggatcccgaaggaaagcccaagaaggccaatattagagataacggggatgggacgtacaccgttagctacttgcccgacatgtccggcagatatacgatcactataaagtatgggggcgatgaaatcccctactccccatttcgcatacatgccttgcccactggcgacgcctccaagtgcctagtgaccgtgagcatcggcggacacgggcttggagcatgccttggaccaagaattcaaatcggacaggagaccgtgatcactgtggacgcgaaagccgcaggggaaggcaaagtcacatgtaccgtgagtactcctgatggcgccgagctcgacgtggatgttgtggaaaatcacgatggcactttcgatatctattataccgcacctgaacccggaaaatacgtgattacgatccggtttggcggtgagcacatccccaacagtcctttccacgtcttggcatgtgatccgctccctcacgaagaagagccatctgaagtccctcaactaagacagccctacgcccctccaagacctggggccaggcccactcactgggcaaccgaagagcccgtggtgcccgttgagcctatggagtccatgctgagacctttcaacctggtgataccatttgccgtacaaaagggggagctgacaggcgaggtgagaatgccatcaggtaagacagcacgccctaatataacagacaataaggacggaacaatcacagtccgctacgctcctacggaaaaaggattacaccaaatgggtatcaaatacgatgggaaccatattcctggtagccctctacagttctacgtggatgctataaacagcaggcacgtttccgcctacgggccaggcctatcacacgggatggtcaacaagccagccacctttacaattgtaacaaaggacgcaggcgagggtggattgagcttagccgtagagggacctagcaaagctgagattacgtgtaaggacaataaggacggtacatgcacagtaagttatctgcccacagcccccggagattattccattattgtgcggtttgacgataagcatatcccgggcagtccatttactgccaagataacaggggacgattccatgaggacaagccaactgaatgttggaacaagcaccgatgtgagcttaaagataactgagtcagacctgagccaattaactgctagcatcagagctcctagcggcaacgaagagccatgtttgctgaaacggttaccaaaccgccacatcggcatctcgttcacacccaaggaggtaggcgaacatgttgtcagtgtgcggaagtcaggcaagcatgtgactaatagtccctttaagattctggttggcccctctgaaattggcgatgcctccaaagtgagagtgtgggggaaaggcctgagcgagggacatacgtttcaggtggccgagtttattgtggatacacggaatgcaggttacggaggactcggtttgtccatcgagggaccgagcaaggtggatatcaattgtgaggacatggaggacggcacctgcaaagtgacctactgcccaacagagccggggacttatattattaatataaagttcgcggataagcatgtgccaggttccccttttacagtgaaagtgaccggcgaaggcagaatgaaggagagcattactcggagacgtcaggctccttccatcgctacaattggatctacatgtgacctcaacctcaaaattcctgggaactggttccagatggtctccgcgcaggagcggttaacacgcacctttaccaggagcagccacacatatacccgaactgagagaactgaaatctcgaaaacacgcgggggagaaacgaaaagagaagtgcgggtagaagagtcaacacaggtggggggtgatccatttcctgccgtatttggagatttcctcggtagagagcggttaggaagttttggcagtattacacgtcagcaagagggtgaagcatcctcccaggacatgaccgctcaggttacctctccgtccggcaaagtggaggcagctgagatcgtcgagggggaagactcagcctattctgtgcggttcgttccacaagagatggggccacacacggtggcagttaaataccggggacagcatgttccgggcagtccctttcaattcaccgtggggcctctcggagagggtggcgctcataaggtgcgcgcaggcggcaccgggctggaacgtggagtcgccggcgtgcctgccgagttctcgatatggacacgagaagcgggcgcaggaggattatcaatagccgtggaaggccctagtaaggctgaaatcgcgtttgaggaccggaaggacgggagctgtggggtgtcctatgtggtgcaagagcctggggattatgaggtcagcatcaaattcaatgacgaacacataccagactccccattcgttgtgcctgtggcttctctgagtgatgacgcccgccgccttactgtcaccagtttgcaagagaccggcctgaaggtcaaccagccagcatcatttgcagtgcagctgaacggggcgcgcggagtcattgacgccagggtgcacaccccatccggcgccgtcgaagaatgttacgtgtctgagctggatagcgacaaacacacaatccggtttattcctcacgaaaacggtgtgcactccattgacgtcaagtttaatggagcacacatccctggttccccatttaagattagggtcggcgagcaatcacaggccggcgacccggggctagtatctgcttatggccccggactggagggcggcaccacaggggtcagcagtgagtttatagtgaatactctcaacgcaggcagtggtgcattatccgtaacgatcgacgggccttctaaagtacaactggactgcagggagtgcccagagggccatgttgtcacctatacacccatggctcctggcaattacctgatcgcgattaagtacggaggaccacagcatattgtgggatccccctttaaggctaaggtgacaggccctcggctgtcgggtggacattccctgcatgaaacttctacagtgctggtggaaaccgtcacaaagagctcttccagccgaggcagttcttactcctccatacccaagttctcttccgacgcatccaaggttgttaccaggggccccgggctcagccaggcctttgtgggccaaaaaaactcgttcactgtcgactgttccaaggccgggacaaacatgatgatggtaggagttcacgggcctaagacaccatgtgaagaggtgtatgttaagcatatgggcaaccgtgtgtataatgtgacctatacagtcaaagagaaaggtgactacatactcatcgtcaagtggggggacgaaagcgtccccggatcgccctttaaggtgaaggtcccgtag

SEQ ID NO: 117921 - DNA, 8177 bp, Artificial Sequence
  derived and/or modified sequence
atgatgaataattctggatatagcgatgccggattggggttgggcgacgaaaccgacgagatgccatctactgagaaggacttggccgaggatgcgccttggaaaaagatccaacagaacacatttactagatggtgcaacgaacacctcaagtgtgtaggaaaaaggcttaccgatcttcaaagagacctatcagatgggcttcggctgattgcgttgctcgaggtcctgtcccagaaaagaatgtatagaaaatttcaccccaggcctaattttcgccagatgaaactcgaaaacgtgtccgtcgctctggaattccttgagagggagcatattaaactggtaagtatcgattccaaggcaatagttgatggtaacctgaaacttatcctgggactaatatggaccctgatcctccattactctatctctatgcctatgtgggaggatgaagatgatgaagacgcgagaaagcagacgcccaagcagcggttacttggctggatccaaaacaaagtcccacagctccctattaccaatttcaatcgggattggcaagacgggaaggcgctaggggcactggttgacaattgcgctcccggattgtgccccgattgggaagcatgggacccgaaccagcctgtagaaaacgcacgtgaggctatgcagcaggctgatgactggttaggtgttccccaagtgattgcacctgaagaaattgtcgacccgaacgtggatgaacacagcgtcatgacgtacctaagtcagtttcctaaagccaagctgaagcccggagcaccggtacgatcgaagcagttgaatcccaaaaaagccatcgcttatggtcccggtatcgagccccaaggaaacactgtcttgcagcccgctcatttcactgtgcagacagtcgatgccggagttggggaagttctggtgtacatcgaggacccagaaggacatacggaggaggctaaggtggtgcctaataatgacaaagaccgcacctatgccgtcagttacgtgccaaaggtagctggactgcataaagtaaccgtactgttcgccggacagaatatcgagcgatcgccattcgaggttaacgtgggcatggcgctgggagatgcaaacaaggtttccgctcggggtcctggcctagagccggtcggcaacgtagcaaataaacccacatacttcgatatctatacagccggagccggaactggagatgttgcggttgtcattgtggatccccagggacgcagagacaccgtcgaagtcgcgctcgaagataaaggtgactctacgttccggtgcacctatcgtccagccatggagggtccccacactgtgcatgttgcctttgcgggagctcctatcacccgcagcccatttccggtgcacgtctcagaagcttgcaaccctaatgcttgccgcgcaagtggacggggtcttcagcccaagggcgtgcgcgtgaaggaggtagccgactttaaagttttcacgaaaggtgccggaagcggggagttgaaggtgactgtgaaggggccaaaggggaccgaagagccagtaaaggttagagaggccggagacggggtattcgagtgtgaatactaccctgtggtgccagggaagtatgtagtgacaataacttggggtggctatgccatcccaaggtcaccttttgaggttcaggtgtcacccgaagccggagtacagaaggtgcgcgcatggggcccaggtctcgagaccggccaggtgggcaagtcagccgactttgtagttgaagccattggaacagaggtaggcaccctcggattttcaattgaaggcccatcgcaggctaaaatcgaatgtgatgataagggcgacggatcctgcgatgtgaggtactggcctacagaacctggggagtacgccgtgcatgtgatctgcgacgacgaggatatccgggactctcctttcattgcccacattttaccagctccgccagattgtttccctgataaggtgaaggcgttcggcccagggctggagcccacaggctgcattgtggacaaacccgctgaatttacgattgatgcacgagctgctggcaaaggtgacctgaagttatacgcccaggatgctgacggatgccctatcgatatcaaagtcataccaaatggggacgggacattccgctgctcctatgtgcccaccaaaccgatcaagcatactattatcatctcatggggaggagtgaatgtgcctaagtccccgttccgggtgaatgtaggtgaaggctctcaccctgaacgtgtgaaggtctatggcccaggagttgagaaaaccggactgaaagctaacgagcctacttacttcacagttgattgctcagaggccggacagggcgacgtatccataggaattaagtgtgcacctggagtcgtgggaccggcagaggctgacatcgatttcgatataatcaagaatgacaacgacacattcactgtgaagtacacacctcctggtgccggaagatacacaatcatggtgctgtttgcaaatcaggagattcctgccagtcctttccacattaaggtcgatccgtcccatgatgcgagcaaagtcaaggctgaaggaccaggcttgaatcgaaccggggttgaagtcggaaaacctacacactttaccgtactgactaaaggagcaggaaaggccaaattagacgtgcagtttgcgggtaccgctaagggggaagtcgttagggatttcgaaatcatagacaaccatgactactcttacaccgttaaatataccgccgtgcagcaggggaacatggccgtgactgtaacatacggcggagatcccgtgccaaagagtccgttcgtggtcaatgttgccccacccctagatctctcaaagatcaaggttcagggactaaatagtaaagtggccgtgggacaagagcaggccttcagcgtgaatactaggggagctgggggtcagggacaattggacgttagaatgacaagtccctcaagacgcccaatcccgtgtaaactggagcctggcggaggggctgaagctcaggccgttagatacatgccacctgaggaaggaccctacaaggtggatataacgtacgacggacaccccgtcccgggtagccctttcgcggtggagggggttctccccccagatccgagcaaagtttgcgcctatgggccagggctgaaaggtggcttagtgggaacgcccgcaccgttctccatcgacacaaaaggggctggaacagggggtttgggactgacagtcgagggaccgtgtgaagctaagattgaatgccaggataacggagacggcagttgcgctgtatcttatcttccaacagaacctggagagtatacaattaatattcttttcgctgaggcccatatacccggaagtccttttaaggctacaattcgacctgtgtttgaccccagcaaagtgagggcttctggccctggcctggagagaggaaaggtgggggaggccgcaacgtttactgttgattgcagcgaagctggcgaagcagagctgaccatcgagatcctttctgacgcaggagtgaaggctgaagtcctcattcataacaatgctgacggcacataccacataacctattcacctgcttttcccggaacatatacgattaccatcaagtatgggggtcaccccgtgccaaagttcccaacaagagtccacgtccagcctgccgttgacacctccggtgtcaaagttagcggaccgggagttgaaccgcatggtgtcttgcgggaagtcaccaccgagttcacggtggatgccagaagtctgactgccaccggaggcaatcatgtgactgccagggtactgaacccctccggggctaagactgacacttacgtgacagataacggagacgggacttaccgtgtgcagtacaccgcctatgaagagggagtgcacttggtggaggtcctgtacgacgaggtggccgtccccaagagtccattcagggtcggggtgaccgaggggtgcgaccctactcgggtgcgagcgttcggtcctggcctggagggtggcctagttaataaggctaacaggtttactgtggaaactcggggagccggaacagggggtctaggactggccattgaaggcccttccgaggccaagatgagctgcaaagacaataaggatggcagctgtactgtggaatacattcccttcaccccaggggattacgatgtcaatattacttttggtggtaggccaatcccagggagcccctttcgagtccctgtaaaggacgtagtagatccgggaaaggttaaatgcagcgggcctgggcttggcgcaggcgttcgagcaagggtccctcaaacatttaccgtggactgctctcaggctgggagggccccacttcaggtggccgtgctcggcccaaccggggtagccgaacccgtggaagtccgtgataatggcgacggaacacacactgtacattatacacccgcaaccgatggaccttacactgtggccgtgaagtacgcagatcaggaggtgcctcgttccccgtttaagattaaagtgctgcccgctcacgacgcgagcaaggttagagcaagtgggccaggactgaacgcctcggggattccagccagcctgccagtagagtttactattgatgctagggacgcaggggaaggcttgctcacagttcagatcttagacccggagggcaagcctaaaaaagcaaatatccgtgataacggggacggcacctacaccgtctcttacctgcctgacatgagtggaaggtatactattactattaagtacggaggagacgagattccatactcaccatttcgaatccatgccctgccaacgggtgacgcctcaaagtgcctggtaaccgtgagcatcggcggacatgggcttggggcatgcctcggcccacgaattcagattggccaggagaccgtcattactgtggacgccaaagctgccggagaaggtaaagtgacctgtaccgtctcaacacctgatggagccgaattagacgttgacgttgtggagaatcacgacggaacatttgacatatactacacggctccagaacccggaaaatatgtaattacaattcggttcggcggagaacatatcccgaattccccatttcacgtcctagcttgcgacccactgccgcatgaagaggagccttccgaggtgcctcagcttaggcagccttacgctccaccacggccaggtgccaggccaacccactgggcaaccgaggagcctgtggtgcccgtcgagcccatggaaagcatgctgcgcccattcaatctcgtgatcccatttgccgtccagaagggagaattaacaggcgaagtcagaatgccaagcggcaagacagcaaggcctaatatcaccgacaacaaagatggcactatcaccgtgaggtacgccccaacagagaagggactgcatcagatgggcataaagtacgatggaaatcatatcccgggatcccctctacagttttatgttgatgcgattaatagccgacacgtcagtgcctatgggcctgggttgagccacgggatggtgaacaaaccggctaccttcactatcgtgaccaaagacgctggggaaggcggactgagtcttgccgtggagggcccatccaaggccgagatcacatgcaaggataataaggacggcacttgcacagtgtcttacttaccaaccgccccaggcgactactctattatcgtgaggtttgacgataagcacatcccaggtagtccattcaccgcgaagatcaccggagacgattccatgcggacgagtcagcttaacgtggggaccagcaccgacgttagcctgaagattaccgaaagcgatctgagccaactgacagcttctatccgagcaccctcagggaacgaagaaccatgtctgctgaaaagattgcctaacaggcatatcggaatctccttcacgcccaaagaggttggcgagcacgtagtatccgtcaggaaatcaggtaagcacgtcacgaactccccgtttaaaatcctggtgggaccatcggagatcggggacgcctctaaggtgagagtttggggcaaaggcctgtccgagggtcatacattccaagtagctgagttcatcgtggacacacggaacgcgggatacggaggactagggttgtccattgaaggtccctcgaaggtcgacatcaactgcgaagatatggaagacggaacatgcaaggtaacttactgtcccactgaaccaggcacctatatcatcaatatcaaatttgccgacaaacacgtgccaggcagccctttcactgtgaaggtgaccggagaaggacggatgaaggagagtattactaggaggagacaggccccatccatcgctacaattggcagcacatgtgacctcaacctgaaaattcctgggaattggttccagatggtgtctgcccaggagcggctcacacgaaccttcactagatccagccacacctatacaagaaccgaaagaacggaaatttcaaagacgcggggtggtgaaacgaagcgtgaagtgagggtggaggagagtacccaggttggaggtgatccatttcctgcagttttcggcgacttcctggggagagaacggttagggtctttcggaagcattactagacagcaggaaggggaggctagctctcaggacatgactgcacaggtaacctccccttccggaaaggttgaagctgctgagattgtggaaggcgaagacagtgcctattcggtgagattcgtgccccaggaaatgggcccacatacagtcgctgtcaaatacagaggtcagcacgtacccggttccccatttcaatttacagtaggtcctctcggtgagggtggcgcacacaaagttagagcaggagggactggacttgagagaggcgtagccggtgtccctgctgaattcagtatttggactagagaggcgggagcagggggtctcagtattgctgtagaagggccatccaaagccgaaatagcttttgaagacaggaaggacggtagctgtggggtatcttacgttgtacaggaaccaggcgattatgaagtctcgataaagttcaacgacgaacatattccagatagtccatttgttgtgcccgtggcctctctctctgacgacgcccgacggttgactgtcacatcgctgcaggagacaggcttaaaggtgaaccaacccgcttcatttgcagtgcaattgaatggagctcgcggtgtgattgacgcccgtgtgcatacgccgtccggagccgtggaggaatgctatgtgagcgagctggacagtgacaagcacacgattcgctttatcccacacgaaaacggcgttcactccattgatgtaaagttcaatggagcacacatacccggttcaccgtttaaaataagggttggggagcagtcccaggcgggtgaccctggcctggtgtctgcttacggccctggcttggaagggggaaccactggcgtctcctcagagttcatcgtcaataccctgaatgcgggaagtggagcccttagcgttaccatagacgggccttcaaaggtgcaattagactgccgcgagtgtccagaaggtcatgtggtcacatacacgcctatggcaccgggaaactacttgattgcaattaagtatggaggacctcagcacattgtcgggagcccttttaaagccaaggtgactggtccccgtctgtctggcggacattccttgcacgagacaagtaccgtgctggtggagacagtgacgaaatcctcaagctcccgtggaagcagttattcttcaattcccaaatttagctctgatgccagcaaagtggtgacccgaggcccaggcttgagccaggcgttcgtaggacaaaagaattcctttaccgtggactgttccaaagccggaactaacatgatgatggtgggtgtacacggacctaagacaccttgtgaggaagtgtatgtgaagcacatgggaaatagagtgtataatgtaacatatactgtcaaggagaagggcgattatattttgattgtgaagtggggcgacgaatcagtcccgggttcaccctttaaagtgaaggttcctta

SEQ ID NO: 117922 - DNA, 8178 bp, Artificial Sequence
  derived and/or modified sequence
atgatgaacaacagcggctacagcgacgccggcctgggcctgggcgacgagaccgacgagatgcccagcaccgagaaggacctggccgaggacgccccctggaagaagatccagcagaacaccttcaccagatggtgcaacgagcacctgaagtgcgtgggcaagagactgaccgacctgcagagagacctgagcgacggcctgagactgatcgccctgctggaggtgctgagccagaagagaatgtacagaaagttccaccccagacccaacttcagacagatgaagctggagaacgtgagcgtggccctggagttcctggagagagagcacatcaagctggtgagcatcgacagcaaggccatcgtggacggcaacctgaagctgatcctgggcctgatctggaccctgatcctgcactacagcatcagcatgcccatgtgggaggacgaggacgacgaggacgccagaaagcagacccccaagcagagactgctgggctggatccagaacaaggtgccccagctgcccatcaccaacttcaacagagactggcaggacggcaaggccctgggcgccctggtggacaactgcgcccccggcctgtgccccgactgggaggcctgggaccccaaccagcccgtggagaacgccagagaggccatgcagcaggccgacgactggctgggcgtgccccaggtgatcgcccccgaggagatcgtggaccccaacgtggacgagcacagcgtgatgacctacctgagccagttccccaaggccaagctgaagcccggcgcccccgtgagaagcaagcagctgaaccccaagaaggccatcgcctacggccccggcatcgagccccagggcaacaccgtgctgcagcccgcccacttcaccgtgcagaccgtggacgccggcgtgggcgaggtgctggtgtacatcgaggaccccgagggccacaccgaggaggccaaggtggtgcccaacaacgacaaggacagaacctacgccgtgagctacgtgcccaaggtggccggcctgcacaaggtgaccgtgctgttcgccggccagaacatcgagagaagccccttcgaggtgaacgtgggcatggccctgggcgacgccaacaaggtgagcgccagaggccccggcctggagcccgtgggcaacgtggccaacaagcccacctacttcgacatctacaccgccggcgccggcaccggcgacgtggccgtggtgatcgtggacccccagggcagaagagacaccgtggaggtggccctggaggacaagggcgacagcaccttcagatgcacctacagacccgccatggagggcccccacaccgtgcacgtggccttcgccggcgcccccatcaccagaagccccttccccgtgcacgtgagcgaggcctgcaaccccaacgcctgcagagccagcggcagaggcctgcagcccaagggcgtgagagtgaaggaggtggccgacttcaaggtgttcaccaagggcgccggcagcggcgagctgaaggtgaccgtgaagggccccaagggcaccgaggagcccgtgaaggtgagagaggccggcgacggcgtgttcgagtgcgagtactaccccgtggtgcccggcaagtacgtggtgaccatcacctggggcggctacgccatccccagaagccccttcgaggtgcaggtgagccccgaggccggcgtgcagaaggtgagagcctggggccccggcctggagaccggccaggtgggcaagagcgccgacttcgtggtggaggccatcggcaccgaggtgggcaccctgggcttcagcatcgagggccccagccaggccaagatcgagtgcgacgacaagggcgacggcagctgcgacgtgagatactggcccaccgagcccggcgagtacgccgtgcacgtgatctgcgacgacgaggacatcagagacagccccttcatcgcccacatcctgcccgccccccccgactgcttccccgacaaggtgaaggccttcggccccggcctggagcccaccggctgcatcgtggacaagcccgccgagttcaccatcgacgccagagccgccggcaagggcgacctgaagctgtacgcccaggacgccgacggctgccccatcgacatcaaggtgatccccaacggcgacggcaccttcagatgcagctacgtgcccaccaagcccatcaagcacaccatcatcatcagctggggcggcgtgaacgtgcccaagagccccttcagagtgaacgtgggcgagggcagccaccccgagagagtgaaggtgtacggccccggcgtggagaagaccggcctgaaggccaacgagcccacctacttcaccgtggactgcagcgaggccggccagggcgacgtgagcatcggcatcaagtgcgcccccggcgtggtgggccccgccgaggccgacatcgacttcgacatcatcaagaacgacaacgacaccttcaccgtgaagtacaccccccccggcgccggcagatacaccatcatggtgctgttcgccaaccaggagatccccgccagccccttccacatcaaggtggaccccagccacgacgccagcaaggtgaaggccgagggccccggcctgaacagaaccggcgtggaggtgggcaagcccacccacttcaccgtgctgaccaagggcgccggcaaggccaagctggacgtgcagttcgccggcaccgccaagggcgaggtggtgagagacttcgagatcatcgacaaccacgactacagctacaccgtgaagtacaccgccgtgcagcagggcaacatggccgtgaccgtgacctacggcggcgaccccgtgcccaagagccccttcgtggtgaacgtggccccccccctggacctgagcaagatcaaggtgcagggcctgaacagcaaggtggccgtgggccaggagcaggccttcagcgtgaacaccagaggcgccggcggccagggccagctggacgtgagaatgaccagccccagcagaagacccatcccctgcaagctggagcccggcggcggcgccgaggcccaggccgtgagatacatgccccccgaggagggcccctacaaggtggacatcacctacgacggccaccccgtgcccggcagccccttcgccgtggagggcgtgctgccccccgaccccagcaaggtgtgcgcctacggccccggcctgaagggcggcctggtgggcacccccgcccccttcagcatcgacaccaagggcgccggcaccggcggcctgggcctgaccgtggagggcccctgcgaggccaagatcgagtgccaggacaacggcgacggcagctgcgccgtgagctacctgcccaccgagcccggcgagtacaccatcaacatcctgttcgccgaggcccacatccccggcagccccttcaaggccaccatcagacccgtgttcgaccccagcaaggtgagagccagcggccccggcctggagagaggcaaggtgggcgaggccgccaccttcaccgtggactgcagcgaggccggcgaggccgagctgaccatcgagatcctgagcgacgccggcgtgaaggccgaggtgctgatccacaacaacgccgacggcacctaccacatcacctacagccccgccttccccggcacctacaccatcaccatcaagtacggcggccaccccgtgcccaagttccccaccagagtgcacgtgcagcccgccgtggacaccagcggcgtgaaggtgagcggccccggcgtggagccccacggcgtgctgagagaggtgaccaccgagttcaccgtggacgccagaagcctgaccgccaccggcggcaaccacgtgaccgccagagtgctgaaccccagcggcgccaagaccgacacctacgtgaccgacaacggcgacggcacctacagagtgcagtacaccgcctacgaggagggcgtgcacctggtggaggtgctgtacgacgaggtggccgtgcccaagagccccttcagagtgggcgtgaccgagggctgcgaccccaccagagtgagagccttcggccccggcctggagggcggcctggtgaacaaggccaacagattcaccgtggagaccagaggcgccggcaccggcggcctgggcctggccatcgagggccccagcgaggccaagatgagctgcaaggacaacaaggacggcagctgcaccgtggagtacatccccttcacccccggcgactacgacgtgaacatcaccttcggcggcagacccatccccggcagccccttcagagtgcccgtgaaggacgtggtggaccccggcaaggtgaagtgcagcggccccggcctgggcgccggcgtgagagccagagtgccccagaccttcaccgtggactgcagccaggccggcagagcccccctgcaggtggccgtgctgggccccaccggcgtggccgagcccgtggaggtgagagacaacggcgacggcacccacaccgtgcactacacccccgccaccgacggcccctacaccgtggccgtgaagtacgccgaccaggaggtgcccagaagccccttcaagatcaaggtgctgcccgcccacgacgccagcaaggtgagagccagcggccccggcctgaacgccagcggcatccccgccagcctgcccgtggagttcaccatcgacgccagagacgccggcgagggcctgctgaccgtgcagatcctggaccccgagggcaagcccaagaaggccaacatcagagacaacggcgacggcacctacaccgtgagctacctgcccgacatgagcggcagatacaccatcaccatcaagtacggcggcgacgagatcccctacagccccttcagaatccacgccctgcccaccggcgacgccagcaagtgcctggtgaccgtgagcatcggcggccacggcctgggcgcctgcctgggccccagaatccagatcggccaggagaccgtgatcaccgtggacgccaaggccgccggcgagggcaaggtgacctgcaccgtgagcacccccgacggcgccgagctggacgtggacgtggtggagaaccacgacggcaccttcgacatctactacaccgcccccgagcccggcaagtacgtgatcaccatcagattcggcggcgagcacatccccaacagccccttccacgtgctggcctgcgaccccctgccccacgaggaggagcccagcgaggtgccccagctgagacagccctacgccccccccagacccggcgccagacccacccactgggccaccgaggagcccgtggtgcccgtggagcccatggagagcatgctgagacccttcaacctggtgatccccttcgccgtgcagaagggcgagctgaccggcgaggtgagaatgcccagcggcaagaccgccagacccaacatcaccgacaacaaggacggcaccatcaccgtgagatacgcccccaccgagaagggcctgcaccagatgggcatcaagtacgacggcaaccacatccccggcagccccctgcagttctacgtggacgccatcaacagcagacacgtgagcgcctacggccccggcctgagccacggcatggtgaacaagcccgccaccttcaccatcgtgaccaaggacgccggcgagggcggcctgagcctggccgtggagggccccagcaaggccgagatcacctgcaaggacaacaaggacggcacctgcaccgtgagctacctgcccaccgcccccggcgactacagcatcatcgtgagattcgacgacaagcacatccccggcagccccttcaccgccaagatcaccggcgacgacagcatgagaaccagccagctgaacgtgggcaccagcaccgacgtgagcctgaagatcaccgagagcgacctgagccagctgaccgccagcatcagagcccccagcggcaacgaggagccctgcctgctgaagagactgcccaacagacacatcggcatcagcttcacccccaaggaggtgggcgagcacgtggtgagcgtgagaaagagcggcaagcacgtgaccaacagccccttcaagatcctggtgggccccagcgagatcggcgacgccagcaaggtgagagtgtggggcaagggcctgagcgagggccacaccttccaggtggccgagttcatcgtggacaccagaaacgccggctacggcggcctgggcctgagcatcgagggccccagcaaggtggacatcaactgcgaggacatggaggacggcacctgcaaggtgacctactgccccaccgagcccggcacctacatcatcaacatcaagttcgccgacaagcacgtgcccggcagccccttcaccgtgaaggtgaccggcgagggcagaatgaaggagagcatcaccagaagaagacaggcccccagcatcgccaccatcggcagcacctgcgacctgaacctgaagatccccggcaactggttccagatggtgagcgcccaggagagactgaccagaaccttcaccagaagcagccacacctacaccagaaccgagagaaccgagatcagcaagaccagaggcggcgagaccaagagagaggtgagagtggaggagagcacccaggtgggcggcgaccccttccccgccgtgttcggcgacttcctgggcagagagagactgggcagcttcggcagcatcaccagacagcaggagggcgaggccagcagccaggacatgaccgcccaggtgaccagccccagcggcaaggtggaggccgccgagatcgtggagggcgaggacagcgcctacagcgtgagattcgtgccccaggagatgggcccccacaccgtggccgtgaagtacagaggccagcacgtgcccggcagccccttccagttcaccgtgggccccctgggcgagggcggcgcccacaaggtgagagccggcggcaccggcctggagagaggcgtggccggcgtgcccgccgagttcagcatctggaccagagaggccggcgccggcggcctgagcatcgccgtggagggccccagcaaggccgagatcgccttcgaggacagaaaggacggcagctgcggcgtgagctacgtggtgcaggagcccggcgactacgaggtgagcatcaagttcaacgacgagcacatccccgacagccccttcgtggtgcccgtggccagcctgagcgacgacgccagaagactgaccgtgaccagcctgcaggagaccggcctgaaggtgaaccagcccgccagcttcgccgtgcagctgaacggcgccagaggcgtgatcgacgccagagtgcacacccccagcggcgccgtggaggagtgctacgtgagcgagctggacagcgacaagcacaccatcagattcatcccccacgagaacggcgtgcacagcatcgacgtgaagttcaacggcgcccacatccccggcagccccttcaagatcagagtgggcgagcagagccaggccggcgaccccggcctggtgagcgcctacggccccggcctggagggcggcaccaccggcgtgagcagcgagttcatcgtgaacaccctgaacgccggcagcggcgccctgagcgtgaccatcgacggccccagcaaggtgcagctggactgcagagagtgccccgagggccacgtggtgacctacacccccatggcccccggcaactacctgatcgccatcaagtacggcggcccccagcacatcgtgggcagccccttcaaggccaaggtgaccggccccagactgagcggcggccacagcctgcacgagaccagcaccgtgctggtggagaccgtgaccaagagcagcagcagcagaggcagcagctacagcagcatccccaagttcagcagcgacgccagcaaggtggtgaccagaggccccggcctgagccaggccttcgtgggccagaagaacagcttcaccgtggactgcagcaaggccggcaccaacatgatgatggtgggcgtgcacggccccaagaccccctgcgaggaggtgtacgtgaagcacatgggcaacagagtgtacaacgtgacctacaccgtgaaggagaagggcgactacatcctgatcgtgaagtggggcgacgagagcgtgcccggcagccccttcaaggtgaaggtgccctag

SEQ ID NO: 117923 - protein, 235 aa, Artificial Sequence
  derived and/or modified sequence
MTVLAPAWSPTTYLLLLLLLSSGLSGTQDCSFQHSPISSDFAVKIRELSDYLLQDYPVTVASNLQDEELCGGLWRLVLAQRWMERLKTVAGSKMQGLLERVNTEIHFVTKCAFQPPPSCLRFVQTNISRLLQETSEQLVALKPWITRQNFSRCLELQCQPDSSTLPPPWSPRPLEATAPTAPQPPLLLLLLLPVGLLLLAAAWCLHWQRTRRRTPRPGEQVPPVPSPQDLLLVEH

SEQ ID NO: 117924 - DNA, 708 bp, Artificial Sequence
  derived and/or modified sequence
atgaccgtgctggcccccgcctggagccccaccacctacctgctgctgctgctgctgctgagcagcggcctgagcggcacccaggactgcagcttccagcacagccccatcagcagcgacttcgccgtgaagatcagagagctgagcgactacctgctgcaggactaccccgtgaccgtggccagcaacctgcaggacgaggagctgtgcggcggcctgtggagactggtgctggcccagagatggatggagagactgaagaccgtggccggcagcaagatgcagggcctgctggagagagtgaacaccgagatccacttcgtgaccaagtgcgccttccagcccccccccagctgcctgagattcgtgcagaccaacatcagcagactgctgcaggagaccagcgagcagctggtggccctgaagccctggatcaccagacagaacttcagcagatgcctggagctgcagtgccagcccgacagcagcaccctgccccccccctggagccccagacccctggaggccaccgcccccaccgccccccagccccccctgctgctgctgctgctgctgcccgtgggcctgctgctgctggccgccgcctggtgcctgcactggcagagaaccagaagaagaacccccagacccggcgagcaggtgccccccgtgcccagcccccaggacctgctgctggtggagcactag

SEQ ID NO: 117925 - DNA, 708 bp, Artificial Sequence
  derived and/or modified sequence
atgacagtgctggcccccgcctggagcccgacaacctaccttcttctgcttttgctccttagtagtggactgagtggcacacaggattgctcattccaacacagccccatttcctccgacttcgcagtgaagatccgggagctgagtgactatttactgcaggattatcccgtgacagttgcctccaatcttcaggatgaggagctgtgcggcggattatggagactcgtgctggcacagcgctggatggaacggctaaagactgtggcaggaagcaaaatgcaggggctgctggagcgagtgaacacagagatacactttgtcaccaagtgtgcattccagccccctcccagctgcctccgcttcgtgcagaccaacatctcacggttgctgcaggagaccagtgagcaactggtggcccttaagccgtggatcacacggcagaattttagccggtgtctggagttgcagtgccaacccgacagctctacattaccccctccttggagcccgcgcccccttgaagccacggcacccaccgccccgcagcctccgctgctgctgctactgctgctgccagtgggtcttctactgctggccgctgcatggtgtcttcactggcaaaggacaagacgtcgcactccaagacctggagagcaggtgccgccagtgccatcaccccaggacctgctgctggtagagcattag

SEQ ID NO: 117926 - DNA, 1035 bp, Artificial Sequence
  derived and/or modified sequence
tctctggctgtcacccggcttggccccttccacacccaactggggcaagcctgacccggcgacaggaggcatgaggggcccccggccgaaatgacagtgctggcgccagcctggagcccaacaacctatctcctcctgctgctgctgctgagctcgggactcagtgggacccaggactgctccttccaacacagccccatctcctccgacttcgctgtcaaaatccgtgagctgtctgactacctgcttcaagattacccagtcaccgtggcctccaacctgcaggacgaggagctctgcgggggcctctggcggctggtcctggcacagcgctggatggagcggctcaagactgtcgctgggtccaagatgcaaggcttgctggagcgcgtgaacacggagatacactttgtcaccaaatgtgcctttcagcccccccccagctgtcttcgcttcgtccagaccaacatctcccgcctcctgcaggagacctccgagcagctggtggcgctgaagccctggatcactcgccagaacttctcccggtgcctggagctgcagtgtcagcccgactcctcaaccctgccacccccatggagtccccggcccctggaggccacagccccgacagccccgcagccccctctgctcctcctactgctgctgcccgtgggcctcctgctgctggccgctgcctggtgcctgcactggcagaggacgcggcggaggacaccccgccctggggagcaggtgccccccgtccccagtccccaggacctgctgcttgtggagcactgacctggccaaggcctcatcctggggaggatactgaggcacacagaggggagtcaccagccagaggatgcatagcctggacacagaggaagttggctagaggccggtcccttccttgggcccctctcattccctccccagaatggaggcaacgccagaatccagcaccggccccatttacccaactctgtacaaagcccttgtccccatgaaattgtatataaatcatccttttctacc

SEQ ID NO: 117927 - DNA, 1076 bp, Artificial Sequence
  derived and/or modified sequence
ggggcatgagggtccgagacttgttcttctgtcccttccaagacccggcgacaggaggcatgaggggcccccggccgaaatgacagtgctggcgccagcctggagcccaacaacctatctcctcctgctgctgctgctgagctcgggactcagtgggacccaggactgctccttccaacacagccccatctcctccgacttcgctgtcaaaatccgtgagctgtctgactacctgcttcaagattacccagtcaccgtggcctccaacctgcaggacgaggagctctgcgggggcctctggcggctggtcctggcacagcgctggatggagcggctcaagactgtcgctgggtccaagatgcaaggcttgctggagcgcgtgaacacggagatacactttgtcaccaaatgtgcctttcagcccccccccagctgtcttcgcttcgtccagaccaacatctcccgcctcctgcaggagacctccgagcagctggtggcgctgaagccctggatcactcgccagaacttctcccggtgcctggagctgcagtgtcagcccgactcctcaaccctgccacccccatggagtccccggcccctggaggccacagccccgacagccccgcagccccctctgctcctcctactgctgctgcccgtgggcctcctgctgctggccgctgcctggtgcctgcactggcagaggacgcggcggaggacaccccgccctggggagcaggtgccccccgtccccagtccccaggacctgctgcttgtggagcactgacctggccaaggcctcatcctgcggagccttaaacaacgcagtgagacagacatctatcatcccattttacaggggaggatactgaggcacacagaggggagtcaccagccagaggatgcatagcctggacacagaggaagttggctagaggccggtcccttccttgggcccctctcattccctccccagaatggaggcaacgccagaatccagcaccggccccatttacccaactctgtacaaagcccttgtccccatgaaattgtatataaatcatccttttctacca

SEQ ID NO: 117928 - DNA, 708 bp, Artificial Sequence
  derived and/or modified sequence
atgacagtgctggccccagcctggagccccaccacctacctgctgctgctgctgctgctgagcagcggcctgagcggcacccaggactgcagcttccagcacagccccatcagcagtgactttgctgtgaagatccgggagctgagtgactacctgctgcaggactaccctgtgacagtggccagcaacctgcaggatgaggagctgtgtggcggcctgtggaggctggtgctggcccagcgctggatggagcggctgaagacagtggccggcagcaagatgcagggcctgctggagcgggtgaacacagagatccactttgtgaccaagtgtgccttccagcccccacccagctgcctgcgctttgtgcagaccaacatcagccggctgctgcaggagaccagcgagcagctggtggccctgaagccctggatcacccggcagaacttcagccgctgcctggagctgcagtgccagcctgacagcagcaccctgcccccaccctggagcccccggcccctggaggccacagcccccacagccccccagccccccctgctgctgctgctgctgctgcctgtgggcctgctgctgctggccgccgcctggtgcctgcactggcagaggaccaggaggaggacccccaggcctggagagcaggtgccccctgtgcccagcccccaggacctgctgctggtggagcactag

SEQ ID NO: 117929 - DNA, 708 bp, Artificial Sequence
  derived and/or modified sequence
atgaccgtgctggcccccgcctggagccccaccacctacctgctgcttttactcctcctgtcttcaggtctgagcggcacccaggattgtagctttcaacactctccaatcagctccgattttgccgtgaagatcagagagctgagtgattacctcctgcaagactatcccgtgacagttgcgtcaaatctgcaggacgaagaactttgcggggggctctggaggctggtgcttgctcaaagatggatggagcgactcaaaaccgtcgcgggctcaaagatgcaggggctcctggagagagtcaacaccgagatccacttcgtgaccaagtgtgcattccagcctcccccttcatgtctccgcttcgtgcagaccaacatcagtaggctcctccaagaaacatcagaacaactggtggctctaaaaccctggatcactcgccagaacttctctagatgtcttgagctgcaatgccagcctgattcatccacccttcctcctccatggagtccgcggcccttggaggcaactgcccccacagctccccagcctccattgctgttgctcctccttctccctgttggcttactcttgctggccgccgcatggtgtctgcattggcagcgaacccgtagaaggaccccgagaccaggcgagcaggtgcctcctgtgcccagtcctcaggacctccttcttgttgaacattag

SEQ ID NO: 117930 - DNA, 708 bp, Artificial Sequence
  derived and/or modified sequence
atgactgtccttgcacccgcttggtcaccgaccacttatctgctgcttctgctactgctgtcctctgggttatctggcacacaggactgttcttttcagcactccccaatcagcagtgactttgcagtaaaaatccgggaactttctgattaccttctccaagactatcctgttacagtcgcgagcaatttacaggatgaagagctgtgcgggggtctgtggcggctcgttctggctcagaggtggatggagcggcttaaaacagtggctggcagcaagatgcagggcctcctggaacgggtgaacacagagatccattttgttaccaagtgtgcctttcagcctccccctagttgcctcaggttcgtgcaaactaacattagtcgcctgctgcaggagacgagtgaacagctcgtggctctgaaaccgtggatcaccagacagaatttcagccgctgcctcgagttacagtgccagcccgactctagtactctgcctccaccgtggtcacccaggcccctggaggcaacggcccctactgctcctcaaccacctctactgctgctactcctcctgcctgtcgggctgttgttactggccgctgcttggtgcttacattggcagaggacccgcagacgcacccctcgccctggggaacaggtgccgccagtccccagcccccaggacctgctgctggttgagcattag

SEQ ID NO: 117931 - DNA, 708 bp, Artificial Sequence
  derived and/or modified sequence
atgacagtcctcgccccagcgtggtctcccaccacctatctgctgctgctgcttttattaagctccgggttgagtggtacacaggactgttcttttcaacacagtcctatatcctccgactttgccgtcaaaattagggaattgagcgattacctgctccaggactatccggtgacggtggcctctaacctgcaggacgaggagctttgcggaggcctctggcggcttgtattagcacagcggtggatggaacgccttaagaccgttgccggaagtaaaatgcagggtctgctggagcgggtgaacaccgagatccacttcgtgaccaagtgtgccttccaaccccctccatcctgtctacgttttgtccaaaccaacatatcccgactgttgcaggaaacatccgaacagctggtcgccctgaagccttggattactcgccagaacttctccaggtgtcttgagctccagtgccagccagactcatctaccctgccaccaccttggtcacctcgccctctggaggccactgcacctaccgccccacaaccacctctactcctgctactgttgctccccgtcggattactcctactcgctgccgcttggtgtctgcactggcagcggactcgcaggagaactccaaggccgggtgaacaggtccctcctgtgccctccccccaagaccttttgcttgtggagcattag

SEQ ID NO: 117932 - DNA, 708 bp, Artificial Sequence
  derived and/or modified sequence
atgaccgtcctcgccccagcctggagcccgaccacgtatttgctcctgcttctcctactgtcctcaggcctatccggcacacaggactgcagcttccaacattccccgattagcagtgattttgccgtaaaaatccgggaactgtccgactatttgctccaagactatccggttacagtagctagtaatctgcaagacgaagagttgtgtggcggcctgtggcggttggtcttggcccagaggtggatggaaaggctgaagaccgtcgctggctcaaaaatgcagggattattggagcgggtgaatacagagatccacttcgtcaccaagtgtgcctttcagcctccaccttcctgtttgcgatttgtacagaccaacatcagccgactcctacaagaaaccagtgagcagctcgtggctctgaagccatggatcacccgacagaatttcagcagatgccttgaacttcagtgccaacctgactcgtcaaccctgccacccccatggtcccctcggcctcttgaggcgacagcccccacagcccctcagccaccactacttctactcctcctgttacccgtgggcttactgttactcgccgccgcttggtgcctgcactggcagcgcacccgaagacgaacccccaggccaggggaacaggtaccccccgtgccctcaccccaagacctgctgctggtggagcattag

SEQ ID NO: 117933 - DNA, 708 bp, Artificial Sequence
  derived and/or modified sequence
atgaccgtgctggcgcccgcctggtcacccaccacgtacttattgcttctcttgctactttctagtggtctgtcaggcacacaagactgcagttttcagcatagtccaatcagctcggatttcgcagtgaaaatcagagaactctcagattacctattacaagattaccctgtgacggtggcaagcaatctgcaggacgaggagctttgtggggggctatggagactcgtgttagcccaaagatggatggagagactcaaaactgtcgctggaagcaagatgcaaggacttttggagagagtgaatacagagatccacttcgtcaccaagtgtgcctttcagcctccaccttcctgtttgcgatttgtacagaccaacatcagccgactcctacaagaaaccagtgagcagctcgtggctctgaagccatggatcacccgacagaatttcagcagatgccttgaacttcagtgccaacctgactcgtcaaccctgccacccccatggtcccctcggcctcttgaggcgacagcccccacagcccctcagccaccactacttctactcctcctgttacccgtgggcttactgttactcgccgccgcctggtgccttcactggcagagaacgcggcgacgtacaccaagacccggcgaacaagtaccaccggtacccagccctcaggacctccttctcgtagaacactag

SEQ ID NO: 117934 - DNA, 708 bp, Artificial Sequence
  derived and/or modified sequence
atgactgtgttggcaccagcttggtcacctacaacgtacctgctactgctgctcttgctatcttctgggctatctggaacccaggattgttccttccagcattcacccatctcctctgattttgccgtgaagattagggagctatctgactacctgctgcaggactatccagtgaccgttgcctccaatctgcaggacgaagagctttgtggggggttatggagactggtgctcgcacagcgttggatggagcggttaaaaactgtcgcgggctctaagatgcaggggctgcttgagcgtgttaacacggagatacattttgtcacgaagtgcgctttccagcccccccctagctgccttcggtttgtgcagaccaacatatctagattgctgcaggaaacatctgagcagctggtcgccctcaaaccctggattaccagacagaacttttctagatgtttggagctccaatgccagcctgattctagcaccctgcctccaccttggtcaccaagacccttagaagctacagcccccacagcgccccagccccccctcctcctgctgttgctcctgcctgttgggctgctgctgctagcggccgcatggtgtctgcactggcagagaactaggaggcggacccctcgccctggagagcaggtcccccccgtcccttctccccaggacctcctcctcgtggaacattag

SEQ ID NO: 117935 - DNA, 708 bp, Artificial Sequence
  derived and/or modified sequence
atgaccgtgctggcccccgcctggagccccaccacctacctgctgctgctcctgctgctgagctccggactgtcgggtacgcaggattgctctttccaacactccccaatttcgtcggacttcgctgtgaagataagggaactgtcagattaccttctccaggactacccagtgactgtagcctccaacctgcaggatgaggagctctgtggaggcctttggagacttgtgttagcgcagcggtggatggaacgcctcaaaaccgtcgccggcagcaagatgcaggggctcctggaaagagtgaacaccgagatccatttcgtgactaagtgcgcttttcaaccgccccccagttgtttacggttcgtgcagaccaacattagccgtctcctgcaagagaccagcgagcagctcgtggcactgaagccatggataactcgccaaaatttttcccgctgtctggaactccagtgccagcccgactcttctactctgcctccaccttggtcaccccgtccccttgaagccaccgcaccaacggccccacagccccccctgctgctgctgctgctgctgcctgtcggattgttgttactggctgctgcttggtgtcttcactggcagcgtactaggcggaggaccccaaggcccggtgagcaggtgccgccagtaccaagccctcaggatctcctgctggtggaacactag

SEQ ID NO: 117936 - RNA, 708 nt, Artificial Sequence
  derived and/or modified sequence
augaccguccucgccccagccuggagcccgaccacguauuugcuccugcuucuccuacuguccucaggccuauccggcacacaggacugcagcuuccaacauuccccgauuagcagugauuuugccguaaaaauccgggaacuguccgacuauuugcuccaagacuauccgguuacaguagcuaguaaucugcaagacgaagaguuguguggcggccuguggcgguuggucuuggcccagagguggauggaaaggcugaagaccgucgcuggcucaaaaaugcagggauuauuggagcgggugaauacagagauccacuucgucaccaagugugccuuucagccuccaccuuccuguuugcgauuuguacagaccaacaucagccgacuccuacaagaaaccagugagcagcucguggcucugaagccauggaucacccgacagaauuucagcagaugccuugaacuucagugccaaccugacucgucaacccugccacccccaugguccccucggccucuugaggcgacagcccccacagccccucagccaccacuacuucuacuccuccuguuacccgugggcuuacuguuacucgccgccgcuuggugccugcacuggcagcgcacccgaagacgaacccccaggccaggggaacagguaccccccgugcccucaccccaagaccugcugcugguggagcauuag

SEQ ID NO: 117937 - RNA, 708 nt, Artificial Sequence
  derived and/or modified sequence
augaccgugcuggcgcccgccuggucacccaccacguacuuauugcuucucuugcuacuuucuaguggucugucaggcacacaagacugcaguuuucagcauaguccaaucagcucggauuucgcagugaaaaucagagaacucucagauuaccuauuacaagauuacccugugacgguggcaagcaaucugcaggacgaggagcuuuguggggggcuauggagacucguguuagcccaaagauggauggagagacucaaaacugucgcuggaagcaagaugcaaggacuuuuggagagagugaauacagagauccacuucgucaccaagugugccuuucagccuccaccuuccuguuugcgauuuguacagaccaacaucagccgacuccuacaagaaaccagugagcagcucguggcucugaagccauggaucacccgacagaauuucagcagaugccuugaacuucagugccaaccugacucgucaacccugccacccccaugguccccucggccucuugaggcgacagcccccacagccccucagccaccacuacuucuacuccuccuguuacccgugggcuuacuguuacucgccgccgccuggugccuucacuggcagagaacgcggcgacguacaccaagacccggcgaacaaguaccaccgguacccagcccucaggaccuccuucucguagaacacuag

SEQ ID NO: 117938 - protein, 471 aa, Artificial Sequence
  derived and/or modified sequence
MAKKVAVIGAGVSGLISLKCCVDEGLEPTCFERTEDIGGVWRFKENVEDGRASIYQSVVTNTSKEMSCFSDFPMPEDFPNFLHNSKLLEYFRIFAKKFDLLKYIQFQTTVLSVRKCPDFSSSGQWKVVTQSNGKEQSAVFDAVMVCSGHHILPHIPLKSFPGMERFKGQYFHSRQYKHPDGFEGKRILVIGMGNSGSDIAVELSKNAAQVFISTRHGTWVMSRISEDGYPWDSVFHTRFRSMLRNVLPRTAVKWMIEQQMNRWFNHENYGLEPQNKYIMKEPVLNDDVPSRLLCGAIKVKSTVKELTETSAIFEDGTVEENIDVIIFATGYSFSFPFLEDSLVKVENNMVSLYKYIFPAHLDKSTLACIGLIQPLGSIFPTAELQARWVTRVFKGLCSLPSERTMMMDIIKRNEKRIDLFGESQSQTLQTNYVDYLDELALEIGAKPDFCSLLFKDPKLAVRLYFGPCNSY

SEQ ID NO: 117939 - DNA, 3851 bp, Artificial Sequence
  derived and/or modified sequence
ttcagctggaagaatgctggaggaatacggaactcctcccatttctcacagccacctccaactcttaaaaacgcttccaactgcctcccagcacacaaccaagggagaaaactattctgtcaaagagacggtgccaaaaggcaaaaacaaaggagctgatggcaaagaaggtagctgtgattggagctggggtcagtggcctaatttctctgaagtgctgtgtggatgagggacttgagcccacttgctttgagagaactgaagatattggaggagtgtggaggttcaaagagaatgtggaagatggccgagcaagtatctatcaatctgtcgttaccaacaccagcaaagaaatgtcctgtttcagtgactttccaatgcctgaagattttccaaacttcctgcataattctaaacttctggaatatttcaggatttttgctaaaaaatttgatctgctaaaatatattcagttccagacaactgtccttagtgtgagaaaatgtccagatttctcatcctctggccaatggaaggttgtcactcagagcaacggcaaggagcagagtgctgtctttgacgcagttatggtttgcagtggccaccacattctacctcatatcccactgaagtcatttccaggtatggagaggttcaaaggccaatatttccatagccgccaatacaagcatccagatggatttgagggaaaacgcatcctggtgattggaatgggaaactcaggctcagatattgctgttgagctgagtaagaatgctgctcaggtttttatcagcaccaggcatggcacctgggtcatgagccgtatctctgaagatggctatccttgggactcagtgttccacacccggtttcgttctatgctccgcaatgtactgccacgaacagctgtaaaatggatgatagaacaacagatgaatcggtggttcaaccatgaaaattatggccttgagcctcaaaacaaatacattatgaaggaacctgtactaaatgatgatgtcccaagtcgtctactctgtggagccatcaaggtgaaatctacagtgaaagagctcacagaaacttctgccatctttgaggatggaacagtggaggagaacattgatgtcatcatttttgcaacaggatatagtttctcttttcccttccttgaagattcactcgttaaagtagagaataatatggtctcactgtataaatacatattccccgctcacctggacaagtcaaccctcgcgtgcattggtctcatccagcccctaggttccattttcccaactgctgaacttcaagctcgttgggtgacaagagttttcaaaggcttgtgtagcctgccctcagagagaactatgatgatggacattatcaaaaggaatgaaaaaagaattgacctgtttggagaaagccagagccagacgttgcagaccaattatgttgactacttggacgagctcgccttagagataggtgcgaagccagatttctgctctctcttgttcaaagatcctaaactggctgtgagactctatttcggaccctgcaactcctattagtatcgcctggttgggcctgggcaatgggaaggagccagaaatgccatcttcacccagaaacaaagaatactgaagccactcaagactcgggccctgaaggattcatctaatttctcagtttcttttctgttgaaaatcctgggccttcttgctgttgttgtggcctttttttgccaacttcaatggtcctagtcagcataatgctttgggctttattatcttgtcagtcactacctcctaaagaaaaaaaaaaaggctagaagaaaaaacattacattcatgttctaattatagattttagagttaggtagtacaggtaagggggaaattgtaaagaattagcagaattaggcatatgtacaaaaccaaaattttgtcatgaaattttgcctttccacgcttccctcagttcaccaaagttaccaaaatgtaaaataaaataagactggctcaggtaagtagtgctgccaaccctgatataggggagttgtatggaaaaatagtagaattacacagcatgaaaagcagcccatggtttaaattattggacaatttaaattgtgggtaaatatttaaaactcctgaacaatgtttctgatggtcttctatccaccctacttggtaacaaagttctcagatgttaggtcatgtttcatttgctcagtcggggatcactcaaaactactagacaaaaaagtgagaggatagatttagaaaacatcagtgatgctcagataaacttttaggacctcatattaagagctaagcaaatggccacatttcctatattttgacagagatactgctggaaaaattaaaattaaaatgccataatagctacctaacaaatatatatgtttaatgtttatcataggccagacattgtgctatgtgcatatcatatgtattatttcatttaattctcacaacaattctgtgaaatggttacagctattatagtcatttcacagatgatgaaactaagattcagagcagctgatcttgtgaggcagctggaattggaactcagatttgttgaactctagaactaaagatcataatgttgtcttgtaatatatttatttacaaaacacttcattatttataaagaatttactaacagtttatcttatttatacccatacatctgctactttgggaggccctttacatagaaaacagcattctttttgccaaatatgaccaaattacttttatttataatttttgatttatatttcagctagatctaaaaagcatctgaaggaatttacaatgaaagatacctatgcaataacatttaggataatctttgacattttggaaaaataagaattgaggaaaaaaagtgtatctttcaagtagatgcaaagcattataatgactgacacttgtatctaactccagtcttacagataactaaggcaaaaagctaaataaacaatatgtaacctctaacatttggtaaaaggaagtatactggtctgttagcagagacaaactttttttagaattgaagtctgaaacaaacaaaagcaattcaatgtcaatagacattaagcaacataatagacaaacatctcctaagggaacatttgttacagctgctccttccctgaactgtgctttggaagataagctctgtcctgagtccaaaccaagcccttccaagagagaacaaaggtcagagatgttgaagattccagcaaatttctcctcttatttctaccaagcctttgtgaacattgctcttcattttggcctgtacttctccctcagggacgtagaacaatggaatgtcagtcagtctctgtagttaaaactttttctttaaaattcaattaaggtacttctccctcagggacgtagaacaatggaatgtcagtcagtctctgtagttaaaactttttctttaaaattcaattaaggtacttctccctcagggacgtagaacaatggaatgtcagtcagtctctgtagttaaaactttttctttaaaattcaattaagttacaccagaatttacaggcaagattttttttttcattgctcccataagcaaatttgttttaaaataattgtaaatgaggtatatacttagttcttggttaaaaaatatattgctttgttaagtattaaagattatttgtaagtcattgtattaataatactaataaaatttatcaagcctttatagcaagggtcagtgaattaccactgcctgtgggccaaatctagctcactatctgtttttgtaaataaaattttataatagta

SEQ ID NO: 117940 - DNA, 5181 bp, Artificial Sequence
  derived and/or modified sequence
tttctcacagccacctccaactcttaaaaacgcttccaactgcctcccagcacacaaccaagggagaaaactattctgtcaaagagacggtgccaaaaggcaaaaacaaaggagctgatggcaaagaaggtagctgtgattggagctggggtcagtggcctaatttctctgaagtgctgtgtggatgagggacttgagcccacttgctttgagagaactgaagatattggaggagtgtggaggttcaaagagaatgtggaagatggccgagcaagtatctatcaatctgtcgttaccaacaccagcaaagaaatgtcctgtttcagtgactttccaatgcctgaagattttccaaacttcctgcataattctaaacttctggaatatttcaggatttttgctaaaaaatttgatctgctaaaatatattcagttccagacaactgtccttagtgtgagaaaatgtccagatttctcatcctctggccaatggaaggttgtcactcagagcaacggcaaggagcagagtgctgtctttgacgcagttatggtttgcagtggccaccacattctacctcatatcccactgaagtcatttccaggtatggagaggttcaaaggccaatatttccatagccgccaatacaagcatccagatggatttgagggaaaacgcatcctggtgattggaatgggaaactcaggctcagatattgctgttgagctgagtaagaatgctgctcaggtttttatcagcaccaggcatggcacctgggtcatgagccgtatctctgaagatggctatccttgggactcagtgttccacacccggtttcgttctatgctccgcaatgtactgccacgaacagctgtaaaatggatgatagaacaacagatgaatcggtggttcaaccatgaaaattatggccttgagcctcaaaacaaatacattatgaaggaacctgtactaaatgatgatgtcccaagtcgtctactctgtggagccatcaaggtgaaatctacagtgaaagagctcacagaaacttctgccatctttgaggatggaacagtggaggagaacattgatgtcatcatttttgcaacaggatatagtttctcttttcccttccttgaagattcactcgttaaagtagagaataatatggtctcactgtataaatacatattccccgctcacctggacaagtcaaccctcgcgtgcattggtctcatccagcccctaggttccattttcccaactgctgaacttcaagctcgttgggtgacaagagttttcaaaggcttgtgtagcctgccctcagagagaactatgatgatggacattatcaaaaggaatgaaaaaagaattgacctgtttggagaaagccagagccagacgttgcagaccaattatgttgactacttggacgagctcgccttagagataggtgcgaagccagatttctgctctctcttgttcaaagatcctaaactggctgtgagactctatttcggaccctgcaactcctattagtatcgcctggttgggcctgggcaatgggaaggagccagaaatgccatcttcacccagaaacaaagaatactgaagccactcaagactcgggccctgaaggattcatctaatttctcagtttcttttctgttgaaaatcctgggccttcttgctgttgttgtggcctttttttgccaacttcaatggtcctagtcagcataatgctttgggctttattatcttgtcagtcactacctcctaaagaaaaaaaaaaaggctagaagaaaaaacattacattcatgttctaattatagattttagagttaggtagtacaggtaagggggaaattgtaaagaattagcagaattaggcatatgtacaaaaccaaaattttgtcatgaaattttgcctttccacgcttccctcagttcaccaaagttaccaaaatgtaaaataaaataagactggctcaggtaagtagtgctgccaaccctgatataggggagttgtatggaaaaatagtagaattacacagcatgaaaagcagcccatggtttaaattattggacaatttaaattgtgggtaaatatttaaaactcctgaacaatgtttctgatggtcttctatccaccctacttggtaacaaagttctcagatgttaggtcatgtttcatttgctcagtcggggatcactcaaaactactagacaaaaaagtgagaggatagatttagaaaacatcagtgatgctcagataaacttttaggacctcatattaagagctaagcaaatggccacatttcctatattttgacagagatactgctggaaaaattaaaattaaaatgccataatagctacctaacaaatatatatgtttaatgtttatcataggccagacattgtgctatgtgcatatcatatgtattatttcatttaattctcacaacaattctgtgaaatggttacagctattatagtcatttcacagatgatgaaactaagattcagagcagctgatcttgtgaggcagctggaattggaactcagatttgttgaactctagaactaaagatcataatgttgtcttgtaatatatttatttacaaaacacttcattatttataaagaatttactaacagtttatcttatttatacccatacatctgctactttgggaggccctttacatagaaaacagcattctttttgccaaatatgaccaaattacttttatttataatttttgatttatatttcagctagatctaaaaagcatctgaaggaatttacaatgaaagatacctatgcaataacatttaggataatctttgacattttggaaaaataagaattgaggaaaaaaagtgtatctttcaagtagatgcaaagcattataatgactgacacttgtatctaactccagtcttacagataactaaggcaaaaagctaaataaacaatatgtaacctctaacatttggtaaaaggaagtatactggtctgttagcagagacaaactttttttagaattgaagtctgaaacaaacaaaagcaattcaatgtcaatagacattaagcaacataatagacaaacatctcctaagggaacatttgttacagctgctccttccctgaactgtgctttggaagataagctctgtcctgagtccaaaccaagcccttccaagagagaacaaaggtcagagatgttgaagattccagcaaatttctcctcttatttctaccaagcctttgtgaacattgctcttcattttggcctgtacttctccctcagggacgtagaacaatggaatgtcagtcagtctctgtagttaaaactttttctttaaaattcaattaaggtacttctccctcagggacgtagaacaatggaatgtcagtcagtctctgtagttaaaactttttctttaaaattcaattaagttacaccagaatttacaggcaagattttttttttcattgctcccataagcaaatttgttttaaaataattgtaaatgaggtatatacttagttcttggttaaaaaatatattgctttgttaagtattaaagattatttgtaagtcattgtattaataatactaataaaatttatcaagcctttatagcaagggtcagtgaattaccactgcctgtgggccaaatctagctcactatctgtttttgtaaataaaattttataatagtacacagccacactcattcatttattttctgtggttgctttcaagctacaattgtagagttgggtagtcgcaacagaatctctgtggcccacaaggctaaaatatttacattctcacccattacagaaaaagtttgataattcctgctttataatatgtaaggcattgtcccattttgcataacttgccttatttcatcattatcactacccatttagtagctatggttgttatcttacttctacagtggaagagattgaaaagcatttgtcaggttaatgctaaatcagtgcggaaatatagctccactaggaaaatattattaaatttatatccctaaaatttttagaaatctctcaaaatctttccaaatgttctggtatctttgaaaaatgtaaatagtttatttatagagaaccctacctctgaggttgactcaaaggttaaagaaggctcatcagtctatccttctgcctccatatatcctgaacatcaaactatcccaggaaaaccatctagagtagtttgtttcaaaatattagccacagaccacctacatcacaataactcagggagcttatagaagtgaagattcctgaatataaacatagtaataattcaacctactgaatggaaatctctgctgaaatccacagttttcataagctccccagatgattcctgtgtacattaaatctagaaaccattagtttgagatctctcaaaaataaaaataaaaattgctttcagagagtagcccatgaaatttcccattcttcaaggacaaattccttctgttcagccttggtcctccaactgcagtttacaatttttgttcttctcctgtaaagaatgtcaatggttatcaccttcaatagtttcaatatgtcccccaaagttatgtgtttgaaacttgcaatagtattgggagatggggcctaatgaggtgattaggtgaagtctctgccctcatgaaaagattaatcccattatctcaggagtgtgttggttataaaagcaagtttggctccctcttttcctcacacactctttttcccttctgccttcacctttgccgtgggtggacacagcaagaaggccctcatcagatgctggccccttggtcttgaatttcctagcctctacaactaagccaaataaatttctgtttattataaataacccagtctcagatattctgttacagaaacacaaaatggactaagacaccacccttttccaaaatctctccttgtgatggctccctttactaacctttcttttagctattccctttatgatagtttcttaattttttctatcaaaagctaaatatggcacacttgttctttacagaaaaataaagatattttaaacaaaatactagggccatggtatgtaataaaatttgaaacaataatttcaaataataaagattgaaaatgcttaacccag

SEQ ID NO: 117941 - DNA, 1416 bp, Artificial Sequence
  derived and/or modified sequence
atggccaaaaaggtcgcggtcatcggcgccggcgtttccggcttgatttcactgaagtgttgtgtggacgagggattggaacccacatgcttcgaacgtactgaagacatcggaggcgtttggcggttcaaggagaacgtggaagacgggagagcatccatttaccagagcgtcgtgactaacacctctaaggaaatgagctgtttcagcgatttccctatgccagaagacttccctaacttcttacacaacagtaaactgctggagtatttccgcattttcgctaagaagtttgacctgctgaagtatatccagttccaaaccacagtcctttctgtacgcaagtgccctgactttagctcatctggacaatggaaagtagttacccagagtaatgggaaggagcagtcagccgttttcgacgcagtgatggtgtgcagtggacaccatattcttcctcacataccactgaagtccttccctgggatggagcggtttaagggccagtacttccacagccggcaatataagcatccagatgggttcgagggtaaacggattctcgttatcggcatgggcaattctggctccgacatcgccgtggagctgagcaagaatgcagctcaagtgttcattagcaccagacacggcacctgggttatgtcaaggattagtgaggatgggtacccctgggattccgttttccacacccgattcaggagcatgctgcggaacgtccttcccagaacggcggttaagtggatgattgagcaacagatgaacagatggttcaatcacgaaaactatgggcttgaacctcagaataagtatatcatgaaagagccagtgcttaatgacgacgttccatcccggctcctgtgcggagcaatcaaggtgaaaagcacagttaaagagttgaccgagactagcgcgatattcgaggacgggaccgtggaggagaacattgatgtgatcatattcgccactggatattctttctctttcccctttttggaagatagtttagtgaaggtcgaaaataacatggtttctctgtacaagtacatcttcccagctcacttagacaaatcaacactggcctgtataggcctaattcaaccactggggagtatctttccaaccgctgagctccaagccagatgggtcactcgggtgttcaaaggcctctgtagtctgccctccgagcgcaccatgatgatggatataattaaaagaaacgaaaaacggattgacctattcggggaatcacagtcgcagacacttcagaccaattacgtcgattatctggacgaactcgcactcgagatcggagcgaagcccgatttctgcagcctgttgtttaaagaccctaagttagccgtaaggctgtactttggtccatgtaacagctattag

SEQ ID NO: 117942 - DNA, 1416 bp, Artificial Sequence
  derived and/or modified sequence
atggccaagaaggtggccgttatcggtgcaggcgtcagcggcctcattagccttaagtgttgcgtagacgagggcctcgagccgacgtgcttcgaaaggacagaagacatcgggggtgtgtggagattcaaggagaatgttgaggacggcagagcgtcaatctaccagtctgtggttactaatacgtctaaggaaatgagttgcttttcagattttcccatgcctgaggacttcccgaattttctgcacaattccaagctgctcgagtatttccggatctttgccaagaagtttgatctgctcaagtatatccaatttcagacaacggtgctctctgttcgtaagtgcccggacttctcatcaagcggccagtggaaagtggtgactcaatcaaatgggaaggaacaatcagctgtgttcgatgcagtcatggtgtgttctgggcaccacatattgccacacatcccccttaaatctttcccaggcatggaaaggttcaagggccagtactttcacagccgacagtacaaacaccctgacggctttgagggaaagcggatcttggtgattggcatgggaaattctgggagtgacatcgcagtggaactgagtaagaatgctgcacaggtgtttatctccacgcgacatggcacctgggtaatgtccaggatcagtgaagatggatacccatgggactcggtgtttcacaccagatttagatcaatgcttaggaacgtgctgcccaggaccgcagttaagtggatgatcgagcagcagatgaacaggtggtttaatcacgaaaactatggattggagccacagaacaaatacataatgaaggaacccgttctcaatgacgatgtgccatcccgattattatgcggcgcaatcaaggtcaagagcaccgttaaagaactcaccgagaccagtgcgatctttgaggacggcaccgtagaagagaacatcgacgtaatcatctttgccactggatatagcttcagtttcccctttctcgaagattcactggtgaaagtggagaacaacatggtttcgctgtataagtacatctttcctgcccatttggataagtccaccctggcatgcatcgggctgattcagccactcggaagtattttcccgactgcagaactgcaagctagatgggttaccagagtcttcaagggcctgtgttcattgcccagtgagcgcaccatgatgatggatattatcaagcgaaacgagaaaagaatcgatttgttcggggagagccagtcccagaccttacaaacaaattatgtggattatctcgacgagctggccttagagatcggcgccaaaccggatttttgcagtctcctgttcaaagacccaaaattggctgttcggctttactttgggccttgcaactcctactag

SEQ ID NO: 117943 - DNA, 1416 bp, Artificial Sequence
  derived and/or modified sequence
atggccaagaaggtggccgtcatcggggccggcgtgtctggcctcatcagcctgaagtgctgcgtggatgagggcctggagcccacctgctttgagaggacagaagatattggaggagtgtggaggttcaaggaaaatgtggaggatggccgggccagcatctaccagagcgtggtgaccaacaccagcaaggagatgagctgcttcagtgacttccccatgcctgaggacttccccaacttcctgcacaacagcaagctgctggagtacttccgcatctttgccaagaagtttgacctgctgaagtacatccagttccagaccaccgtgctgtctgtgaggaaatgtcctgacttcagcagcagcggccagtggaaggtggtgacccagagcaatggcaaggagcagagcgctgtgtttgatgctgtgatggtgtgcagcggccaccacatcctgccccacatccccctgaagagcttccctggcatggagcgcttcaagggccagtacttccacagccggcagtacaagcacccagatggctttgagggcaagaggatcctggtgattggcatgggcaacagcggcagtgacattgctgtggagctgagcaagaatgctgcccaggtgttcatcagcaccaggcatggcacctgggtgatgagccgcatcagtgaagatggctacccctgggacagcgtcttccacacccgcttccgctccatgctgagaaatgtgctgcccaggacagctgtgaagtggatgattgagcagcagatgaaccgctggttcaaccatgaaaattatggcctggagccccagaacaagtacatcatgaaggagcctgtgctgaatgatgatgtgcccagccggctgctgtgtggggccatcaaggtgaagagcacagtgaaggagctgacagagaccagcgccatctttgaagatggcaccgtggaggagaacattgatgtgatcatctttgccaccggctacagcttctccttccccttcctggaggacagcctggtgaaggtggagaacaacatggtgtccctgtacaagtacatcttccctgcccacctggacaagagcaccctggcctgcatcggcctcatccagcccctgggcagcatcttccccacagctgagctgcaggcccgctgggtgaccagggtcttcaagggcctgtgcagcctgcccagcgagaggaccatgatgatggacatcatcaagagaaatgagaagagaattgacctgtttggagagagccagagccagaccctgcagaccaactacgtggactacctggatgagctggccctggagattggagccaagccagacttctgcagcctgctcttcaaggaccccaagctggccgtgcggctgtacttcggcccctgcaacagctactag

SEQ ID NO: 117944 - DNA, 1416 bp, Artificial Sequence
  derived and/or modified sequence
atggccaagaaggtggccgtgatcggcgccggcgtgagcggcctgatttccctgaagtgttgcgtggatgagggacttgagccaacttgcttcgagaggacagaggacatcggaggagtgtggagatttaaagaaaatgttgaggatggccgcgctagcatatatcaaagtgtggtgactaacacctccaaagagatgtcctgcttcagtgactttccaatgcctgaggacttccccaattttctccacaactcaaagttgctggagtacttccgaatctttgcaaagaaatttgacctccttaagtatatccaatttcagactaccgtgctaagtgtgagaaagtgtcccgatttctcttccagcggtcaatggaaggtcgtgacccagagcaacggaaaagagcagagcgcagtctttgacgccgttatggtttgcagcggacatcatattctgccacacatccctttgaaatcttttcctggcatggaacggttcaagggtcagtactttcattccagacagtacaagcaccccgatgggtttgagggcaaacggattctcgtgattgggatgggaaacagcggctccgatattgccgtggagttgtctaaaaacgcggcgcaggtgttcattagcacgcggcatggaacttgggttatgagtagaattagcgaggatggatatccctgggacagcgtttttcataccaggttccgcagcatgctcagaaatgtgttgcccaggaccgccgttaaatggatgatcgaacagcagatgaatagatggttcaatcacgagaactatggcctagaacctcagaacaagtacataatgaaggagcctgtactaaacgacgatgttccttcgcgccttctatgtggggccatcaaggtcaagtcaacagtgaaggaactcactgagacctctgctattttcgaagatggtacagtcgaagaaaacatcgatgtgattatttttgccaccggctactccttcagcttccctttcctggaggactccctggtgaaggtggagaataacatggtttcattgtacaagtacatctttcccgcacacctagacaaatccaccctggcttgtattggcttaatccagcccctcggctccatctttcctacagccgaactgcaggccaggtgggtcacacgcgtcttcaaaggcctctgcagtctcccttctgagcgtaccatgatgatggatattatcaagagaaacgagaaacggattgacctgttcggggagagtcagagccaaaccctccagaccaattatgtcgactacctggacgagcttgctctggaaattggtgcaaagccagacttctgtagcttgctgtttaaagatcctaaactcgccgtccgcctgtactttggaccctgtaactcttattag

SEQ ID NO: 117945 - DNA, 1416 bp, Artificial Sequence
  derived and/or modified sequence
atggccaagaaggtggccgtgatcggcgccggcgtgagcggcctgattagcctgaagtgttgtgtcgacgagggactagagcccacttgtttcgaaagaaccgaggatatcggaggagtctggaggtttaaggagaatgttgaggatggtagggcctcaatctaccagtccgttgtgactaacacttcaaaggagatgagctgttttagtgattttcccatgccagaagactttcctaacttcctgcataattcaaagctgctcgaatacttcaggatctttgccaaaaaattcgatctgctgaaatacatccagtttcagactaccgtgctgtcggtgcggaaatgtcccgatttctcctcctccggtcagtggaaagttgtgacacagagtaatggtaaggagcagtctgccgtcttcgatgctgtgatggtttgttcaggccaccacatcctgccccacattccactcaaatctttcccaggaatggagagatttaagggacaatactttcactctcgccaatataagcaccccgatggcttcgaaggcaagaggatcctcgttattggaatgggaaattctggctcggacatcgccgtggagttgtccaagaatgcggcacaggtcttcatctcaactcggcatggcacatgggtgatgagccgcatcagcgaagacgggtatccctgggatagcgtatttcacactcggtttcgaagcatgctgcggaacgttctgcctaggacagccgtgaagtggatgatagaacagcaaatgaacagatggttcaaccacgagaattacggcctcgaacctcagaacaagtatattatgaaagagcccgtgctgaatgatgatgtgccttcgaggctactatgtggggcaattaaagtcaaatccactgtgaaagagttgacagagacttctgcgatctttgaggacgggacagtggaggagaatatagacgtgatcatcttcgccacgggttattcattctcatttcctttcttagaggattcattggtcaaggttgaaaacaacatggtgtccctatataagtatatcttcccagctcatttagacaagtcaaccctggcctgcatcggtttgattcaaccactgggctcaatattccctaccgccgagctccaggctaggtgggtgacccgcgtgttcaaaggactctgcagtttgccgtcggaaaggacgatgatgatggacattataaagagaaatgagaaacgtatcgacctcttcggggagagtcaatcccaaaccctccagacaaactacgtcgactacctcgatgagctcgcactggagatcggcgccaaacccgacttctgctcccttctgttcaaagatccaaagctggcagtccggctgtactttggcccctgcaactcctattag

SEQ ID NO: 117946 - DNA, 1416 bp, Artificial Sequence
  derived and/or modified sequence
atggccaaaaaggtggccgtcattggggcaggagtgtccggactgatttcattgaaatgctgtgttgacgagggcctggagccaacatgttttgagagaacagaggatatcggaggtgtgtggagatttaaggaaaatgtcgaagatggaagagctagtatctatcagagcgtggttacaaacacttccaaggagatgtcttgtttttccgattttcccatgcctgaggattttcccaacttcctgcacaacagtaaacttctggaatatttccgaatctttgccaagaagttcgacctgttgaaatatatccaattccagaccaccgtgttatctgttcggaagtgtcctgatttctcttcctctggacagtggaaagtcgtgacgcagagtaatggaaaggaacaaagtgcggtattcgatgccgtcatggtctgcagcggccaccacatcctacctcacatacccctcaagtccttccccggtatggaacgattcaaaggacaatattttcacagccgacagtataagcatcctgatgggttcgaaggcaaaagaattttggtcattggcatgggcaactccggctcagacatcgccgtggagctctcaaaaaacgccgctcaggttttcatatcaacacgacacggcacttgggtgatgtctcgcatttctgaggacggctacccatgggattccgtgtttcacacacgttttagaagtatgctgagaaacgtgttacctaggaccgccgttaagtggatgatcgaacagcagatgaaccggtggttcaatcacgaaaattacgggctggaaccgcagaacaagtacatcatgaaggagccggttctaaacgatgatgtgccatcccggttattatgtggcgcaattaaagtgaagtcaacggtaaaggaattgactgagacatccgctatctttgaggatggaactgtcgaggaaaatatcgatgtgattatcttcgctacgggatactcctttagcttcccgtttctcgaggacagcctggttaaagtggagaacaacatggtgtcactgtacaaatatattttcccagcgcatctggataagagcaccctcgcatgcataggactgattcagccgctggggtccatcttccccactgctgaactccaggcgagatgggtgacaagggtcttcaagggtctatgttcactgccgagcgagcgcacgatgatgatggacatcatcaaaaggaacgaaaagaggatcgacctcttcggcgagtcacaaagccagacgctccaaactaattacgtcgactacttggacgaactcgctctggagattggggctaaacctgatttctgtagcctattgtttaaggatccgaaactggcagttaggctgtattttgggccatgcaactcatactag

SEQ ID NO: 117947 - DNA, 1416 bp, Artificial Sequence
  derived and/or modified sequence
atggctaaaaaggtcgctgtcatcggggctggtgtctcaggcctgatttcacttaagtgttgtgtggatgagggactggagcccacatgctttgaaaggaccgaggatattggcggagtttggagattcaaggaaaacgtagaagacggcagagcgtctatttatcagagcgtcgtcactaacacaagcaaagaaatgtcatgcttttcggatttccccatgccagaggacttcccgaacttcttgcataatagcaagctgctggagtattttaggatttttgccaaaaaatttgacctgctaaagtacatacagttccagactacagtgttaagtgttcggaagtgccccgatttcagctctagcgggcagtggaaagtggtcacacagagcaatggaaaagagcaatccgctgtatttgacgctgtgatggtttgctctggccatcatatcctcccgcacatacccctgaagtcctttcctggcatggaacgtttcaagggccagtacttccactcccgtcagtacaaacaccccgacggcttcgaaggcaaacggatccttgttataggaatgggcaactcagggagcgacatcgccgtggaactaagcaagaatgcggctcaggttttcattagcactaggcatggcacttgggtcatgtctcggatatctgaggacggatatccatgggattcagttttccacacccgcttcaggtcaatgctgcggaacgttttgccccgtaccgccgtgaagtggatgattgagcagcagatgaatcgatggtttaatcacgagaattatggcctggaaccccagaataaatacatcatgaaagaaccagtattaaatgacgacgtgccctcacgcctgctatgcggggctatcaaagtcaaatccactgtcaaagaacttacagagacttctgccatatttgaggatggcactgttgaggagaatatcgatgttataattttcgccacagggtactccttcagtttcccattcctggaggatagcctcgtgaaggtggaaaataacatggtttccctctataaatatatattccccgcacatctggataagtcaaccctggcctgcatcgggctgatccagcctttaggctccattttccccaccgccgagctccaggccagatgggtgacacgggtgtttaaggggctgtgttccttaccctcagagagaaccatgatgatggacataatcaaacgcaacgagaagcgcattgatctatttggcgaatcccaatcccaaaccctgcagaccaattatgtagattacctggacgaactggctcttgaaattggcgctaaaccagatttttgttccttactattcaaggacccaaagctggctgttaggctgtactttggaccttgtaattcatattag

SEQ ID NO: 117948 - DNA, 1416 bp, Artificial Sequence
  derived and/or modified sequence
atggccaagaaggtggccgtgatcggcgccggcgtgagcggcctgatcagcctgaagtgctgcgtggacgagggcctggagcccacctgcttcgagagaaccgaggacatcggcggcgtgtggagattcaaggagaacgtggaggacggcagagccagcatctaccagagcgtggtgaccaacaccagcaaggagatgagctgcttcagcgacttccccatgcccgaggacttccccaacttcctgcacaacagcaagctgctggagtacttcagaatcttcgccaagaagttcgacctgctgaagtacatccagttccagaccaccgtgctgagcgtgagaaagtgccccgacttcagcagcagcggccagtggaaggtggtgacccagagcaacggcaaggagcagagcgccgtgttcgacgccgtgatggtgtgcagcggccaccacatcctgccccacatccccctgaagagcttccccggcatggagagattcaagggccagtacttccacagcagacagtacaagcaccccgacggcttcgagggcaagagaatcctggtgatcggcatgggcaacagcggcagcgacatcgccgtggagctgagcaagaacgccgcccaggtgttcatcagcaccagacacggcacctgggtgatgagcagaatcagcgaggacggctacccctgggacagcgtgttccacaccagattcagaagcatgctgagaaacgtgctgcccagaaccgccgtgaagtggatgatcgagcagcagatgaacagatggttcaaccacgagaactacggcctggagccccagaacaagtacatcatgaaggagcccgtgctgaacgacgacgtgcccagcagactgctgtgcggcgccatcaaggtgaagagcaccgtgaaggagctgaccgagaccagcgccatcttcgaggacggcaccgtggaggagaacatcgacgtgatcatcttcgccaccggctacagcttcagcttccccttcctggaggacagcctggtgaaggtggagaacaacatggtgagcctgtacaagtacatcttccccgcccacctggacaagagcaccctggcctgcatcggcctgatccagcccctgggcagcatcttccccaccgccgagctgcaggccagatgggtgaccagagtgttcaagggcctgtgcagcctgcccagcgagagaaccatgatgatggacatcatcaagagaaacgagaagagaatcgacctgttcggcgagagccagagccagaccctgcagaccaactacgtggactacctggacgagctggccctggagatcggcgccaagcccgacttctgcagcctgctgttcaaggaccccaagctggccgtgagactgtacttcggcccctgcaacagctactag

SEQ ID NO: 117949 - protein, 325 aa, Artificial Sequence
  derived and/or modified sequence
MVCGSPGGMLLLRAGLLALAALCLLRVPGARAAACEPVRIPLCKSLPWNMTKMPNHLHHSTQANAILAIEQFEGLLGTHCSPDLLFFLCAMYAPICTIDFQHEPIKPCKSVCERARQGCEPILIKYRHSWPENLACEELPVYDRGVCISPEAIVTADGADFPMDSSNGNCRGASSERCKCKPIRATQKTYFRNNYNYVIRAKVKEIKTKCHDVTAVVEVKEILKSSLVNIPRDTVNLYTSSGCLCPPLNVNEEYIIMGYEDEERSRLLLVEGSIAEKWKDRLGKKVKRWDMKLRHLGLSKSDSSNSDSTQSQKSGRNSNPRQARN

SEQ ID NO: 117950 - DNA, 3162 bp, Artificial Sequence
  derived and/or modified sequence
acagacgtccctgcggggctcctcctgagcgtccctcctgccagccagggtcgcagccgcagcggcggccgcagctcttagcccacacaggacttgtaaactcttactgcacccttctctcccattaggagcttttcctccctccttccccccaacccctctgtcctcctcactttggggaatttaatgctttctttagcatctttttgtgtgcgtgatctaggggaggagacaccccagagctccaactagctctcagctgaattctacttttgtttttatgtcttcctcgcctcctctcgtgtccctcttatctgactgatctgcgaagtctgatgcttctgccagagggagaggaataaatagatgttgctgcttccgaaggcttagacgttgggaaagagcagcctgggcggcaggggcggtggctggagctcggtaaagctcgtgggaccccattgggggaatttgatccaaggaagcggtgattgccgggggaggagaagctcccagatccttgtgtccacttgcagcgggggaggcggagacggcggagcgggccttttggcgtccactgcgcggctgcaccctgccccatcctgccgggatcatggtctgcggcagcccgggagggatgctgctgctgcgggccgggctgcttgccctggctgctctctgcctgctccgggtgcccggggctcgggctgcagcctgtgagcccgtccgcatccccctgtgcaagtccctgccctggaacatgactaagatgcccaaccacctgcaccacagcactcaggccaacgccatcctggccatcgagcagttcgaaggtctgctgggcacccactgcagccccgatctgctcttcttcctctgtgccatgtacgcgcccatctgcaccattgacttccagcacgagcccatcaagccctgtaagtctgtgtgcgagcgggcccggcagggctgtgagcccatactcatcaagtaccgccactcgtggccggagaacctggcctgcgaggagctgccagtgtacgacaggggcgtgtgcatctctcccgaggccatcgttactgcggacggagctgattttcctatggattctagtaacggaaactgtagaggggcaagcagtgaacgctgtaaatgtaagcctattagagctacacagaagacctatttccggaacaattacaactatgtcattcgggctaaagttaaagagataaagactaagtgccatgatgtgactgcagtagtggaggtgaaggagattctaaagtcctctctggtaaacattccacgggacactgtcaacctctataccagctctggctgcctctgccctccacttaatgttaatgaggaatatatcatcatgggctatgaagatgaggaacgttccagattactcttggtggaaggctctatagctgagaagtggaaggatcgactcggtaaaaaagttaagcgctgggatatgaagcttcgtcatcttggactcagtaaaagtgattctagcaatagtgattccactcagagtcagaagtctggcaggaactcgaacccccggcaagcacgcaactaaatcccgaaatacaaaaagtaacacagtggacttcctattaagacttacttgcattgctggactagcaaaggaaaattgcactattgcacatcatattctattgtttactataaaaatcatgtgataactgattattacttctgtttctcttttggtttctgcttctctcttctctcaacccctttgtaatggtttgggggcagactcttaagtatattgtgagttttctatttcactaatcatgagaaaaactgttcttttgcaataataataaattaaacatgctgttaccagagcctctttgctggagtctccagatgttaatttactttctgcaccccaattgggaatgcaatattggatgaaaagagaggtttctggtattcacagaaagctagatatgccttaaaacatactctgccgatctaattacagccttatttttgtatgccttttgggcattctcctcatgcttagaaagttccaaatgtttataaaggtaaaatggcagtttgaagtcaaatgtcacataggcaaagcaatcaagcaccaggaagtgtttatgaggaaacaacacccaagatgaattatttttgagactgtcaggaagtaaaataaataggagcttaagaaagaacattttgcctgattgagaagcacaactgaaaccagtagccgctggggtgttaatggtagcattcttcttttggcaatacatttgatttgttcatgaatatattaatcagcattagagaaatgaattataactagacatctgctgttatcaccatagttttgtttaatttgcttccttttaaataaacccattggtgaaagtctttttttttctcttcttttaaaataaatcagaattgccgtattgaccaggaaaagattatgtatgcacgtgcaccagggttagtttttaaaagtacatggctccataaaaatgctgtagattacagagtgataaaatatgcaggtttttttgtttttgttttttctgttgtgtgtgtgtctgtatttgtgtacatgtgtgtccttgcactcacacccaaggtggattaaaatacaggcctgcaaactggcctgcactttatcatttggatttgtgctgcttaatgctcagcgaaaaatgtctagtaaaatgaattatggttgtcaggagagaggttatttcgacttttgaaccaattgcacatttctcattacccaagctgtggtgagatcccaggggctgtggtgaacaaatgatgcttttatagatggtccctagcttacaatgattcaatttacaatgcttcaatttaacaatttgttgacttacaatgggtttatcaggatgtaacccaatgcatttcaacttacgatattttcagtttcgaatgggtttatccagatgtaaccccatcgtaaatggcggagcatctgtacttccttcctctggcagagttccttagagcctgtgccaattacttgaaagtttcattctctgccatttacatgtgtgctattagtagaaccaaatttctaagctgtggcgtgctgaaaataaaatgcttatgaagcaaaaa

SEQ ID NO: 117951 - DNA, 978 bp, Artificial Sequence
  derived and/or modified sequence
atggtttgtggcagtcccggcggtatgctgctactacgagccggcctgctggccttggccgcactgtgcttactcagggtcccgggggctcgggcggccgcctgtgagcccgtgcgcatcccgttatgtaagagcttaccatggaacatgacgaagatgccgaatcaccttcaccattccacgcaggccaatgccattttagcgattgagcagttcgaggggctccttgggacccactgctcacctgaccttctgttttttctttgcgcaatgtatgccccaatctgcacaatcgactttcaacacgagcccatcaaaccatgtaaatccgtgtgtgagagagccaggcagggatgcgaacccatattaatcaagtatcgacactcttggccggagaaccttgcctgcgaagaactgcccgtgtacgataggggagtgtgtattagcccagaggctatcgtgactgctgacggggccgattttccgatggacagctctaacggtaattgccggggcgccagctccgagagatgtaaatgcaagcccatcagggcgactcagaagacctatttccgaaacaactacaattatgtgatacgtgccaaagtcaaggagatcaagacaaagtgtcatgacgtgacagcagtggtcgaggtgaaggagatactaaagagctcccttgtaaatattccgcgggatacggttaacttgtacaccagttccgggtgtttgtgtcccccacttaacgttaacgaagaatacattatcatggggtatgaggatgaggaaagaagcaggctgttgctggtggaggggagcatcgcagaaaagtggaaggatagactaggtaaaaaggtaaaacgttgggatatgaaattacgtcatcttggtctttctaagtctgacagttcaaatagtgacagcacacagtcgcaaaaatccggcaggaatagcaacccacgtcaagcgcggaactag

SEQ ID NO: 117952 - DNA, 978 bp, Artificial Sequence
  derived and/or modified sequence
atggtgtgtggcagccctgggggcatgctgctgctgcgggccggcctgctggccctggccgccctgtgcctgctgcgggtgcctggggcccgggctgctgcctgtgagcctgtgcgcatccccctgtgcaagagcctgccctggaacatgaccaagatgcccaaccacctgcaccacagcacccaggccaatgccatcctggccatcgagcagtttgagggcctgctgggcacccactgcagcccagacctgctcttcttcctgtgtgccatgtatgcccccatctgcaccatcgacttccagcacgagcccatcaagccctgcaagtctgtgtgtgagcgggcccggcagggctgtgagcccatcctgatcaagtaccgccacagctggccagagaacctggcctgtgaggagctgcctgtgtatgacagaggagtgtgcatcagccctgaggccatcgtgacagcagatggagctgacttccccatggacagcagcaatggaaactgccgcggggccagcagcgagcgctgcaagtgcaagcccatccgggccacccagaagacctacttcaggaacaactacaactacgtgatccgggccaaggtgaaggagatcaagaccaagtgccatgatgtgacagctgtggtggaggtgaaggagatcctgaagagcagcctggtgaacatcccccgggacacagtgaacctgtacaccagcagcggctgcctgtgcccccccctgaatgtgaatgaggagtacatcatcatgggctatgaagatgaggagaggagccggctgctgctggtggagggcagcattgctgagaagtggaaggaccggctgggcaagaaggtgaagcgctgggacatgaagctgcggcacctgggcctgagcaagagtgacagcagcaacagcgacagcacccagagccagaagagcggcaggaacagcaacccccggcaggccaggaactag

SEQ ID NO: 117953 - DNA, 978 bp, Artificial Sequence
  derived and/or modified sequence
atggtgtgcggcagccccggcggcatgctgctgctgcgggccggcttattggccctggcagcgctgtgtctgctccgagttcctggcgcacgagcagctgcctgcgagcctgtgagaattccattgtgcaagagccttccttggaacatgacaaagatgcctaaccatctgcaccactctacccaagccaatgcaattctggctattgaacaatttgaaggccttctgggaacacactgctctccagacctcctcttcttcctgtgcgcgatgtacgccccaatctgcacaatcgatttccagcacgaacctataaaaccttgtaaatccgtgtgcgagagagcccgccaagggtgtgaaccaatcctcatcaagtaccggcactcatggccggaaaaccttgcttgtgaggaacttccagtgtacgaccgcggcgtgtgcatctcacccgaggcgatagttaccgccgatggtgctgactttccaatggacagcagcaacggcaattgcagaggggccagctcagagaggtgcaagtgtaagcctattcgcgcaacacaaaaaacctactttcgcaacaattataactacgtgattcgtgctaaagtcaaggagataaagaccaaatgccacgacgtgacagctgtcgtggaggttaaggaaatcctgaaaagtagcctggttaatataccccgcgacacagtgaacctgtacacgtcatccggatgcctgtgccctcccttgaacgtgaacgaagaatacattataatggggtatgaggacgaggaacggtctcggctgttgttagtggaagggagtatcgcagaaaagtggaaggacagacttgggaagaaggtaaagaggtgggatatgaaactgcgccaccttggactctcgaaaagtgacagtagcaactctgacagcacccagtctcaaaagagcggccggaattctaatcctaggcaggcccgcaactag

SEQ ID NO: 117954 - DNA, 978 bp, Artificial Sequence
  derived and/or modified sequence
atggtttgtggtagccccggtgggatgttattactccgcgctggcctgctcgctctcgcagcgctgtgtcttctgcgcgtcccaggcgcaagagccgctgcctgtgagccggttcggattccgctttgtaagtcactcccttggaacatgactaagatgcccaaccatctccatcactctacgcaagcaaatgccatacttgctatcgagcagtttgagggacttcttggcacacactgctctccagatctcctgttcttcctgtgcgctatgtacgcacccatttgcactatagattttcagcatgagcctatcaagccctgcaagtccgtctgtgagcgcgctcgccaaggctgcgaacctattcttatcaagtacagacacagctggcctgaaaatttggcctgcgaggagctgcccgtgtacgatcgcggtgtgtgcatcagtcccgaagctattgtgacagccgacggcgctgatttcccgatggactcctccaatggaaactgccgcggtgcatcatcagagcgttgcaagtgcaagccaatcagagccacccagaagacttatttcagaaataactacaactacgtgattagggcaaaggtcaaagaaatcaaaaccaaatgccatgacgtgactgctgtagttgaggtgaaggaaatactaaagagcagcctggtgaatatcccacgagacaccgttaatctttatacttcatctgggtgtttgtgcccaccccttaacgtgaatgaggagtatattatcatgggctacgaggatgaggagaggtctcgcctcctcctggtcgaaggcagcattgctgagaaatggaaggaccggctcggcaagaaggtgaaacgttgggacatgaagctccggcacctgggcctgagtaagagcgacagtagcaacagcgattcaactcagagtcagaagtccggtaggaactccaacccgaggcaggcgcgaaactag

SEQ ID NO: 117955 - DNA, 978 bp, Artificial Sequence
  derived and/or modified sequence
atggtgtgcggcagccccggcggcatgctgctgctgagagccggcctgctggccctggccgccctgtgcctgctgagagtgcccggcgccagagccgccgcctgcgagcccgtgagaatccccctgtgcaagagcctgccctggaacatgaccaagatgcccaaccacctgcaccacagcacccaggccaacgccatcctggccatcgagcagttcgagggcctgctgggcacccactgcagccccgacctgctgttcttcctgtgcgccatgtacgcccccatctgcaccatcgacttccagcacgagcccatcaagccctgcaagagcgtgtgcgagagagccagacagggctgcgagcccatcctgatcaagtacagacacagctggcccgagaacctggcctgcgaggagctgcccgtgtacgacagaggcgtgtgcatcagccccgaggccatcgtgaccgccgacggcgccgacttccccatggacagcagcaacggcaactgcagaggcgccagcagcgagagatgcaagtgcaagcccatcagagccacccagaagacctacttcagaaacaactacaactacgtgatcagagccaaggtgaaggagatcaagaccaagtgccacgacgtgaccgccgtggtggaggtgaaggagatcctgaagagcagcctggtgaacatccccagagacaccgtgaacctgtacaccagcagcggctgcctgtgcccccccctgaacgtgaacgaggagtacatcatcatgggctacgaggacgaggagagaagcagactgctgctggtggagggcagcatcgccgagaagtggaaggacagactgggcaagaaggtgaagagatgggacatgaagctgagacacctgggcctgagcaagagcgacagcagcaacagcgacagcacccagagccagaagagcggcagaaacagcaaccccagacaggccagaaactag

SEQ ID NO: 117956 - protein, 735 aa, Artificial Sequence
  derived and/or modified sequence
MWRVLFLLSGLGGLRMDSNFDSLPVQITVPEKIRSIIKEGIESQASYKIVIEGKPYTVNLMQKNFLPHNFRVYSYSGTGIMKPLDQDFQNFCHYQGYIEGYPKSVVMVSTCTGLRGVLQFENVSYGIEPLESSVGFEHVIYQVKHKKADVSLYNEKDIESRDLSFKLQSVEPQQDFAKYIEMHVIVEKQLYNHMGSDTTVVAQKVFQLIGLTNAIFVSFNITIILSSLELWIDENKIATTGEANELLHTFLRWKTSYLVLRPHDVAFLLVYREKSNYVGATFQGKMCDANYAGGVVLHPRTISLESLAVILAQLLSLSMGITYDDINKCQCSGAVCIMNPEAIHFSGVKIFSNCSFEDFAHFISKQKSQCLHNQPRLDPFFKQQAVCGNAKLEAGEECDCGTEQDCALIGETCCDIATCRFKAGSNCAEGPCCENCLFMSKERMCRPSFEECDLPEYCNGSSASCPENHYVQTGHPCGLNQWICIDGVCMSGDKQCTDTFGKEVEFGPSECYSHLNSKTDVSGNCGISDSGYTQCEADNLQCGKLICKYVGKFLLQIPRATIIYANISGHLCIAVEFASDHADSQKMWIKDGTSCGSNKVCRNQRCVSSSYLGYDCTTDKCNDRGVCNNKKHCHCSASYLPPDCSVQSDLWPGGSIDSGNFPPVAIPARLPERRYIENIYHSKPMRWPFFLFIPFFIIFCVLIAIMVKVNFQRKKWRTEDYSSDEQPESESEPKG

SEQ ID NO: 117957 - DNA, 2208 bp, Artificial Sequence
  derived and/or modified sequence
atgtggagggtcctgttcctcctctctggactgggcggcctccgtatggacagtaatttcgacagtctccccgtacagatcacagtccccgagaagattcgatccattattaaggaggggatagagtctcaggcctcttataaaattgtgatcgagggaaagccctataccgtgaatctgatgcagaagaacttcttaccacacaactttcgcgtctacagctactccgggacaggcattatgaagcctttggaccaggattttcagaatttctgtcactaccaaggttatattgaaggatacccgaagagcgtggttatggtctcaacttgcacgggccttcggggtgtgctgcagttcgagaatgtgtcttacggcatcgaacctttggaaagttctgtgggattcgaacatgtgatataccaggtcaaacataagaaggcagacgtttcgctttacaatgagaaggacatcgagagcagggatctgtccttcaagctacagtccgtagaacctcagcaagactttgccaagtacatcgaaatgcatgtgatagttgagaagcagctctataatcatatggggagcgacaccacagtggtggcccaaaaggtttttcagcttatcggactgacgaatgccatattcgtgagttttaacattaccatcatcctctctagtctagaattgtggattgatgaaaataaaatagccacaacaggcgaggccaatgaactgctccacacattcctgaggtggaagacctcctacctcgttttgagaccacacgacgttgcctttctgcttgtataccgagaaaaaagcaattacgtgggggctactttccaagggaaaatgtgcgatgccaactacgccggtggcgttgtgttgcacccaagaactatcagcctggaatcactggccgttatccttgctcagctcctcagtctgtcaatgggcatcacctatgacgatataaataagtgtcagtgttctggtgcggtatgcattatgaacccagaagcgatacatttttccggagtcaaaatcttttccaactgctcattcgaagactttgctcactttatatctaagcagaagagtcagtgcctgcacaatcaaccgagattggacccctttttcaagcagcaggccgtttgtggaaacgccaagctcgaggccggcgaggaatgcgattgtgggacagaacaagactgtgccctgataggagagacctgctgcgacatcgctacctgcagattcaaggcaggttctaattgcgcagagggaccttgctgcgaaaattgtttgtttatgtccaaagaacggatgtgccggccttcatttgaggagtgtgaccttccggaatattgtaacggttcttctgcctcatgccctgagaaccactatgttcagaccggccacccctgcggccttaaccagtggatttgtatcgatggagtgtgtatgtcgggagacaaacagtgtactgacacatttggcaaagaggtcgagtttggccctagcgagtgctattcacacctgaatagcaagacagatgtcagtggcaactgcggtatttcagactccgggtatacgcaatgcgaggctgataatctacagtgcggaaagctgatttgtaagtatgttggcaaattcctgctgcagattcctcgggcgacaatcatctacgccaacatcagcgggcacctctgtattgcagttgagtttgccagtgatcacgccgatagtcagaagatgtggatcaaggacggaacatcgtgcggcagtaataaggtctgccgcaaccagcggtgtgtgtcttccagctacctcgggtatgactgtactaccgataaatgtaatgaccgcggcgtatgcaacaataagaagcattgccattgtagcgccagttatctgccgcctgattgtagtgtgcagtccgatctgtggcccggggggagcatagacagcggaaactttccaccagttgctatcccagctcggctgcccgaacggaggtatatcgagaacatttatcatagcaaaccaatgcgatggccattctttctattcatcccattttttattatattctgcgtgctgattgcaatcatggtcaaggtgaattttcagcgaaaaaaatggaggaccgaggactactcttctgacgagcaacccgagtccgagtccgaacctaagggttag

SEQ ID NO: 117958 - DNA, 2208 bp, Artificial Sequence
  derived and/or modified sequence
atgtggagggtgctcttcctgctgagcggcctgggcggcctgaggatggacagcaactttgacagcctgcctgtgcagatcaccgtgcctgagaagatccgcagcatcatcaaggagggcatcgagagccaggccagctacaagatcgtgattgagggcaagccctacacagtgaacctgatgcagaagaacttcctgccccacaacttccgggtgtacagctacagcggcaccggcatcatgaagcccctggaccaggacttccagaacttctgccactaccagggctacatcgagggctaccccaagtctgtggtgatggtgtccacctgcaccggcctgcggggcgtgctgcagtttgaaaatgtgtcctatggaattgagcccctggagagctctgtgggctttgagcacgtgatctaccaggtgaagcacaagaaggcagatgtgtccctgtacaatgagaaggacatcgagagccgggacctgtccttcaagctgcagagcgtggagccccagcaggactttgccaagtacatcgagatgcacgtgattgtggagaagcagctgtacaaccacatgggcagtgacaccaccgtggtggcccagaaggtgttccagctgattggcctgaccaatgccatctttgtgtccttcaacatcaccatcatcctgagcagcctggagctgtggattgatgagaacaagatcgccaccaccggggaggccaatgagctgctgcacaccttcctgcgctggaagaccagctacctggtgctgcggccccatgatgtggccttcctgctggtgtaccgggagaagagcaactacgtgggcgccaccttccagggcaagatgtgtgatgccaactatgctgggggcgtggtgctgcaccccaggaccatcagcctggagagcctggccgtcatcctggcccagctgctgagcctgtccatgggcatcacctatgatgacatcaacaagtgccagtgcagcggggctgtgtgcatcatgaaccctgaggccatccacttcagcggcgtgaagatcttcagcaactgcagctttgaagattttgcccacttcatcagcaagcagaagagccagtgcctgcacaaccagccccggctggaccccttcttcaagcagcaggccgtgtgtggaaatgccaagctggaggccggggaggagtgtgactgtggcacagagcaggactgtgccctgattggagagacctgctgtgacatcgccacctgccgcttcaaggccggcagcaactgtgccgagggcccctgctgtgagaactgcctcttcatgagcaaggagaggatgtgccggcccagctttgaagaatgtgacctgcctgagtactgcaatggcagcagcgccagctgcccagagaaccactacgtgcagacaggccacccctgtggcctgaaccagtggatctgcattgatggagtgtgcatgtctggggacaagcagtgcacagacaccttcggcaaggaggtggagtttggccccagcgagtgctacagccacctgaacagcaagacagatgtgtctggcaactgtggcatcagtgacagcggctacacccagtgtgaggccgacaacctgcagtgtgggaagctgatctgcaagtatgtgggcaagttcctgctgcagatcccccgggccaccatcatctatgccaacatcagcggccacctgtgcatcgctgtggagtttgccagtgaccacgccgacagccagaagatgtggatcaaggatggcaccagctgtggcagcaacaaggtgtgcaggaaccagagatgtgtgagcagcagctacctgggctatgactgcaccacagacaagtgcaatgacagaggagtgtgcaacaacaagaagcactgccactgcagcgccagctacctgcccccagactgcagcgtgcagagcgacctgtggccaggcggcagcattgacagcggcaacttcccccctgtggccatcccagcccggctgcctgagcggcgctacatcgagaacatctaccacagcaagcccatgcgctggcccttcttcctgttcatccccttcttcatcatcttctgtgtgctgattgccatcatggtgaaggtgaacttccagaggaagaagtggaggacagaggactacagcagtgatgagcagcctgagagcgagagcgagcccaagggctag

SEQ ID NO: 117959 - DNA, 2208 bp, Artificial Sequence
  derived and/or modified sequence
atgtggcgggtgctgttcctgctgagcggcctgggcggcctgcggatggactcaaattttgattccctacccgtgcagatcaccgtaccggagaagatccggagtattattaaagaggggattgagtcccaggccagctacaagatcgtaattgaaggtaagccatacaccgtgaatctgatgcagaagaactttcttccacataatttccgcgtatattcctactctggaaccgggataatgaagccactcgaccaggactttcagaacttctgtcactaccaggggtatatcgaaggctacccaaaaagcgttgtgatggtgagtacctgcacaggactccggggagtgctccagtttgaaaacgtgtcctatggaatagaacccttggaatcttccgtaggattcgagcacgtgatttaccaagtgaaacacaaaaaagccgatgtgtcgctttacaacgagaaagatatagagagcagagatctgtccttcaagctccagtctgttgaaccccagcaagactttgcgaagtacatcgagatgcacgttatagtcgagaagcagctatacaatcatatggggtcggacaccaccgttgtggcacagaaagtgttccaactcattggcctcaccaacgccatttttgtctcctttaatattacaataatcctgagctctctggagctatggatagacgaaaataaaattgctactacaggtgaggcaaatgagctcctccataccttcctgaggtggaaaactagctatcttgttttgcggccacatgatgtcgccttcctcctagtataccgggagaaaagtaattacgtcggagccacttttcagggcaagatgtgcgatgccaactatgccggtggagtggtcctccatccacggaccatctctcttgagtctctagctgttatcctggctcagctcctgagcctgagtatgggcataacttacgatgacataaataagtgtcagtgttcaggcgccgtctgtatcatgaatcccgaggccattcattttagcggcgtgaagattttctcaaattgtagttttgaagactttgcgcacttcatttctaagcagaaaagccagtgtctgcacaaccaaccaaggctagacccgttcttcaagcaacaggctgtgtgcgggaacgccaagctagaggctggggaagaatgcgattgcggaactgagcaggactgtgcacttattggcgagacctgctgcgacattgccacctgccggttcaaggccggttctaactgcgccgaagggccctgctgtgagaattgcctgttcatgtccaaggagagaatgtgcagaccatcttttgaggagtgtgatttaccagagtactgcaatggcagttccgctagttgtcccgagaaccattacgtgcagaccggacatccgtgcggccttaatcagtggatatgcatcgatggggtgtgtatgagcggggacaagcaatgtactgacacctttgggaaagaagtggagtttggcccatccgagtgctatagtcacctgaactcaaagaccgatgtctccgggaactgcggaatctccgattccggctacactcagtgtgaggctgacaatctccaatgcggcaagttgatctgcaagtatgtcggcaagttcttactacaaatacccagagctacaatcatttacgctaatatctccggccacctgtgtattgctgttgagttcgcatcagaccatgccgattcccaaaagatgtggattaaagatggcacatcctgcggatctaataaggtgtgtcgcaaccagcggtgcgttagtagttcctacctcggctacgattgtacaacagacaagtgtaatgacaggggagtgtgtaacaataaaaagcactgccactgttccgccagctacttgccaccagattgtagcgtgcaaagcgacctgtggcccggcggctctatcgattcggggaacttcccccctgtggcaatccctgcccggctgccggagcggagatatatcgaaaacatataccatagcaagcccatgcgttggccctttttcctattcattccgttttttatcattttctgcgtgctgatcgctataatggtaaaggtgaactttcagaggaaaaaatggcgcacggaggattacagcagcgacgaacagccagaatctgaaagcgaaccaaagggatag

SEQ ID NO: 117960 - DNA, 2208 bp, Artificial Sequence
  derived and/or modified sequence
atgtggcgcgtcctctttctgctctcaggacttggaggcctgagaatggactctaattttgactctcttcccgtgcagatcaccgttccagagaagatccgctccatcatcaaagaggggatcgaatcccaggcctcctataaaatcgtcatcgaaggtaaaccttacactgtcaatctgatgcagaaaaattttcttccccataatttcagagtctactcatattctggaacaggcatcatgaaacccctggatcaggatttccagaatttctgccactatcagggctatatcgagggctatcccaagtccgtagtgatggtgagcacttgtactggactgcgaggcgttctgcagttcgagaacgtgagttacggaatcgaaccactcgagtccagtgtgggcttcgaacatgtgatataccaggtaaaacataaaaaagccgacgtaagcctgtacaacgagaaagacattgagagcagagacctctcatttaaactccaatctgtggagccacagcaagactttgccaaatatatagagatgcacgtcatagtggagaagcagctctacaatcacatgggttcagacacgacagtagtagcccagaaagtttttcaactgatcggcctgacgaacgctatcttcgtctctttcaacatcacaattattctatctagtctggagctttggattgatgagaataagatcgcgaccacaggggaggctaatgaacttcttcacaccttcctaagatggaaaacgagctatctagtgctgcgcccacacgatgtagcattcctgctggtatacagagaaaaatccaactacgtaggcgcaacttttcaaggtaagatgtgtgatgcgaactacgcaggcggagttgttttacaccccaggacaataagcctcgaaagtcttgcagtgatattagctcagctgctgagcctgtcgatgggtatcacctacgatgatatcaataaatgtcagtgcagtggcgctgtatgcataatgaatcctgaagccatccacttttctggggtgaagatcttttcaaactgcagctttgaggactttgcgcactttatctccaaacaaaagtcccaatgcctacataatcaaccacgactcgatccgttcttcaagcagcaagctgtgtgtggcaacgcaaagttagaggccggtgaggagtgcgactgtggcactgagcaggattgtgcgctcattggcgaaacctgctgcgacatcgccacatgcaggttcaaggccggtagcaattgcgcagaaggcccttgctgtgaaaactgtctattcatgtctaaggagcgcatgtgtaggccaagcttcgaggagtgcgacctaccagaatactgcaatgggtcttctgcctcttgtcctgaaaaccattatgttcaaacagggcatccatgcggcctgaatcagtggatctgcatcgatggcgtgtgcatgagcggcgacaaacaatgcacggatactttcggaaaagaggtcgaatttggcccatctgagtgttactctcatcttaactctaagaccgacgtgtccggtaactgcggaatctcagattccggctacacacagtgcgaagccgataatctccagtgtggcaagctaatttgcaagtacgtaggcaaattcctgctgcaaattccaagagcaaccatcatctacgctaatatttcaggtcacctttgtatagccgtggagtttgcctccgaccacgctgattcacagaagatgtggatcaaagacgggacatcctgtggcagtaataaggtgtgtcgcaatcagcgctgcgtgtcttcaagctacctcggatatgactgtactaccgacaagtgtaacgacaggggcgtgtgcaataataagaaacattgtcactgttctgcaagctatctgcccccagattgcagcgttcagtccgatctatggccaggaggttccatcgattcagggaattttcccccagtggctattcctgcacggttgccggaacgcaggtacatagaaaatatctaccactccaagccaatgcgctggccattctttctattcatcccattcttcatcatcttctgtgtgctgattgccatcatggtgaaggtcaatttccagcggaagaaatggagaacagaggactattcaagcgacgaacaacctgaaagcgagtcagaacctaaggggtag

SEQ ID NO: 117961 - DNA, 2208 bp, Artificial Sequence
  derived and/or modified sequence
atgtggagagtgctgttcctgctgagcggcctgggcggcctgagaatggacagcaacttcgacagcctgcccgtgcagatcaccgtgcccgagaagatcagaagcatcatcaaggagggcatcgagagccaggccagctacaagatcgtgatcgagggcaagccctacaccgtgaacctgatgcagaagaacttcctgccccacaacttcagagtgtacagctacagcggcaccggcatcatgaagcccctggaccaggacttccagaacttctgccactaccagggctacatcgagggctaccccaagagcgtggtgatggtgagcacctgcaccggcctgagaggcgtgctgcagttcgagaacgtgagctacggcatcgagcccctggagagcagcgtgggcttcgagcacgtgatctaccaggtgaagcacaagaaggccgacgtgagcctgtacaacgagaaggacatcgagagcagagacctgagcttcaagctgcagagcgtggagccccagcaggacttcgccaagtacatcgagatgcacgtgatcgtggagaagcagctgtacaaccacatgggcagcgacaccaccgtggtggcccagaaggtgttccagctgatcggcctgaccaacgccatcttcgtgagcttcaacatcaccatcatcctgagcagcctggagctgtggatcgacgagaacaagatcgccaccaccggcgaggccaacgagctgctgcacaccttcctgagatggaagaccagctacctggtgctgagaccccacgacgtggccttcctgctggtgtacagagagaagagcaactacgtgggcgccaccttccagggcaagatgtgcgacgccaactacgccggcggcgtggtgctgcaccccagaaccatcagcctggagagcctggccgtgatcctggcccagctgctgagcctgagcatgggcatcacctacgacgacatcaacaagtgccagtgcagcggcgccgtgtgcatcatgaaccccgaggccatccacttcagcggcgtgaagatcttcagcaactgcagcttcgaggacttcgcccacttcatcagcaagcagaagagccagtgcctgcacaaccagcccagactggaccccttcttcaagcagcaggccgtgtgcggcaacgccaagctggaggccggcgaggagtgcgactgcggcaccgagcaggactgcgccctgatcggcgagacctgctgcgacatcgccacctgcagattcaaggccggcagcaactgcgccgagggcccctgctgcgagaactgcctgttcatgagcaaggagagaatgtgcagacccagcttcgaggagtgcgacctgcccgagtactgcaacggcagcagcgccagctgccccgagaaccactacgtgcagaccggccacccctgcggcctgaaccagtggatctgcatcgacggcgtgtgcatgagcggcgacaagcagtgcaccgacaccttcggcaaggaggtggagttcggccccagcgagtgctacagccacctgaacagcaagaccgacgtgagcggcaactgcggcatcagcgacagcggctacacccagtgcgaggccgacaacctgcagtgcggcaagctgatctgcaagtacgtgggcaagttcctgctgcagatccccagagccaccatcatctacgccaacatcagcggccacctgtgcatcgccgtggagttcgccagcgaccacgccgacagccagaagatgtggatcaaggacggcaccagctgcggcagcaacaaggtgtgcagaaaccagagatgcgtgagcagcagctacctgggctacgactgcaccaccgacaagtgcaacgacagaggcgtgtgcaacaacaagaagcactgccactgcagcgccagctacctgccccccgactgcagcgtgcagagcgacctgtggcccggcggcagcatcgacagcggcaacttcccccccgtggccatccccgccagactgcccgagagaagatacatcgagaacatctaccacagcaagcccatgagatggcccttcttcctgttcatccccttcttcatcatcttctgcgtgctgatcgccatcatggtgaaggtgaacttccagagaaagaagtggagaaccgaggactacagcagcgacgagcagcccgagagcgagagcgagcccaagggctag

SEQ ID NO: 117962 - DNA, 2672 bp, Artificial Sequence
  derived and/or modified sequence
gcctacctcttccaggctgcgtggccggggcgtcatctcgcgcttccaactgccctgtaaccaccaactgccattattccggctgggacccaggacttcaagccatgtggcgcgtcttgtttctgctcagcgggctcggcgggctgcggatggacagtaattttgatagtttacctgtgcaaattacagttccggagaaaatacggtcaataataaaggaaggaattgaatcgcaggcatcctacaaaattgtaattgaagggaaaccatatactgtgaatttaatgcaaaaaaactttttaccccataattttagagtttacagttatagtggcacaggaattatgaaaccacttgaccaagattttcagaatttctgccactaccaagggtatattgaaggttatccaaaatctgtggtgatggttagcacatgtactggactcaggggcgtactacagtttgaaaatgttagttatggaatagaacccctggagtcttcagttggctttgaacatgtaatttaccaagtaaaacataagaaagcagatgtttccttatataatgagaaggatattgaatcaagagatctgtcctttaaattacaaagcgtagagccacagcaagattttgcaaagtatatagaaatgcatgttatagttgaaaaacaattgtataatcatatggggtctgatacaactgttgtcgctcaaaaagttttccagttgattggattgacgaatgctatttttgtttcatttaatattacaattattctgtcttcattggagctttggatagatgaaaataaaattgcaaccactggagaagctaatgagttattacacacatttttaagatggaaaacatcttatcttgttttacgtcctcatgatgtggcatttttacttgtttacagagaaaagtcaaattatgttggtgcaacctttcaagggaagatgtgtgatgcaaactatgcaggaggtgttgttctgcaccccagaaccataagtctggaatcacttgcagttattttagctcaattattgagccttagtatggggatcacttatgatgacattaacaaatgccagtgctcaggagctgtctgcattatgaatccagaagcaattcatttcagtggtgtgaagatctttagtaactgcagcttcgaagactttgcacattttatttcaaagcagaagtcccagtgtcttcacaatcagcctcgcttagatccttttttcaaacagcaagcagtgtgtggtaatgcaaagctggaagcaggagaggagtgtgactgtgggactgaacaggattgtgcccttattggagaaacatgctgtgatattgccacatgtagatttaaagccggttcaaactgtgctgaaggaccatgctgcgaaaactgtctatttatgtcaaaagaaagaatgtgtaggccttcctttgaagaatgcgacctccctgaatattgcaatggatcatctgcatcatgcccagaaaaccactatgttcagactgggcatccgtgtggactgaatcaatggatctgtatagatggagtttgtatgagtggggataaacaatgtacagacacatttggcaaagaagtagagtttggcccttcagaatgttattctcaccttaattcaaagactgatgtatctggaaactgtggtataagtgattcaggatacacacagtgtgaagctgacaatctgcagtgcggaaaattaatatgtaaatatgtaggtaaatttttattacaaattccaagagccactattatttatgccaacataagtggacatctctgcattgctgtggaatttgccagtgatcatgcagacagccaaaagatgtggataaaagatggaacttcttgtggttcaaataaggtttgcaggaatcaaagatgtgtgagttcttcatacttgggttatgattgtactactgacaaatgcaatgatagaggtgtatgcaataacaaaaagcactgtcactgtagtgcttcatatttacctccagattgctcagttcaatcagatctatggcctggtgggagtattgacagtggcaattttccacctgtagctataccagccagactccctgaaaggcgctacattgagaacatttaccattccaaaccaatgagatggccatttttcttattcattcctttctttattattttctgtgtactgattgctataatggtgaaagttaatttccaaaggaaaaaatggagaactgaggactattcaagcgatgagcaacctgaaagtgagagtgaacctaaagggtagtctggacaacagagatgccatgatatcacttcttctagagtaattatctgtgatggatggacacaaaaaaatggaaagaaaagaatgtacattacctggtttcctgggattcaaacctgcatattgtgattttaatttgaccagaaaatatgatatatatgtataatttcacagataatttacttatttaaaaatgcatgataatgagttttacattacaaatttctgtttttttaaagttatcttacgctatttctgttggttagtagacactaattctgtcagtaggggcatggtataaggaaatatcataatgtaatgaggtggtactatgattaaaagccactgttacatttcaaa

SEQ ID NO: 117963 - protein, 565 aa, Artificial Sequence
  derived and/or modified sequence
MRPRSALPRLLLPLLLLPAAGPAQFHGEKGISIPDHGFCQPISIPLCTDIAYNQTIMPNLLGHTNQEDAGLEVHQFYPLVKVQCSPELRFFLCSMYAPVCTVLEQAIPPCRSICERARQGCEALMNKFGFQWPERLRCEHFPRHGAEQICVGQNHSEDGAPALLTTAPPPGLQPGAGGTPGGPGGGGAPPRYATLEHPFHCPRVLKVPSYLSYKFLGERDCAAPCEPARPDGSMFFSQEETRFARLWILTWSVLCCASTFFTVTTYLVDMQRFRYPERPIIFLSGCYTMVSVAYIAGFVLQERVVCNERFSEDGYRTVVQGTKKEGCTILFMMLYFFSMASSIWWVILSLTWFLAAGMKWGHEAIEANSQYFHLAAWAVPAVKTITILAMGQIDGDLLSGVCFVGLNSLDPLRGFVLAPLFVYLFIGTSFLLAGFVSLFRIRTIMKHDGTKTEKLERLMVRIGVFSVLYTVPATIVIACYFYEQAFREHWERSWVSQHCKSLAIPCPAHYTPRMSPDFTVYMIKYLMTLIVGITSGFWIWSGKTLHSWRKFYTRLTNSRHGETTV

SEQ ID NO: 117964 - protein, 641 aa, Artificial Sequence
  derived and/or modified sequence
ARGVSGCSVRPRQASGQAHRPLPRPASPTLRPRVKFAKRRGRRQPQRGGGGEEAQSPGWGRGRGGRQGAGWGAAASMRPRSALPRLLLPLLLLPAAGPAQFHGEKGISIPDHGFCQPISIPLCTDIAYNQTIMPNLLGHTNQEDAGLEVHQFYPLVKVQCSPELRFFLCSMYAPVCTVLEQAIPPCRSICERARQGCEALMNKFGFQWPERLRCEHFPRHGAEQICVGQNHSEDGAPALLTTAPPPGLQPGAGGTPGGPGGGGAPPRYATLEHPFHCPRVLKVPSYLSYKFLGERDCAAPCEPARPDGSMFFSQEETRFARLWILTWSVLCCASTFFTVTTYLVDMQRFRYPERPIIFLSGCYTMVSVAYIAGFVLQERVVCNERFSEDGYRTVVQGTKKEGCTILFMMLYFFSMASSIWWVILSLTWFLAAGMKWGHEAIEANSQYFHLAAWAVPAVKTITILAMGQIDGDLLSGVCFVGLNSLDPLRGFVLAPLFVYLFIGTSFLLAGFVSLFRIRTIMKHDGTKTEKLERLMVRIGVFSVLYTVPATIVIACYFYEQAFREHWERSWVSQHCKSLAIPCPAHYTPRMSPDFTVYMIKYLMTLIVGITSGFWIWSGKTLHSWRKFYTRLTNSRHGETTV

SEQ ID NO: 117965 - DNA, 1983 bp, Artificial Sequence
  derived and/or modified sequence
cgagtaaagtttgcaaagaggcgcgggaggcggcagccgcagcgaggaggcggcggggaagaagcgcagtctccgggttgggggcgggggcggggggggcgccaaggagccgggtggggggcggcggccagcatgcggccccgcagcgccctgccccgcctgctgctgccgctgctgctgctgcccgccgccgggccggcccagttccacggggagaagggcatctccatcccggaccacggcttctgccagcccatctccatcccgctgtgcacggacatcgcctacaaccagaccatcatgcccaaccttctgggccacacgaaccaggaggacgcaggcctagaggtgcaccagttctatccgctggtgaaggtgcagtgctcgcccgaactgcgcttcttcctgtgctccatgtacgcacccgtgtgcaccgtgctggaacaggccatcccgccgtgccgctctatctgtgagcgcgcgcgccagggctgcgaagccctcatgaacaagttcggttttcagtggcccgagcgcctgcgctgcgagcacttcccgcgccacggcgccgagcagatctgcgtcggccagaaccactccgaggacggagctcccgcgctactcaccaccgcgccgccgccgggactgcagccgggtgccgggggcaccccgggtggcccgggcggcggcggcgctcccccgcgctacgccacgctggagcaccccttccactgcccgcgcgtcctcaaggtgccatcctatctcagctacaagtttctgggcgagcgtgattgtgctgcgccctgcgaacctgcgcggcccgatggttccatgttcttctcacaggaggagacgcgtttcgcgcgcctctggatcctcacctggtcggtgctgtgctgcgcttccaccttcttcactgtcaccacgtacttggtagacatgcagcgcttccgctacccagagcggcctatcatttttctgtcgggctgctacaccatggtgtcggtggcctacatcgcgggcttcgtgctccaggagcgcgtggtgtgcaacgagcgcttctccgaggacggttaccgcacggtggtgcagggcaccaagaaggagggctgcaccatcctcttcatgatgctctacttcttcagcatggccagctccatctggtgggtcatcctgtcgctcacctggttcctggcagccggcatgaagtggggccacgaggccatcgaggccaactctcagtacttccacctggccgcctgggccgtgccggccgtcaagaccatcaccatcctggccatgggccagatcgacggcgacctgctgagcggcgtgtgcttcgtaggcctcaacagcctggacccgctgcggggcttcgtgctagcgccgctcttcgtgtacctgttcatcggcacgtccttcctcctggccggcttcgtgtcgctcttccgcatccgcaccatcatgaagcacgacggcaccaagaccgaaaagctggagcggctcatggtgcgcatcggcgtcttctccgtgctctacacagtgcccgccaccatcgtcatcgcttgctacttctacgagcaggccttccgcgagcactgggagcgctcgtgggtgagccagcactgcaagagcctggccatcccgtgcccggcgcactacacgccgcgcatgtcgcccgacttcacggtctacatgatcaaatacctcatgacgctcatcgtgggcatcacgtcgggcttctggatctggtcgggcaagacgctgcactcgtggaggaagttctacactcgcctcaccaacagccgacacggtgagaccaccgtgtgagggacgcccccaggccggaaccgcgcggcgctttcctccgcccggggtggggcccctacagactccgtattttatttttttaaataaaaaacgatcgaaaccatttcacttttaggttgctttttaaaagagaactctctgcccaacaccccc

SEQ ID NO: 117966 - DNA, 2030 bp, Artificial Sequence
  derived and/or modified sequence
cagcgcgcggtgtctccggctgctcagtccgaccgcggcaagcaagcgggcaggcgcaccgccccctcccccgcccggcctccccaactctgcggccgcgagtaaagtttgcaaagaggcgcgggaggcggcagccgcagcgaggaggcggcggggaagaagcgcagtctccgggttgggggcgggggcggggggggcgccaaggagccgggtggggggcggcggccagcatgcggccccgcagcgccctgccccgcctgctgctgccgctgctgctgctgcccgccgccgggccggcccagttccacggggagaagggcatctccatcccggaccacggcttctgccagcccatctccatcccgctgtgcacggacatcgcctacaaccagaccatcatgcccaaccttctgggccacacgaaccaggaggacgcaggcctagaggtgcaccagttctatccgctggtgaaggtgcagtgctcgcccgaactgcgcttcttcctgtgctccatgtacgcacccgtgtgcaccgtgctggaacaggccatcccgccgtgccgctctatctgtgagcgcgcgcgccagggctgcgaagccctcatgaacaagttcggttttcagtggcccgagcgcctgcgctgcgagcacttcccgcgccacggcgccgagcagatctgcgtcggccagaaccactccgaggacggagctcccgcgctactcaccaccgcgccgccgccgggactgcagccgggtgccgggggcaccccgggtggcccgggcggcggcggcgctcccccgcgctacgccacgctggagcaccccttccactgcccgcgcgtcctcaaggtgccatcctatctcagctacaagtttctgggcgagcgtgattgtgctgcgccctgcgaacctgcgcggcccgatggttccatgttcttctcacaggaggagacgcgtttcgcgcgcctctggatcctcacctggtcggtgctgtgctgcgcttccaccttcttcactgtcaccacgtacttggtagacatgcagcgcttccgctacccagagcggcctatcatttttctgtcgggctgctacaccatggtgtcggtggcctacatcgcgggcttcgtgctccaggagcgcgtggtgtgcaacgagcgcttctccgaggacggttaccgcacggtggtgcagggcaccaagaaggagggctgcaccatcctcttcatgatgctctacttcttcagcatggccagctccatctggtgggtcatcctgtcgctcacctggttcctggcagccggcatgaagtggggccacgaggccatcgaggccaactctcagtacttccacctggccgcctgggccgtgccggccgtcaagaccatcaccatcctggccatgggccagatcgacggcgacctgctgagcggcgtgtgcttcgtaggcctcaacagcctggacccgctgcggggcttcgtgctagcgccgctcttcgtgtacctgttcatcggcacgtccttcctcctggccggcttcgtgtcgctcttccgcatccgcaccatcatgaagcacgacggcaccaagaccgaaaagctggagcggctcatggtgcgcatcggcgtcttctccgtgctctacacagtgcccgccaccatcgtcatcgcttgctacttctacgagcaggccttccgcgagcactgggagcgctcgtgggtgagccagcactgcaagagcctggccatcccgtgcccggcgcactacacgccgcgcatgtcgcccgacttcacggtctacatgatcaaatacctcatgacgctcatcgtgggcatcacgtcgggcttctggatctggtcgggcaagacgctgcactcgtggaggaagttctacactcgcctcaccaacagccgacacggtgagaccaccgtgtgagggacgcccccaggccggaaccgcgcggcgctttcctccgcccggggtggggcccctacagactccgtattttatttttttaaataaaaaacgatcgaaacc

SEQ ID NO: 117967 - DNA, 1698 bp, Artificial Sequence
  derived and/or modified sequence
atgcggcccaggtcggcacttccgcgtctccttctgccattgctgctgctgcctgcagccgggcctgcacagttccacggagaaaagggtatcagtatacctgatcatgggttctgtcaacccatcagcatccccctgtgtaccgacattgcttataatcagacgattatgccaaatctgctgggtcatacgaatcaagaggacgccgggctagaagtacatcagttctaccccttggtgaaagttcaatgtagtccggagctgcgcttcttcctgtgttctatgtatgcgccagtctgcacagtgctggagcaagccattccaccgtgtcgcagtatttgcgaacgagcgcggcaaggatgtgaggccctcatgaataaatttgggtttcagtggcccgagcgcctaagatgcgagcactttccgaggcacggcgcagagcagatttgtgttggacagaatcactccgaggacggagcccctgccctgttaacgaccgcaccaccccccggattgcagcccggagccggaggcacacccggaggacccggcggtggcggcgcgccaccgcggtacgctacactggagcaccctttccactgcccacgcgttcttaaagtaccgtcctacttgtcctataagttcctcggcgaaagagactgcgccgccccatgcgagccagccaggcctgacgggagtatgtttttcagccaagaggaaactaggtttgcccggctgtggattcttacatggtccgtgttatgttgtgctagcacattttttactgtgacgacttatctcgttgatatgcagaggttccggtaccccgagcgccccatcatattcctctcaggctgttacaccatggtgtctgtcgcctatatagcgggcttcgtccttcaagagcgtgttgtttgcaacgagcgtttttccgaagacggatataggaccgtcgttcaggggacaaagaaggagggatgtaccatcctatttatgatgctttacttttttagtatggcatcttctatttggtgggttatcctgtcactgacatggtttctagcagccggcatgaagtgggggcacgaggccatcgaggcaaattcacaatattttcacctagccgcctgggccgtgcccgcagtgaaaactatcaccattctggctatgggacagattgatggcgatcttcttagcggcgtgtgttttgttggcctaaacagcctcgatcctttaagaggtttcgtcctggctcccctgtttgtctatctctttattggcacgtcattcctgttggctgggttcgtgtccttgttcagaatccgcaccatcatgaaacacgatggtaccaaaactgagaaattagaacgactgatggtccggattggtgtattttcagtactttacacagttcccgccacgattgtgatagcatgttatttctacgagcaggccttcagagaacactgggagagatcctgggtgagccagcattgcaaatccttggcaattccctgccccgctcattatacccccagaatgtctcctgatttcaccgtgtatatgattaagtacctcatgacactgattgtgggaataacctccgggttttggatctggtcaggtaagacactgcattcctggagaaaattttacacacgacttacgaatagcaggcatggcgaaaccacagtgtag

SEQ ID NO: 117968 - DNA, 1926 bp, Artificial Sequence
  derived and/or modified sequence
gcacggggggtctcgggctgtagtgtaaggccccgccaggcgagtggccaggcccacaggcctctgccacggcccgcaagtcccaccctaaggcctagggtaaaattcgcaaaaagaagaggacgaagacagcctcagaggggtggcggcggagaggaagcccagtccccaggctgggggagaggacgcggcggacggcaaggcgctggctggggggcagcggccagcatgcgccccaggtcagctctcccccgattgctccttccccttcttctcctgccggcagcaggccctgcccagttccacggggagaagggaatcagtatccccgaccatgggttttgccagccgatatccatacctctgtgtaccgatatagcctacaatcagactattatgcccaatctcctggggcacacaaaccaggaagatgctggcctggaagtacatcaattttacccactggtcaaagttcagtgctcccccgagctgagatttttcctctgctccatgtatgcgccggtgtgtactgtcctggagcaggctatcccaccctgtaggagtatctgcgagcgcgcacgtcaggggtgcgaagcacttatgaacaaattcggatttcagtggccagaacgtctccggtgcgagcatttccccaggcatggggccgagcagatatgtgtcgggcagaatcactccgaagatggcgctcccgccctgcttacgacagcccctcctccaggactgcaaccaggagcgggcggaacacctgggggcccaggcggtggaggtgctccgcctcgctacgctaccctggagcacccttttcactgccctagggtgctaaaggtgccctcttatctgtcctataagtttctgggcgagcgtgactgtgctgctccgtgcgagcctgcaaggcctgatgggtcaatgtttttctctcaagaggaaacccgtttcgctcgcctttggattctcacatggtcagtcctgtgttgcgcatcaacattctttactgtaaccacatacctcgtcgatatgcaacgctttaggtaccctgagcgacctatcatattcttatctggatgctatacaatggtgtccgtcgcctacattgctgggttcgtgctgcaagaaagagtggtctgcaatgaacgcttcagcgaggacggataccgaacagtcgtgcagggtacaaagaaagagggctgcaccattctgttcatgatgttgtattttttcagcatggctagttccatttggtgggtgattctgtctcttacctggtttctggctgctggtatgaaatgggggcacgaggcaatcgaagcaaattctcagtacttccacctggcggcatgggcagttcccgcagtcaaaacaattactatcctggcaatgggacagatcgatggggacctcctaagcggggtctgtttcgtcgggttgaattcccttgatcctctacgcggttttgtcctcgcccctctgtttgtgtatttgttcatcgggacctcttttcttcttgccgggttcgtcagcctgtttcgaatccggactattatgaagcatgacggcactaagactgaaaaattggagagactaatggtgagaatcggtgtgttttccgtgctctacacggtgccagctactattgtgatcgcctgttatttttacgaacaagcattcagggaacattgggaaagatcctgggtatcccagcattgcaaatcgctggccattccctgtcctgcccactatacacccagaatgagccccgatttcaccgtctacatgattaagtatctgatgaccctcatcgtaggaatcaccagcgggttttggatctggagtgggaagacacttcacagttggaggaagttttacacacgtttaacaaacagtcgccatggagagaccaccgtttag

SEQ ID NO: 117969 - DNA, 1698 bp, Artificial Sequence
  derived and/or modified sequence
atgaggcccaggtctgccctgccccggctgctgctgcccctgctgctgctgcctgctgctggccctgcccagttccacggggagaagggcatcagcatcccagaccacggcttctgccagcccatcagcatccccctgtgcacagacatcgcctacaaccagaccatcatgcccaacctgctgggccacaccaaccaggaggatgctggcctggaggtgcaccagttctaccccctggtgaaggtgcagtgcagccctgagctgcgcttcttcctgtgcagcatgtatgcccctgtgtgcaccgtgctggagcaggccatccccccctgccgcagcatctgtgagcgggcccggcagggctgtgaggccctgatgaacaagtttggcttccagtggccagagcggctgcgctgtgagcacttccccaggcatggagctgagcagatctgtgtgggccagaaccacagtgaagatggagccccagccctgctgaccacagcccctcctcctggcctgcagcccggggccggcggcacccctgggggccctgggggcggcggggccccacccaggtatgccaccctggagcaccccttccactgcccccgggtgctgaaggtgcccagctacctgagctacaagttcctgggggagcgggactgtgccgccccctgtgagcccgcccggccagatggctccatgttcttcagccaggaggagaccaggtttgcccggctgtggatcctgacctggagcgtgctgtgctgtgccagcaccttcttcaccgtgaccacctacctggtggacatgcagcgcttccgctacccagagcggcccatcatcttcctgagcggctgctacaccatggtgtctgtggcctacatcgccggctttgtgctgcaggagcgggtggtgtgcaatgaacgcttctctgaagatggctacagaacagtggtgcagggcaccaagaaggagggctgcaccatcctcttcatgatgctgtacttcttctccatggccagcagcatctggtgggtgatcctgagcctgacctggttcctggccgccggcatgaagtggggccacgaggccatcgaggccaacagccagtacttccacctggccgcctgggccgtgcctgctgtgaagaccatcaccatcctggccatgggccagattgatggagacctgctgtctggagtgtgctttgtgggcctgaacagcctggaccccctgcggggctttgtgctggcccccctgtttgtgtacctgttcatcggcaccagcttcctgctggccggctttgtgtccctcttccgcatccgcaccatcatgaagcatgatggcaccaagacagagaagctggagcggctgatggtgcgcatcggggtcttctctgtgctgtacacagtgcctgccaccatcgtgattgcctgctacttctatgagcaggccttccgggagcactgggagaggtcctgggtgtcccagcactgcaagagcctggccatcccctgcccagcccactacacccccaggatgagcccagacttcaccgtgtacatgatcaagtacctgatgaccctcatcgtgggcatcaccagcggcttctggatctggagcggcaagaccctgcacagctggaggaagttctacacccggctgaccaacagccgccacggggagaccaccgtgtag

SEQ ID NO: 117970 - DNA, 1926 bp, Artificial Sequence
  derived and/or modified sequence
gcccggggcgtgtctggctgcagcgtgcggccccggcaggccagcggccaggcccaccggcccctgcccaggcctgccagccccaccctgcggccccgggtgaagtttgccaagagaagaggccggcggcagccccagaggggcggcggcggggaggaggcccagagccctggctggggccggggccggggcggccggcagggcgccggctggggcgccgccgcctccatgaggcccaggtctgccctgccccggctgctgctgcccctgctgctgctgcctgctgctggccctgcccagttccacggggagaagggcatcagcatcccagaccacggcttctgccagcccatcagcatccccctgtgcacagacatcgcctacaaccagaccatcatgcccaacctgctgggccacaccaaccaggaggatgctggcctggaggtgcaccagttctaccccctggtgaaggtgcagtgcagccctgagctgcgcttcttcctgtgcagcatgtatgcccctgtgtgcaccgtgctggagcaggccatccccccctgccgcagcatctgtgagcgggcccggcagggctgtgaggccctgatgaacaagtttggcttccagtggccagagcggctgcgctgtgagcacttccccaggcatggagctgagcagatctgtgtgggccagaaccacagtgaagatggagccccagccctgctgaccacagcccctcctcctggcctgcagcccggggccggcggcacccctgggggccctgggggcggcggggccccacccaggtatgccaccctggagcaccccttccactgcccccgggtgctgaaggtgcccagctacctgagctacaagttcctgggggagcgggactgtgccgccccctgtgagcccgcccggccagatggctccatgttcttcagccaggaggagaccaggtttgcccggctgtggatcctgacctggagcgtgctgtgctgtgccagcaccttcttcaccgtgaccacctacctggtggacatgcagcgcttccgctacccagagcggcccatcatcttcctgagcggctgctacaccatggtgtctgtggcctacatcgccggctttgtgctgcaggagcgggtggtgtgcaatgaacgcttctctgaagatggctacagaacagtggtgcagggcaccaagaaggagggctgcaccatcctcttcatgatgctgtacttcttctccatggccagcagcatctggtgggtgatcctgagcctgacctggttcctggccgccggcatgaagtggggccacgaggccatcgaggccaacagccagtacttccacctggccgcctgggccgtgcctgctgtgaagaccatcaccatcctggccatgggccagattgatggagacctgctgtctggagtgtgctttgtgggcctgaacagcctggaccccctgcggggctttgtgctggcccccctgtttgtgtacctgttcatcggcaccagcttcctgctggccggctttgtgtccctcttccgcatccgcaccatcatgaagcatgatggcaccaagacagagaagctggagcggctgatggtgcgcatcggggtcttctctgtgctgtacacagtgcctgccaccatcgtgattgcctgctacttctatgagcaggccttccgggagcactgggagaggtcctgggtgtcccagcactgcaagagcctggccatcccctgcccagcccactacacccccaggatgagcccagacttcaccgtgtacatgatcaagtacctgatgaccctcatcgtgggcatcaccagcggcttctggatctggagcggcaagaccctgcacagctggaggaagttctacacccggctgaccaacagccgccacggggagaccaccgtgtag

SEQ ID NO: 117971 - DNA, 1698 bp, Artificial Sequence
  derived and/or modified sequence
atgcggccccggagcgccctgccccggctgctgctgcccctgctgctgcttccagctgccggtcctgcccagttccatggcgagaaggggattagtatacctgatcatgggttttgtcagcccatctccattcccctgtgtacagacatcgcttataatcagacaataatgcctaatttgctaggacacaccaaccaagaagacgccggcctcgaggtccaccagttttaccccctggtgaaggtgcagtgtagccctgaactgcggtttttcctgtgtagcatgtacgcaccagtctgtaccgtgctggagcaggcaatacctccctgtagaagtatttgcgaacgggccagacaaggatgtgaagccctgatgaacaagttcggctttcagtggccagagcggttgcggtgtgaacatttcccgagacacggggccgagcagatctgcgtgggtcaaaatcacagtgaggacggtgccccagcgcttcttacgacagcccctcctcccggtcttcagcctggggcagggggaacccccggcggaccaggcggcggaggcgcccctcctagatatgcaacgctggaacatcctttccactgtccacgagtactaaaagtcccaagttatctgagctacaagtttctgggcgagcgggactgtgctgcgccttgcgagcctgccagaccagatggatctatgtttttttcgcaggaggaaactaggtttgcccggctgtggattctgacgtggtcagtgctgtgctgcgcttctacctttttcacagtaactacatatctggttgatatgcagagatttagatatcccgagcgaccgatcatcttcctctccggctgctataccatggtgtcagtagcctatatagcagggtttgtcctgcaggaacgggtcgtctgtaacgaacgatttagtgaagatggctatcgcactgtagtccaaggtacaaagaaagaagggtgcaccattttgtttatgatgctgtattttttcagtatggcgtctagtatttggtgggtgatcttatcgctgacctggtttctcgctgccggcatgaagtggggccacgaggcgatcgaggccaatagtcagtatttccaccttgccgcctgggcagttcccgctgtgaagacaatcacaattctggccatgggccagatcgacggagacttactgtccggagtgtgcttcgtgggactcaatagtctggaccctttacggggctttgtgttagcgccactgttcgtttacctgttcataggtactagcttcctactggccgggtttgtaagtctgttcagaattagaacaattatgaagcatgatggaaccaaaacagagaagctggagcgactgatggtccgcatcggagtgttctccgtcctatatactgttcccgctaccattgtcattgcatgttacttctacgaacaagccttccgcgagcattgggagaggtcatgggttagtcagcactgcaagtcactggctataccctgcccggcccactacacaccccggatgagccccgacttcacagtatacatgatcaaatatcttatgacgctgatcgttggtataacttccggcttttggatttggtcgggaaagacattgcatagttggaggaagttctatacgcgtttgacaaattccagacacggagagaccactgtttag

SEQ ID NO: 117972 - DNA, 1926 bp, Artificial Sequence
  derived and/or modified sequence
gcccggggcgtgagcggctgcagcgtgcggccccggcaggccagcgggcaagcacaccggcctctcccacgtccagccagtccaactctgcgcccccgggtgaagtttgcaaaaaggagaggaagaaggcaaccgcagagaggaggcggaggagaagaagcccaaagccctggctggggacggggacgtggaggtcgacaaggcgctggctggggtgcggcggcctctatgcgacctcggtctgcactgcctcgcctgctgctgccccttctgctgttacccgcggctgggcctgcccagttccacggggaaaagggcatatcaatccctgaccacggtttttgccagccaatttcaattccactgtgtaccgatatcgcatacaaccaaacgataatgcccaatctgctgggtcacacaaatcaggaagatgccgggctggaggtacaccagttctaccccctcgtcaaggtgcagtgcagccccgaactccggtttttcttgtgcagtatgtatgccccggtgtgcacggtgttagagcaggcgatccctccttgtaggtctatctgtgagcgggctcggcaggggtgtgaggctctgatgaataagttcggctttcagtggcctgagcgactcagatgtgaacactttcccagacacggagctgaacaaatctgcgtcggccagaatcatagtgaggatggggcacccgccctgctaaccaccgcacctccacctgggctgcagcctggggccgggggaacccccggcggccccggagggggcggtgctcctcccaggtacgctacactggagcacccctttcactgccccagagtcctcaaagtgccctcctatctgagttataagtttttgggcgagcgcgattgtgctgccccgtgcgagcccgctaggccagatggaagtatgttcttctctcaagaggagactagatttgccaggctgtggattctgacctggagtgttctgtgctgtgcatcgactttttttactgtcaccacctatctggtagacatgcagcgattcaggtatccagagcgacctattatcttcctgtcgggttgctatactatggtgagtgttgcctacattgcaggatttgttctgcaggaaagagtggtgtgtaacgaacgatttagtgaggatggctacagaacagtggtgcagggtactaagaaggaaggatgtaccatcctgttcatgatgttatacttcttttcaatggcgtctagcatatggtgggttatcttgtcccttacctggttccttgccgccggcatgaagtggggtcatgaagccatcgaagctaactctcagtattttcatctggctgcttgggccgtcccagccgtgaagactatcacaattctggccatggggcagatagacggcgatctgttgtcgggggtctgcttcgttgggttgaattcactggatccacttaggggcttcgtgctggctccactcttcgtctatttgtttattggcacgagcttcttgcttgccgggtttgtaagcctcttccgcatccggacaattatgaaacatgacggcaccaagacagagaagcttgaacgcttaatggttagaatcggggtgtttagcgtcctctacacagtcccagccacaatagttatagcttgctatttctatgagcaggcctttagagaacattgggaaaggagttgggtgtcccagcattgcaaatctctggcaattccttgccccgctcattatacaccgcgaatgtcccccgacttcaccgtctatatgatcaagtacctaatgaccttgattgtggggattacctctgggttttggatatggtccggcaagacattgcacagctggaggaagttttatactaggctgacaaactccagacacggtgagactaccgtatag

SEQ ID NO: 117973 - DNA, 1698 bp, Artificial Sequence
  derived and/or modified sequence
atgaggcccaggagtgcgcttccccgtctgttattgcccctgcttcttctgcccgcagccggtccagcccaatttcatggcgaaaaaggtatctcaattcccgatcacgggttctgtcaacccataagcatcccactctgcaccgatatcgcatacaaccagaccataatgcccaatcttcttggacacaccaaccaggaggatgctggcctggaggtacatcaattttacccactggtgaaggtgcagtgttcccccgagctgaggttcttcctatgcagcatgtatgcccctgtctgcacggtcctggaacaggcaattcctccttgtaggagcatatgtgagcgcgctcgacagggatgtgaagcacttatgaacaaatttgggtttcaatggccagagagactgcgctgcgagcatttcccccgacatggggctgagcaaatatgcgtaggtcaaaaccactccgaggacggtgctcctgcgctgctgacaacggcgccaccacctggccttcagcctggggcaggcggaacccctggtgggcctggtggtggcggagcccctccacggtacgcaacactggagcatccgttccattgtcctagagtgctcaaggtgcctagctatctgtcgtataagtttctgggcgagcgggattgtgccgctccatgtgagccagcgaggccagatggatccatgttttttagtcaggaggagaccagatttgcacgcctatggatactgacctggtcagtactctgttgtgcctctactttcttcactgtgaccacctacctggtggatatgcagaggtttaggtatccagagaggccaatcatcttcctttccgggtgttacacgatggtgtcggtcgcttacattgccggattcgtgttgcaggagcgggtggtatgtaacgagcgcttcagcgaagatggatacaggaccgtcgtacagggaacaaagaaggagggctgtaccatcctttttatgatgttgtattttttttctatggcttcctccatctggtgggtaattctgagcctgacctggttcttagcagctggtatgaaatgggggcacgaggccattgaagccaattcccagtatttccacctggccgcttgggcggtgcctgccgtgaaaaccataactatcctagcaatgggccagattgatggcgatctcctatctggcgtgtgcttcgtcgggctgaactctctggaccccctaaggggctttgttctcgccccactgttcgtgtacctctttatcgggacatcttttctgctagcaggatttgtcagtctctttcgcattcggactattatgaagcacgacggaacgaaaaccgagaaactcgagcggctcatggtacggattggagttttcagtgtgctgtacaccgtcccggcaaccatcgtaatcgcatgctatttctacgaacaggcatttagggagcactgggaaagatcctgggtttcccaacactgcaaaagcctggctattccctgcccggctcattacacaccacggatgtcccctgattttaccgtctacatgatcaaatacctgatgacacttatcgttgggataacttccgggttctggatttggtccgggaaaacgttacactcatggcggaaattctacacccggttgaccaactcacgacacggcgagaccacagtgtag

SEQ ID NO: 117974 - DNA, 1926 bp, Artificial Sequence
  derived and/or modified sequence
gcacgcggagtgtcagggtgcagcgtgaggcctcggcaggccagcggccaggcgcatcgacccctgcccaggcctgctagcccaactcttaggcccagggtgaagttcgccaaacggagggggcgaagacagcctcagcgtgggggaggcggagaggaggcccagtcaccaggttgggggcgtggtagggggggacgccaaggcgctggatggggagcggctgcgtccatgagacccaggagcgccttgcctaggttgcttctccccctgctcttactgcccgctgcagggcctgcccagttccacggggagaaggggatatccatccctgaccatggtttttgccagcccatttccattcccctttgtaccgacatagcctacaaccaaaccataatgccaaatctgctaggccacacgaaccaagaggacgcaggactcgaggtgcatcagttttatcccctggttaaagtgcagtgttcaccggagttaagattttttctatgttccatgtacgcccctgtgtgcacagtgctggagcaagccatccccccatgtcggagtatttgcgaaagggctagacagggttgtgaagcactgatgaacaagttcggcttccaatggcctgagaggctgcgttgcgaacactttcctagacatggggcagagcaaatctgcgtcggtcaaaaccacagcgaggacggcgctcccgctctgttaacaactgcacccccacccggattgcaaccaggcgcagggggtacaccaggaggacccggaggcggtggggcacctcctaggtatgcaaccctagagcatccgtttcactgcccacgcgtgcttaaggtgcctagttatttgtcttacaagttcctgggtgagcgcgactgtgcagctccatgtgagcctgcgcgtccagacgggagtatgttcttctcacaagaggagacacgctttgcacgcttgtggatactcacttggtccgtcctgtgctgcgcttccacctttttcacagttacgacctaccttgtcgatatgcaacgttttcggtaccctgagcgtcccattattttcctgagcggctgctataccatggtttctgttgcttacatcgctggctttgtcttgcaggagcgcgttgtgtgcaacgaaaggttcagcgaagacggctaccgcactgtggtgcagggcaccaagaaagaggggtgcactatcctgtttatgatgttatactttttttccatggcgtcttccatatggtgggtcatattgagtctaacatggttcctagcggctggtatgaagtgggggcatgaagccatagaggcgaacagccaatactttcatctggccgcatgggccgtgcctgcagtgaagactataaccatcctcgcgatgggccagatagacggcgacttactttccggagtgtgtttcgtcggattaaatagcttagaccccttgcggggtttcgtgttagcccctcttttcgtgtacctcttcatcgggacctccttcctgcttgcaggatttgttagtctattccggatcagaaccataatgaagcacgatggcactaagaccgaaaagctcgaacgtttgatggtgaggatcggggtattttccgttctgtataccgtgcccgcaacaattgtcatcgcatgctacttttatgagcaagccttcagagaacattgggaacggtcttgggtgagccagcactgcaagagtctcgcgatcccttgccctgctcattacactccgcgtatgagtcccgactttaccgtgtatatgatcaaatatctaatgacattaattgtagggatcacttcagggttttggatctggtctggcaagacgctgcacagttggcgcaaattctacacaagactgaccaactcacgacatggagagacaactgtttag

SEQ ID NO: 117975 - DNA, 1698 bp, Artificial Sequence
  derived and/or modified sequence
atgagacccagaagcgccctgcccagactgctgctgcccctgctgctgctgcccgccgccggccccgcccagttccacggcgagaagggcatcagcatccccgaccacggcttctgccagcccatcagcatccccctgtgcaccgacatcgcctacaaccagaccatcatgcccaacctgctgggccacaccaaccaggaggacgccggcctggaggtgcaccagttctaccccctggtgaaggtgcagtgcagccccgagctgagattcttcctgtgcagcatgtacgcccccgtgtgcaccgtgctggagcaggccatccccccctgcagaagcatctgcgagagagccagacagggctgcgaggccctgatgaacaagttcggcttccagtggcccgagagactgagatgcgagcacttccccagacacggcgccgagcagatctgcgtgggccagaaccacagcgaggacggcgcccccgccctgctgaccaccgcccccccccccggcctgcagcccggcgccggcggcacccccggcggccccggcggcggcggcgccccccccagatacgccaccctggagcaccccttccactgccccagagtgctgaaggtgcccagctacctgagctacaagttcctgggcgagagagactgcgccgccccctgcgagcccgccagacccgacggcagcatgttcttcagccaggaggagaccagattcgccagactgtggatcctgacctggagcgtgctgtgctgcgccagcaccttcttcaccgtgaccacctacctggtggacatgcagagattcagataccccgagagacccatcatcttcctgagcggctgctacaccatggtgagcgtggcctacatcgccggcttcgtgctgcaggagagagtggtgtgcaacgagagattcagcgaggacggctacagaaccgtggtgcagggcaccaagaaggagggctgcaccatcctgttcatgatgctgtacttcttcagcatggccagcagcatctggtgggtgatcctgagcctgacctggttcctggccgccggcatgaagtggggccacgaggccatcgaggccaacagccagtacttccacctggccgcctgggccgtgcccgccgtgaagaccatcaccatcctggccatgggccagatcgacggcgacctgctgagcggcgtgtgcttcgtgggcctgaacagcctggaccccctgagaggcttcgtgctggcccccctgttcgtgtacctgttcatcggcaccagcttcctgctggccggcttcgtgagcctgttcagaatcagaaccatcatgaagcacgacggcaccaagaccgagaagctggagagactgatggtgagaatcggcgtgttcagcgtgctgtacaccgtgcccgccaccatcgtgatcgcctgctacttctacgagcaggccttcagagagcactgggagagaagctgggtgagccagcactgcaagagcctggccatcccctgccccgcccactacacccccagaatgagccccgacttcaccgtgtacatgatcaagtacctgatgaccctgatcgtgggcatcaccagcggcttctggatctggagcggcaagaccctgcacagctggagaaagttctacaccagactgaccaacagcagacacggcgagaccaccgtgtag

SEQ ID NO: 117976 - DNA, 1926 bp, Artificial Sequence
  derived and/or modified sequence
gccagaggcgtgagcggctgcagcgtgagacccagacaggccagcggccaggcccacagacccctgcccagacccgccagccccaccctgagacccagagtgaagttcgccaagagaagaggcagaagacagccccagagaggcggcggcggcgaggaggcccagagccccggctggggcagaggcagaggcggcagacagggcgccggctggggcgccgccgccagcatgagacccagaagcgccctgcccagactgctgctgcccctgctgctgctgcccgccgccggccccgcccagttccacggcgagaagggcatcagcatccccgaccacggcttctgccagcccatcagcatccccctgtgcaccgacatcgcctacaaccagaccatcatgcccaacctgctgggccacaccaaccaggaggacgccggcctggaggtgcaccagttctaccccctggtgaaggtgcagtgcagccccgagctgagattcttcctgtgcagcatgtacgcccccgtgtgcaccgtgctggagcaggccatccccccctgcagaagcatctgcgagagagccagacagggctgcgaggccctgatgaacaagttcggcttccagtggcccgagagactgagatgcgagcacttccccagacacggcgccgagcagatctgcgtgggccagaaccacagcgaggacggcgcccccgccctgctgaccaccgcccccccccccggcctgcagcccggcgccggcggcacccccggcggccccggcggcggcggcgccccccccagatacgccaccctggagcaccccttccactgccccagagtgctgaaggtgcccagctacctgagctacaagttcctgggcgagagagactgcgccgccccctgcgagcccgccagacccgacggcagcatgttcttcagccaggaggagaccagattcgccagactgtggatcctgacctggagcgtgctgtgctgcgccagcaccttcttcaccgtgaccacctacctggtggacatgcagagattcagataccccgagagacccatcatcttcctgagcggctgctacaccatggtgagcgtggcctacatcgccggcttcgtgctgcaggagagagtggtgtgcaacgagagattcagcgaggacggctacagaaccgtggtgcagggcaccaagaaggagggctgcaccatcctgttcatgatgctgtacttcttcagcatggccagcagcatctggtgggtgatcctgagcctgacctggttcctggccgccggcatgaagtggggccacgaggccatcgaggccaacagccagtacttccacctggccgcctgggccgtgcccgccgtgaagaccatcaccatcctggccatgggccagatcgacggcgacctgctgagcggcgtgtgcttcgtgggcctgaacagcctggaccccctgagaggcttcgtgctggcccccctgttcgtgtacctgttcatcggcaccagcttcctgctggccggcttcgtgagcctgttcagaatcagaaccatcatgaagcacgacggcaccaagaccgagaagctggagagactgatggtgagaatcggcgtgttcagcgtgctgtacaccgtgcccgccaccatcgtgatcgcctgctacttctacgagcaggccttcagagagcactgggagagaagctgggtgagccagcactgcaagagcctggccatcccctgccccgcccactacacccccagaatgagccccgacttcaccgtgtacatgatcaagtacctgatgaccctgatcgtgggcatcaccagcggcttctggatctggagcggcaagaccctgcacagctggagaaagttctacaccagactgaccaacagcagacacggcgagaccaccgtgtag

SEQ ID NO: 117977 - protein, 578 aa, Artificial Sequence
  derived and/or modified sequence
MLLLLLLAPLFLRPPGAGGAQTPNATSEGCQIIHPPWEGGIRYRGLTRDQVKAINFLPVDYEIEYVCRGEREVVGPKVRKCLANGSWTDMDTPSRCVRICSKSYLTLENGKVFLTGGDLPALDGARVDFRCDPDFHLVGSSRSICSQGQWSTPKPHCQVNRTPHSERRAVYIGALFPMSGGWPGGQACQPAVEMALEDVNSRRDILPDYELKLIHHDSKCDPGQATKYLYELLYNDPIKIILMPGCSSVSTLVAEAARMWNLIVLSYGSSSPALSNRQRFPTFFRTHPSATLHNPTRVKLFEKWGWKKIATIQQTTEVFTSTLDDLEERVKEAGIEITFRQSFFSDPAVPVKNLKRQDARIIVGLFYETEARKVFCEVYKERLFGKKYVWFLIGWYADNWFKIYDPSINCTVDEMTEAVEGHITTEIVMLNPANTRSISNMTSQEFVEKLTKRLKRHPEETGGFQEAPLAYDAIWALALALNKTSGGGGRSGVRLEDFNYNNQTITDQIYRAMNSSSFEGVSGHVVFDASGSRMAWTLIEQLQGGSYKKIGYYDSTKDDLSWSKTDKWIVISRTHSPT

SEQ ID NO: 117978 - protein, 961 aa, Artificial Sequence
  derived and/or modified sequence
MLLLLLLAPLFLRPPGAGGAQTPNATSEGCQIIHPPWEGGIRYRGLTRDQVKAINFLPVDYEIEYVCRGEREVVGPKVRKCLANGSWTDMDTPSRCVRICSKSYLTLENGKVFLTGGDLPALDGARVDFRCDPDFHLVGSSRSICSQGQWSTPKPHCQVNRTPHSERRAVYIGALFPMSGGWPGGQACQPAVEMALEDVNSRRDILPDYELKLIHHDSKCDPGQATKYLYELLYNDPIKIILMPGCSSVSTLVAEAARMWNLIVLSYGSSSPALSNRQRFPTFFRTHPSATLHNPTRVKLFEKWGWKKIATIQQTTEVFTSTLDDLEERVKEAGIEITFRQSFFSDPAVPVKNLKRQDARIIVGLFYETEARKVFCEVYKERLFGKKYVWFLIGWYADNWFKIYDPSINCTVDEMTEAVEGHITTEIVMLNPANTRSISNMTSQEFVEKLTKRLKRHPEETGGFQEAPLAYDAIWALALALNKTSGGGGRSGVRLEDFNYNNQTITDQIYRAMNSSSFEGVSGHVVFDASGSRMAWTLIEQLQGGSYKKIGYYDSTKDDLSWSKTDKWIGGSPPADQTLVIKTFRFLSQKLFISVSVLSSLGIVLAVVCLSFNIYNSHVRYIQNSQPNLNNLTAVGCSLALAAVFPLGLDGYHIGRNQFPFVCQARLWLLGLGFSLGYGSMFTKIWWVHTVFTKKEEKKEWRKTLEPWKLYATVGLLVGMDVLTLAIWQIVDPLHRTIETFAKEEPKEDIDVSILPQLEHCSSRKMNTWLGIFYGYKGLLLLLGIFLAYETKSVSTEKINDHRAVGMAIYNVAVLCLITAPVTMILSSQQDAAFAFASLAIVFSSYITLVVLFVPKMRRLITRGEWQSEAQDTMKTGSSTNNNEEEKSRLLEKENRELEKIIAEKEERVSELRHQLQSRQQLRSRRHPPTPPEPSGGLPRGPPEPPDRLSCDGSRVHLLYK

SEQ ID NO: 117979 - protein, 156 aa, Artificial Sequence
  derived and/or modified sequence
MLLLLLLAPLFLRPPGAGGAQTPNATSEGCQIIHPPWEGGIRYRGLTRDQVKAINFLPVDYEIEYVCRGEREVVGPKVRKCLANGSWTDMDTPSRCVRICSKSYLTLENGKVFLTGGDLPALDGARVDFRCDPDFHLVGSSRSICSQGQWSTPKPH

SEQ ID NO: 117980 - protein, 533 aa, Artificial Sequence
  derived and/or modified sequence
MWLGRRALCALVLLLACASLGLLYASTRDAPGLRLPLAPWAPPQSPRRPELPDLAPEPRYAHIPVRIKEQVVGLLAWNNCSCESSGGGLPLPFQKQVRAIDLTKAFDPAELRAASATREQEFQAFLSRSQSPADQLLIAPANSPLQYPLQGVEVQPLRSILVPGLSLQAASGQEVYQVNLTASLGTWDVAGEVTGVTLTGEGQADLTLVSPGLDQLNRQLQLVTYSSRSYQTNTADTVRFSTEGHEAAFTIRIRHPPNPRLYPPGSLPQGAQYNISALVTIATKTFLRYDRLRALITSIRRFYPTVTVVIADDSDKPERVSGPYVEHYLMPFGKGWFAGRNLAVSQVTTKYVLWVDDDFVFTARTRLERLVDVLERTPLDLVGGAVREISGFATTYRQLLSVEPGAPGLGNCLRQRRGFHHELVGFPGCVVTDGVVNFFLARTDKVREVGFDPRLSRVAHLEFFLDGLGSLRVGSCSDVVVDHASKLKLPWTSRDAGAETYARYRYPGSLDESQMAKHRLLFFKHRLQCMTSQ

SEQ ID NO: 117981 - DNA, 1602 bp, Artificial Sequence
  derived and/or modified sequence
atgtggctgggcagaagagccctgtgcgccctggtgctgctgctggcctgcgccagcctgggcctgctgtacgccagcaccagagacgcccccggcctgagactgcccctggccccctgggcccccccccagagccccagaagacccgagctgcccgacctggcccccgagcccagatacgcccacatccccgtgagaatcaaggagcaggtggtgggcctgctggcctggaacaactgcagctgcgagagcagcggcggcggcctgcccctgcccttccagaagcaggtgagagccatcgacctgaccaaggccttcgaccccgccgagctgagagccgccagcgccaccagagagcaggagttccaggccttcctgagcagaagccagagccccgccgaccagctgctgatcgcccccgccaacagccccctgcagtaccccctgcagggcgtggaggtgcagcccctgagaagcatcctggtgcccggcctgagcctgcaggccgccagcggccaggaggtgtaccaggtgaacctgaccgccagcctgggcacctgggacgtggccggcgaggtgaccggcgtgaccctgaccggcgagggccaggccgacctgaccctggtgagccccggcctggaccagctgaacagacagctgcagctggtgacctacagcagcagaagctaccagaccaacaccgccgacaccgtgagattcagcaccgagggccacgaggccgccttcaccatcagaatcagacacccccccaaccccagactgtacccccccggcagcctgccccagggcgcccagtacaacatcagcgccctggtgaccatcgccaccaagaccttcctgagatacgacagactgagagccctgatcaccagcatcagaagattctaccccaccgtgaccgtggtgatcgccgacgacagcgacaagcccgagagagtgagcggcccctacgtggagcactacctgatgcccttcggcaagggctggttcgccggcagaaacctggccgtgagccaggtgaccaccaagtacgtgctgtgggtggacgacgacttcgtgttcaccgccagaaccagactggagagactggtggacgtgctggagagaacccccctggacctggtgggcggcgccgtgagagagatcagcggcttcgccaccacctacagacagctgctgagcgtggagcccggcgcccccggcctgggcaactgcctgagacagagaagaggcttccaccacgagctggtgggcttccccggctgcgtggtgaccgacggcgtggtgaacttcttcctggccagaaccgacaaggtgagagaggtgggcttcgaccccagactgagcagagtggcccacctggagttcttcctggacggcctgggcagcctgagagtgggcagctgcagcgacgtggtggtggaccacgccagcaagctgaagctgccctggaccagcagagacgccggcgccgagacctacgccagatacagataccccggcagcctggacgagagccagatggccaagcacagactgctgttcttcaagcacagactgcagtgcatgaccagccagtag

SEQ ID NO: 117982 - DNA, 1602 bp, Artificial Sequence
  derived and/or modified sequence
atgtggctgggcaggcgagccctgtgtgctctcgtcctgctgcttgcctgtgcctcccttggactcctatacgcctcgactcgagatgcccccggcctgaggctgcctctagctccatgggcaccaccacaaagtcctagacggccggaactcccagacctggctccagaaccaaggtacgcacacatccccgtgcgaattaaggagcaggttgtgggccttctagcctggaacaactgcagttgcgagtcatcaggtggaggcctgccgttacccttccaaaaacaggtcagagcaatcgacctgactaaggcgtttgatcctgcggagttgagggccgcctcagccaccagggaacaggagttccaggcctttctaagcaggagtcagagtccagcagaccagctgctgatcgcccctgcaaactcgcccctgcagtacccactgcagggcgtggaggttcagccccttcgatccattctcgtgccgggtttgagtctccaggctgctagcggacaagaggtgtaccaggtgaacctaacggcctctctgggaacctgggatgtggcaggcgaggtcaccggtgtaaccctcaccggcgaaggccaggctgatctcactttggtgagccccgggttagaccaactaaacagacagctgcaactggtgacatattcctctcggagttatcagacaaatacagcagatacagttcggttctctacggagggtcatgaagctgcttttacaatcaggatacgacacccacccaacccgcgcttatacccccccggctctctgcctcagggcgcacagtacaatatttcagcgctggtaacgattgctacaaagactttcctccggtatgatcggctacgggccctgattacttccatccgcagattctaccctaccgtgaccgttgtgatcgccgacgactccgataaacccgagagagtctccggaccctacgtggagcactatctcatgccctttggaaagggttggttcgctggcaggaatctggctgtgtcacaggttaccaccaagtacgtcctctgggtagacgatgattttgtgtttaccgctaggactagactggagagactcgtggacgttctcgaacgaacgcctcttgacctggtcgggggggctgtccgggagataagcggatttgctaccacctatagacagctgctgtcagtcgagcccggcgccccagggctgggaaattgtctgcgccagcggcgtggattccaccacgaactcgtcgggttcccaggatgcgtcgttacggacggagtagtgaattttttcctcgcccgcactgacaaagtgcgcgaggttggattcgaccccaggttgtctagagttgcccacctggagttctttctggatggccttggctcattgagagttggcagttgtagtgatgtcgtggttgaccacgccagcaagctgaaattgccatggacatccagagacgccggcgctgagacttatgccagatatcgatacccaggtagccttgatgagtcccagatggccaagcataggttgctgttcttcaaacacagactgcaatgcatgacgtcacagtag

SEQ ID NO: 117983 - DNA, 1602 bp, Artificial Sequence
  derived and/or modified sequence
atgtggctgggcagaagagccctgtgtgccctggtgctgctgctggcctgtgccagcctgggcctgctgtatgccagcaccagagatgcccctggcctgcggctgcccctggccccctgggccccaccccagagccccaggaggcctgagctgcctgacctggcccctgagcccaggtatgcccacatccctgtgcgcatcaaggagcaggtggtgggcctgctggcctggaacaactgcagctgtgagagcagcggcggcggcctgcccctgcccttccagaagcaggtgcgggccatcgacctgaccaaggcctttgatcctgctgagctgcgggccgccagcgccacccgggagcaggagttccaggccttcctgagccgcagccagagccctgctgaccagctgctgattgccccagccaacagccccctgcagtaccccctgcagggcgtggaggtgcagcccctgcggagcatcctggtgcccggcctgagcctgcaggccgccagcggccaggaggtgtaccaggtgaacctgacagccagcctgggcacctgggatgtggccggggaggtgactggagtgaccctgactggagagggccaggccgacctgaccctggtgtccccaggcctggaccagctgaaccggcagctgcagctggtgacctacagcagccgcagctaccagaccaacacagctgacacagtgcgcttcagcacagagggccatgaagctgccttcaccatccgcatccgccacccccccaacccccggctgtacccacctggcagcctgccccagggcgcccagtacaacatcagcgccctggtgaccatcgccaccaagaccttcctgcgctatgaccggctgcgggccctgatcaccagcatccgccgcttctaccccaccgtgacagtggtgattgctgatgacagcgacaagccagagcgggtgtctggcccctacgtggagcactacctgatgccctttgggaagggctggtttgctggcaggaacctggccgtgtcccaggtgaccaccaagtatgtgctgtgggtggatgatgactttgtgttcaccgcccggacccggctggagcggctggtggatgtgctggagaggacccccctggacctggtgggcggcgctgtgcgggagatcagcggctttgccaccacctaccggcagctgctgtctgtggagcccggggcccctggcctgggcaactgcctgcggcagaggcggggcttccaccacgagctggtgggcttccctggctgtgtggtgacagatggagtggtgaacttcttcctggccaggacagacaaggtgcgggaggtgggctttgacccccggctgagccgggtggcccacctggagttcttcctggatggcctgggcagcctgcgggtgggcagctgcagtgatgtggtggtggaccacgccagcaagctgaagctgccctggaccagcagagatgctggagctgagacctacgcccgctaccgctacccaggcagcctggatgagagccagatggccaagcaccggctgctcttcttcaagcaccggctgcagtgcatgaccagccagtag

SEQ ID NO: 117984 - DNA, 1602 bp, Artificial Sequence
  derived and/or modified sequence
atgtggctgggccggcgggccctgtgcgccctggtgctgctgctggcatgcgcttccctcggactgctctatgcctcaactcgcgacgcgcccggcctgagattacccctggctccttgggctccacctcagagcccccgaagacctgaactgcccgacctggccccggagccaaggtacgcccatattccagtccgcatcaaggagcaagtagtggggttgctcgcttggaataattgttcttgcgagagctcaggcggcggattgcctttgccctttcagaaacaggtgcgcgcaattgaccttacaaaagccttcgatccagccgagttgcgcgctgccagcgcaacccgggagcaggagtttcaggccttcctcagtagaagccagtcacctgccgaccaactcctcatcgcacctgccaattcaccactgcagtaccctctccaaggagtcgaggtgcaaccgctgcggtccatcttggtgcccgggctcagcctgcaggccgcaagcgggcaggaagtgtaccaggtaaacctgacagcctccctaggcacatgggacgtagctggcgaagtgacaggcgtcacattaactggtgaaggccaagctgatctgaccctagtgagcccggggcttgaccaactcaaccgtcagttgcagctggttacatattcaagccggtcataccagaccaacaccgccgatacagtaaggttctcaacagaaggccatgaggcagcattcaccattcggattagacaccctcccaacccacggctctaccctcccgggtctctccctcagggagctcagtacaacatttccgcgctcgtgaccattgcaaccaagacctttcttcgttacgataggctgcgggccctgattactagcatacggaggttttaccctactgtgaccgtggtgatcgctgacgattcagacaaaccagaacgcgtatccggcccttacgtggagcactatctgatgccgttcggcaaggggtggttcgcaggcaggaacctcgcggtgtcacaagttacgacaaagtacgtcctttgggtagacgatgacttcgtgtttacagcacggacccgccttgaaagactggtagacgtcctggaaagaactcccttagacctggtcggtggcgccgttcgcgaaatctctggcttcgctacaacctatagacagttattatccgtggagcctggcgcacccggactgggaaactgtttaaggcagaggagggggttccaccacgagctcgtcggctttcccgggtgtgtggtgactgatggtgtggtaaattttttcttagcgcgtactgacaaagtacgtgaggttgggttcgacccacgcctatcgcgcgtcgcccacctagaatttttcctcgacggcctagggtccctgagagtaggatcctgcagcgatgtggtcgtagatcatgcatccaagcttaaactcccatggacatcacgggacgccggcgcagagacctatgctcgttatagatatcctggcagtttggatgaaagccagatggccaagcacagactattgttctttaagcaccgcctgcaatgcatgactagccagtag

SEQ ID NO: 117985 - DNA, 1602 bp, Artificial Sequence
  derived and/or modified sequence
atgtggctcggcagacgagctctgtgtgctcttgttctgctgctcgcctgcgcgtctctagggctcctgtatgcaagcacaagagacgctcccggtctccgactaccactcgccccatgggcccctcctcaaagtccaaggagaccggagctgcctgacctcgcgcctgagccacgctatgctcacatccctgtgagaataaaagaacaagtcgttggactgctcgcctggaataattgctcctgcgagtcgagcggtggcggacttcccctcccttttcagaaacaagtccgcgctatcgatctgacaaaagcctttgaccccgcagaattaagagccgcaagtgccactagagagcaggaatttcaggcattcttgtccagatcccagtctcctgcagaccaactcctgattgctccagccaattcacctctccagtatcctctgcaaggagtggaggtacagccactccgcagcatcctagtcccaggtctgagcctgcaagccgctagcggtcaggaagtgtaccaggttaatctgacagctagcctcggcacatgggacgtggccggagaggtgactggggtaaccctgaccggggagggccaggctgacctcacactggtgtccccagggctggaccagttgaaccgccagctgcagctcgtgacatacagcagcagatcctaccagacgaatactgctgatacagtgcgtttctctacagaaggacacgaggctgcctttacaatccggatccgccacccccctaatcctagattatatcctcctggttccctgccccagggagcccagtataacatcagtgccctagtgactatagccaccaagacctttttaagatacgacagactacgtgcgctgatcacttcgatcagacggttttacccaacagtgactgtcgtgatcgcagacgattccgacaaacccgaacgcgtgtcgggcccatacgtggaacactatctcatgccgttcggcaagggttggttcgccggtcggaacctggctgtgagccaggtgaccaccaagtacgtactgtgggttgacgatgacttcgtcttcacagccaggactcgattagagaggctcgtggatgttctggagagaactcccctcgaccttgtggggggtgcagtccgtgagatttccggctttgctacaacctataggcagttacttagcgtggagccaggagcccctgggcttgggaactgcctgcgacagagacgaggatttcaccatgaattggtgggattcccaggttgtgtagtcacagatggggtggtgaacttctttttggccaggacagacaaggtgagagaagtggggttcgatcccagactgtccagggttgcccacttggaattctttcttgacgggctgggaagcctccgcgtcggatcgtgctcggatgtcgttgtggaccatgcctcaaaactcaagctgccttggacctcccgggatgctggcgctgagacctatgcacgctaccggtaccccggatccttagatgaatcccagatggccaagcatcgtctcttattttttaaacacaggctgcaatgcatgacctcccaatag

SEQ ID NO: 117986 - DNA, 3036 bp, Artificial Sequence
  derived and/or modified sequence
acgagcaggcaatggaatggatgtcgtgggagcaggcggttgagatgccagtgtttggaggctaaggactgggggctgtgagcgaggaccttcccgcgtttgctccgcgcccccgcagtttcctccgcgcccactagaaggcgccggggcgctcgcattccccgcgcggagccgaagcagccgcaacgagccgggagctgagccgcgctgcgctgcggtgcgaagagccgggcggcggccagagccctccccgcgctgccagtgggacgcggagccagggatccccggctttgccccggggctggggtgcaacagactcttaacttggtcctcgcgccccgccaaccgcccccgggcaggaaacgcccagaaccaccaccgcgccgcgctccacaaaagccccgggagttccaagacgggagggatcgggcgcgctccagaggcaggagggtcccccacaccctcaggctcatgcccagctcccccatcgggcagcccccagccccatgaggaccctcaggccggggcgagagcccggcacagcccggaccgaaattttgccgctgccttagagcgttagacaggatgtggctgggccgccgggccctgtgcgctctggtccttctgctcgcctgcgcctcgctggggctcctgtacgcgagcacccgggacgcgcccggcctccggctacctcttgcgccgtgggcgcccccgcaaagcccccgcaggcccgagctgccagatcttgctcctgagccccgctacgcacacatcccggtcaggatcaaggagcaagtagtggggctgctggcttggaacaactgcagttgtgagtccagtggggggggcctccccctccccttccagaaacaagtccgagctattgacctcaccaaggcctttgaccctgcagagctgagggctgcctctgccacaagagagcaggagttccaggcctttctgtcgaggagccagtccccagctgaccagctgctcatagcccctgccaactccccgctccagtaccccctacagggtgtggaagttcagcccctcaggagcatcttggtgccagggctgagccttcaggcagcttctggtcaggaggtataccaggtgaacctgactgcctccctaggcacctgggacgtggcaggggaagtgactggagttactctcactggagagggtcaggcagatctcacccttgtcagcccagggctggaccaactcaacaggcaactacaactggtcacttacagcagccgaagctaccagaccaacacagcagacacagtccggttctccaccgagggacatgaggctgctttcactatccgcataagacacccgcccaaccctcggctgtacccacctgggtctctaccccagggagcccagtacaacatcagcgctctagtcacgattgccaccaagaccttcctccgttatgatcggctacgggctctcatcaccagtatccgccgcttctacccaacggttaccgtggtcatcgctgacgacagcgacaagccagagcgcgttagtggcccctacgtggaacactatctcatgcccttcggcaagggctggttcgcaggccggaacctggccgtgtctcaagtaaccaccaagtacgtgctgtgggtggacgacgacttcgtcttcacggcgcggacgcggctggagaggcttgtggacgtgctggagcggacgccgctggacctggtggggggcgcggtgcgcgagatctccggctttgccaccacttatcggcagctgctgagcgtggagcccggcgccccaggcctcgggaactgcctccggcaaaggcgcggcttccaccacgagctcgtcggcttcccaggctgcgtggtcaccgacggcgtggttaacttcttcctggcgcggactgacaaggtgcgcgaggtcggtttcgacccccgcctcagccgcgtggctcatctggaattcttcttggatgggcttggttcccttcgggttggctcctgctccgacgtcgtggtggatcatgcatccaaactgaagctgccttggacatcaagggatgccggagcagagacttacgcccggtaccgttacccaggatcactggacgagagccagatggccaaacaccggctgctcttcttcaaacaccggctgcagtgcatgacctcccagtgatggcccgctggggatttctgactgtcaggctgggcctgcctccttgtccctgccaggaatttccaacaaaccccaccaccctgtgagcactctactggctgtccctgagcctctagttcctcactcttccttttcagaacctgatgcccagtaggggttgtcctggtgacacccctcctttttccagtgcccagaggcctggtggagccataacctctcccacagccagtgccaagtcctccccctgcccattctcatggggcaggaaatggggggatcactttccaagtgccaaagagcccagagggactctaagaacctaaggtggaaacactgtcctctcatcttgggaccgagggggtggggaagttccccaacacataatcccaagactgtgcccctcatctgcatcttcagatccagtactctgtgtacctgctccagccccacccccacagagagaacttgtggctctggggctggggtgagggctggtggttggtgaaagccattcttagttgtgtctctgcaatgctgtgggcacaaaagaaggggcaccagagtccctgtgcaaacacctagactcacttcatggattccaaagctctcagcttcattttattagttacgttaggtaagggggttcaagggtcatggtcctcatcacacacatgtcatcagggccctctgcactccacatgatgaggtcagacccacacggtgcaaatctttgggtcagtgagctcctggagaagagaggagacatgtcaggaatagattaggcacccctcttccttaatgaaatgtggcagtcctctcaggggtaccccacctacttagggatctgag

SEQ ID NO: 117987 - protein, 349 aa, Artificial Sequence
  derived and/or modified sequence
MELAVGNLSEGNASWPEPPAPEPGPLFGIGVENFVTLVVFGLIFALGVLGNSLVITVLARSKPGKPRSTTNLFILNLSIADLAYLLFCIPFQATVYALPTWVLGAFICKFIHYFFTVSMLVSIFTLAAMSVDRYVAIVHSRRSSSLRVSRNALLGVGCIWALSIAMASPVAYHQGLFHPRASNQTFCWEQWPDPRHKKAYVVCTFVFGYLLPLLLICFCYAKVLNHLHKKLKNMSKKSEASKKKTAQTVLVVVVVFGISWLPHHIIHLWAEFGVFPLTPASFLFRITAHCLAYSNSSVNPIIYAFLSENFRKAYKQVFKCHIRKDSHLSDTKESKSRIDTPPSTNCTHV

SEQ ID NO: 117988 - DNA, 1050 bp, Artificial Sequence
  derived and/or modified sequence
atggagctggcggtcgggaacctcagcgagggcaacgcgagctggccggagccccccgccccggagcccgggccgctgttcggcatcggcgtggagaacttcgtcacgctggtggtgttcggcctgatcttcgcgctgggtgtgctgggcaacagcctagtgatcaccgtgctggcgcgcagcaagccgggcaagccgcggagcaccaccaacctgttcatcctcaacctgagcatcgccgacctggcctacctgctcttctgcatccccttccaggccaccgtgtacgcgctgcccacctgggtgctgggcgccttcatctgcaagttcatccactacttcttcaccgtgtccatgctggtgagcatcttcaccctggccgcgatgtccgtggaccgctacgtggccatcgtgcactcgcggcgctcctcctccctcagggtgtcccgcaacgcgctgctgggcgtgggctgcatctgggcgctgtccattgccatggcctcgcccgtggcctaccaccagggcctcttccacccgcgcgccagcaaccagaccttctgctgggagcagtggcccgaccctcgccacaagaaggcctacgtggtgtgcaccttcgtcttcggctacctgctgccgctcctgctcatctgcttctgctatgccaaggtccttaatcacttgcataaaaagttgaagaacatgtcaaagaagtctgaagcatccaagaaaaagactgcacagacagttctggtggtggttgtggtgtttggaatctcctggctgccgcaccacatcatccatctctgggctgagtttggagttttcccgctgacgccggcttccttcctcttcagaatcaccgcccactgcctggcgtacagcaattcctccgtgaatcctatcatttatgcatttctctctgaaaatttcaggaaggcctataaacaagtgttcaagtgtcacattcgcaaagattcacacctgagtgatactaaagaaagtaaaagtcgaatagacaccccaccatcaaccaattgtactcatgtgtga

SEQ ID NO: 117989 - DNA, 1050 bp, Artificial Sequence
  derived and/or modified sequence
atggagttggcagtggggaatttgtctgaggggaatgcatcttggcccgagcctcccgcaccagagcccggccccctgtttggaatcggagtcgaaaactttgtcaccctggtcgtgtttggtttgatcttcgctctaggcgtgttgggaaattcacttgtcattacagtgttggcacgctctaaaccgggtaaaccaagatctacgaccaacctgttcattcttaacctctctatagcggatctcgcttatctgctgttctgtattcctttccaggcaacagtttacgcccttcccacctgggttctgggggcatttatatgtaagtttatccactacttcttcacagtatccatgctcgtctctatatttacactggctgccatgtcagtggaccggtacgtggctatcgttcattcccggcgaagtagcagcctgagggtgagcaggaacgcactgcttggcgtgggttgcatatgggcgcttagcattgccatggcgtctcctgtggcctatcaccagggcctttttcaccctcgtgcaagtaatcaaactttctgctgggagcagtggcctgatccccggcataagaaagcatatgtggtttgcacttttgtgttcggatatctgctccccctcctcctaatctgcttctgttacgctaaagtactgaatcacctgcataaaaagctcaagaacatgtctaagaagagtgaagcttcgaaaaaaaagaccgcccagactgtgctggtggtagtggtcgtgttcggaattagttggctccctcaccatataatccatctgtgggcagagttcggcgtgttcccacttactcctgccagctttctgttcagaataactgcacattgcctcgcctacagcaacagttctgttaaccctatcatctacgcctttctctccgagaactttaggaaagcatacaaacaggtttttaaatgccacattcggaaagactcacatttgagcgacaccaaagaatcaaagtcgagaatcgatactcctccctcgaccaattgtacacacgtgtag

SEQ ID NO: 117990 - DNA, 1050 bp, Artificial Sequence
  derived and/or modified sequence
atggagctggccgtgggcaacctgtctgagggcaatgcctcctggccagagcccccagcccctgagcccggccccctgtttggaattggagtggagaactttgtgaccctggtggtgtttggcctcatctttgccctgggcgtgctgggcaacagcctggtgatcaccgtgctggcccggagcaagccaggcaagcccaggagcaccaccaacctcttcatcctgaacctgagcattgctgacctggcctacctgctcttctgcatccccttccaggccaccgtgtatgccctgcccacctgggtgctgggcgccttcatctgcaagttcatccactacttcttcaccgtgtccatgctggtgtccatcttcaccctggccgccatgtctgtggaccgctacgtggccatcgtgcacagcagaagaagcagcagcctgcgggtgtccagaaatgccctgctgggcgtgggctgcatctgggccctgagcatcgccatggccagccctgtggcctaccaccagggcctcttccacccccgggccagcaaccagaccttctgctgggagcagtggccagaccccaggcacaagaaggcctacgtggtgtgcacctttgtgtttggctacctgctgcccctgctgctgatctgcttctgctacgccaaggtgctgaaccacctgcacaagaagctgaagaacatgagcaagaagtctgaggccagcaagaagaagacagcccagacagtgctggtggtggtggtggtgtttggcatctcctggctgccccaccacatcatccacctgtgggccgagtttggagtcttccccctgaccccagccagcttcctgttccgcatcacagcccactgcctggcctacagcaacagctctgtgaaccccatcatctatgccttcctgtctgagaacttcaggaaggcctacaagcaggtgttcaagtgccacatcaggaaggacagccacctgagtgacaccaaggagagcaagagcagaattgacaccccacccagcaccaactgcacccacgtgtag

SEQ ID NO: 117991 - DNA, 1050 bp, Artificial Sequence
  derived and/or modified sequence
atggagctggccgtgggcaacctgagcgagggcaacgccagctggccagagcctcctgcgccagagccgggacccttattcggcattggtgttgagaactttgttaccctggtcgtatttggactaatttttgctttaggagttttgggcaattccctcgtgatcaccgtattagcccgcagcaaacctgggaagccaagatctactacaaacttgttcatcctaaatctttcgatcgccgatttggcgtatctgctcttctgcattccgtttcaggcgaccgtatacgctctgcctacctgggtcttaggagctttcatttgtaagtttatccattactttttcaccgtgtccatgctcgttagtatcttcaccttggccgccatgtccgtggacaggtatgttgcgatcgtgcactccaggagaagttcttccctgcgggtgtcccgaaatgcactgctaggtgtcggatgcatttgggcgctgtctattgcaatggcctcacctgtcgcctatcaccaaggcctttttcaccctcgcgcttccaatcagaccttttgctgggagcagtggcccgacccaaggcacaaaaaggcttatgtagtctgcaccttcgttttcggctatctgctgccactcctcctgatttgcttctgctacgctaaagtcctgaaccatttacataagaaactcaaaaatatgtccaagaaatcagaggcctccaaaaagaaaactgcgcaaaccgtgctagtcgtcgtagtcgttttcggcatttcttggttgccccatcatatcattcatttgtgggccgagtttggggtgtttcccttgacccctgcgtcctttctgtttaggataactgctcactgccttgcgtacagcaactcttccgttaacccaattatatatgctttcctaagtgagaacttccgaaaagcttacaagcaggtgtttaaatgtcatatccgtaaggactcccatctgtctgatacaaaagaaagcaaatctagaatcgatactccaccctcaaccaactgcacccacgtttag

SEQ ID NO: 117992 - DNA, 1050 bp, Artificial Sequence
  derived and/or modified sequence
atggagttggctgttggcaatctgtcagaaggcaatgcaagctggccagaacctcctgccccagagccgggaccactgtttggaattggcgtcgaaaatttcgtcaccttggtggtgttcgggttgattttcgcactcggcgtgctggggaactcgctggtgataacagtactggcgcgatccaagccaggaaaacctaggtcgactactaatttatttatcctgaatctcagcattgccgatctggcataccttttgttctgtatcccgttccaggcgacggtgtatgcacttccaacatgggtcctcggggctttcatttgcaagtttatacattatttcttcaccgttagtatgctcgttagcatctttaccctggccgctatgtctgtcgatagatacgtggccattgtgcacagtagacggtcctcgtcccttagagtgagtagaaatgcactcctcggggtgggctgcatttgggcgctctccattgccatggcgagccctgtcgcatatcaccaaggactcttccaccctcgcgcttctaatcagaccttctgttgggagcaatggcctgaccctagacacaaaaaggcctatgtggtgtgcactttcgtatttggctacttgctaccgctgctgctgatatgcttttgctacgctaaggtactcaatcatcttcataaaaagctgaaaaatatgtccaaaaagagcgaagcctccaagaagaagaccgcccagactgttttagtggttgtggtggttttcggtatcagctggctgcctcaccatatcatacacctgtgggccgagttcggagtgttcccccttactcccgctagctttttattccgtataaccgctcactgcctcgcgtacagtaactcctccgtcaacccgataatttacgccttcctgagtgagaattttaggaaagcctataagcaggtctttaagtgccatattagaaaggattctcatctcagcgataccaaggagagtaagagccgaatagacacgcctccgagcaccaactgtacccatgtctag

SEQ ID NO: 117993 - DNA, 1050 bp, Artificial Sequence
  derived and/or modified sequence
atggagctggccgtgggcaacctgagcgagggcaacgccagctggcccgagccccccgcccccgagcccggccccctgttcggcatcggcgtggagaacttcgtgaccctggtggtgttcggcctgatcttcgccctgggcgtgctgggcaacagcctggtgatcaccgtgctggccagaagcaagcccggcaagcccagaagcaccaccaacctgttcatcctgaacctgagcatcgccgacctggcctacctgctgttctgcatccccttccaggccaccgtgtacgccctgcccacctgggtgctgggcgccttcatctgcaagttcatccactacttcttcaccgtgagcatgctggtgagcatcttcaccctggccgccatgagcgtggacagatacgtggccatcgtgcacagcagaagaagcagcagcctgagagtgagcagaaacgccctgctgggcgtgggctgcatctgggccctgagcatcgccatggccagccccgtggcctaccaccagggcctgttccaccccagagccagcaaccagaccttctgctgggagcagtggcccgaccccagacacaagaaggcctacgtggtgtgcaccttcgtgttcggctacctgctgcccctgctgctgatctgcttctgctacgccaaggtgctgaaccacctgcacaagaagctgaagaacatgagcaagaagagcgaggccagcaagaagaagaccgcccagaccgtgctggtggtggtggtggtgttcggcatcagctggctgccccaccacatcatccacctgtgggccgagttcggcgtgttccccctgacccccgccagcttcctgttcagaatcaccgcccactgcctggcctacagcaacagcagcgtgaaccccatcatctacgccttcctgagcgagaacttcagaaaggcctacaagcaggtgttcaagtgccacatcagaaaggacagccacctgagcgacaccaaggagagcaagagcagaatcgacaccccccccagcaccaactgcacccacgtgtag

SEQ ID NO: 117994 - protein, 478 aa, Artificial Sequence
  derived and/or modified sequence
MAPKKKGKKGKAKGTPIVDGLAPEDMSKEQVEEHVSRIREELDREREERNYFQLERDKIHTFWEITRRQLEEKKAELRNKDREMEEAEERHQVEIKVYKQKVKHLLYEHQNNLTEMKAEGTVVMKLAQKEHRIQESVLRKDMRALKVELKEQELASEVVVKNLRLKHTEEITRMRNDFERQVREIEAKYDKKMKMLRDELDLRRKTELHEVEERKNGQIHTLMQRHEEAFTDIKNYYNDITLNNLALINSLKEQMEDMRKKEDHLEREMAEVSGQNKRLADPLQKAREEMSEMQKQLANYERDKQILLCTKARLKVREKELKDLQWEHEVLEQRFTKVQQERDELYRKFTAAIQEVQQKTGFKNLVLERKLQALSAAVEKKEVQFNEVLAASNLDPAALTLVSRKLEDVLESKNSTIKDLQYELAQVCKAHNDLLRTYEAKLLAFGIPLDNVGFKPLETAVIGQTLGQGPAGLVGTPT

SEQ ID NO: 117995 - protein, 174 aa, Artificial Sequence
  derived and/or modified sequence
MAPKKKGKKGKAKGTPIVDGLAPEDMSKEQVEEHVSRIREELDREREERNYFQLERDKIHTFWEITRRQLEEKKAELRNKDREMEEAEERHQVEIKVYKQKVKHLLYEHQNNLTEMKAEGTVVMKLAQKEHRIQESVLRKDMRALKVELKEQELASEVVVKNLRLKLRPSMIRR

SEQ ID NO: 117996 - protein, 382 aa, Artificial Sequence
  derived and/or modified sequence
MVEEHVSRIREELDREREERNYFQLERDKIHTFWEITRRQLEEKKAELRNKDREMEEAEERHQVEIKVYKQKVKHLLYEHQNNLTEMKAEGTVVMKLAQKEHRIQESVLRKDMRALKVELKEQELASEVVVKNLRLKHTEEITRMRNDFERQVREIEAKYDKKMKMLRDELDLRRKTELHEVEERKNGQIHTLMQRHEEAFTDIKNYYNDITLNNLALINSLKEQMEDMRKKEDHLEREMAEVSGQNKRLADPLQKAREEMSEMQKQLANYERDKQILLCTKARLKVREKELKDLQWEHEVLEQRFTKVQQERDELYRKFTAAIQEVQQKTGFKNLVLERKLQALSAAVEKKEVQFNEVLAASNLDPAALTLVSRKLETFFC

SEQ ID NO: 117997 - DNA, 1437 bp, Artificial Sequence
  derived and/or modified sequence
atggcgccaaagaaaaaaggtaaaaagggaaaagcgaaaggaacgcctatcgtcgatggactggctcctgaagacatgtcaaaggagcaggtggaagaacatgtgtcaaggatcagagaagagctcgacagggagagggaagagaggaattacttccaattggagcgagacaagatccacacattttgggagatcactagaaggcagcttgaagaaaagaaggccgaactgcggaacaaagatcgagaaatggaggaggccgaggagaggcaccaggtggagatcaaagtttacaagcagaaagtaaagcacctgctgtatgaacatcaaaacaatctcactgagatgaaggctgaaggcactgttgttatgaaactggctcagaaagaacaccgaatccaagagtccgtacttcgaaaagatatgcgggccttgaaggtggagctgaaggaacaggagctcgcaagcgaggtggtggtgaaaaatctgcgcctaaagcacacagaggagattactaggatgcgcaacgattttgagagacaggtgagagaaatcgaagcgaaatacgataagaagatgaaaatgctgcgggatgagctagatctgcgccggaagaccgagctgcacgaagtggaagagcgtaagaatggccaaattcacaccctgatgcagaggcatgaggaggcctttaccgatataaaaaattactataacgatattaccttaaacaacctggcactgataaatagtcttaaggaacagatggaagatatgaggaaaaaagaggaccaccttgagcgagagatggcggaagtctccggacagaataagaggctggcggacccccttcaaaaggctagggaggaaatgtctgaaatgcagaaacaactcgccaactacgagcgcgataagcaaatccttttatgtactaaggcaagattgaaagtccgggaaaaagaactgaaagacctgcagtgggagcatgaagtgctcgagcagaggttcactaaggtccaacaggaaagggacgagctgtatagaaaatttaccgctgctatccaagaagtgcagcagaaaactggcttcaagaaccttgttcttgaaaggaagctacaggccttaagtgccgcggttgaaaagaaggaagtacagttcaacgaagttctagctgcatccaacctcgatcctgctgccctgactttagtctcacgtaagctggaggatgtgcttgaatcaaagaactccacaatcaaggacctccagtatgagttagcccaggtctgcaaggcccacaacgatctgttaaggacgtacgaggcaaagctgctcgcgtttggaatccccctggacaatgtcggctttaagcccctcgaaactgcagtcataggacagacactcggacaggggccagccgggttagtgggtacacccacttag

SEQ ID NO: 117998 - DNA, 525 bp, Artificial Sequence
  derived and/or modified sequence
atggcccccaagaagaaggggaagaaagggaaagccaaagggacacctatcgtggatggcctcgcccccgaggacatgtccaaggagcaggttgaggaacacgtcagcagaataagggaagagctcgatcgcgaaagagaggaacggaactattttcagctcgaaagggataaaatacatactttttgggagataacccgccggcagctggaagagaagaaggcagaacttcgcaacaaagaccgagaaatggaagaggcggaagagagacaccaggtcgaaataaaggtgtacaagcaaaaggtgaaacacctgctctacgaacaccagaataatctcacagagatgaaggctgagggtacggtggtgatgaaattagcacaaaaggaacaccggattcaggagagtgtcctgaggaaggacatgagagcactgaaggttgaactcaaggaacaggagctagccagcgaagtggtggtaaagaacctccggctgaagctgcgaccctctatgatcaggcgatag

SEQ ID NO: 117999 - DNA, 3189 bp, Artificial Sequence
  derived and/or modified sequence
ggagtctcgcgaggatcttgtgacttatcgcggcatcgcccagcggttgccgggaaacggcgtggcttccgggggcgggcgccctggtcccggagtcgccgctgggcctgtccgctggcgtcatggcaccgaaaaagaaagggaagaaaggcaaagccaaaggcaccccgattgtcgatgggctcgctccagaggacatgagcaaggagcaggtggaggagcatgtcagccgcatccgggaggagctggaccgcgagcgggaggaacgaaactacttccagctggagcgggacaagatccacaccttctgggagatcacacggaggcagctggaggagaagaaggctgagctgcggaacaaagaccgggagatggaagaagccgaggagaggcaccaggtggagatcaaggtgtacaagcagaaagtgaagcacctgctatatgagcaccagaacaacctgacagagatgaaggctgagggcactgtagtcatgaagctggcacagaaagagcaccgcatacaggagagtgtgctgcgcaaggacatgcgggcactgaaggtggagctcaaggagcaggagctggccagtgaggtggtggtgaagaacctgcggctgaaacacaccgaggagatcaccaggatgcggaatgattttgagaggcaagttcgagaaattgaggccaagtatgataagaagatgaagatgctgagggacgaactcgacttgcggagaaagactgagctccacgaagtggaggagaggaagaatggccagatccacacgctgatgcagcgccacgaggaggccttcaccgacattaagaactactacaacgacatcaccctcaacaacctggccctcatcaactccctcaaggagcagatggaggacatgcggaagaaggaggaccacctggagagggagatggcagaggtgtctgggcagaacaagcgcctggcagaccctctccagaaggctcgggaggagatgagcgagatgcagaaacagctcgcaaactacgagagggacaagcagatcctgctttgcacaaaagcccgtttgaaagtcagggagaaagagctgaaagacctgcagtgggagcatgaagtgttagagcagcgattcaccaaggtgcagcaggagcgggacgagctctatcggaagttcaccgcagccatccaggaggtgcagcagaagacagggttcaagaacctcgtgctagaacgcaagctgcaggctctgagcgccgctgtggagaagaaggaggtgcagttcaacgaggtcctggctgcctctaacctggaccctgcagccctgacgctggtgtcccgcaagctggaggatgttcttgagtcgaagaacagcaccatcaaggacctgcagtatgagctggcccaggtctgtaaggcccataacgacctgctgcgcacgtatgaggcaaagctgctggccttcgggatccctctggacaacgtgggcttcaagcccttggaaacagctgtgatcggacagacactgggccagggccccgcgggactggtgggcaccccgacgtagctgcccccctggggggccacagcccagagaaccagcctaggaacactcgggatgacaccccttatcacaccaaggacagcaagttttttagattttatcatcagcaaatgaaagcttttcacatgttcttgccatcctctttcctggctctgtggaggagaaccacctgcaggaccctcacccatggtgtccctgtcgctcccttccctgggtgccgcacgtccagcctgtgtccaggcctactccctggtctcacctccgaccacagtcggcggcaccttctcagagtgccccgcactcacctgggggttggggcagtgccgcgctgtgctgcctgtcttcgcgccactgttgtcccaccgaatggacagctttgcaggtgctggcactaacttcattgacacctgagtcacagctgcccagtgggattctccagggggccgggacttccctaggaagtggtgagccaatgctccctgatgagcacaaagcccgctctgttgagggctgggtgggtgcagccagcgtgcgggaacgggcaggcagcctcccgctgccagtcttcgctctaactccctcggtaggtgatgtaggaccaggggcacgtggaacttctgggccttgctggtgatggttaaaacaacctgagatggagaggccaggagagagtataaggggatagcagcaaaccacctatctggccccaacacacctgagagaattcagcagcccagactgagggtctgggatggggtgaaccttccgcaccagagggacactccacagaagccacagcccagtaagtcaggcgcttctgcggcggctccagtgtggggtgaggcagtgaggttaggcccagagagctggagttggctcagatgaaaacctctgtcaacaaagaggggatgaatcacccttggcccagcctccccacaaagcctgaccctgggcaggtgagtgacgggtgtgtcctcgtagagtctattgctgcctggacacctttcttttgggagctcaaagcaagtgagctcacctacctgccaccgcccaggaccagtctgcccactgcctaaatgatgcccggccagcaggacctggcctgcagatcccagtgagtcatgagcctcagccccctccagcccactggggctctcacctccacatgtgggtagaagctttcctgccccctcttcctccagtagccctcagtgtcgaaggtgagcttgtaggtgcctgccttcatctggtccaggacagtgaccatctgggtctgtgtagctggggagaggatgaggctgcagagatggggaccagaagccccccaccccagctttcctgggtctgcatcccagtgggcctcagacactgccctgccacctgtcagacttgggtgagcagacacagtgaggctgttaggtcctgcagttccagagcagtctagggacaccactgccctgtctttaggaaatcacaacacagagaagcaaaaagggaaaaagtctcccacaatttatcccatgagcaagaaccactttatagctggcatatatttttccagattttctctatgcataagtatatttgtttaaaaacttataaagtggattatactatttgtattgttttataa

SEQ ID NO: 118000 - DNA, 1669 bp, Artificial Sequence
  derived and/or modified sequence
gacaccaccgggacctggctgcgccctcccgaccccggccgggcgtccggggctcctgcgcactcacttggcggccgcgcccgctggcgtcctcttgttctcttccaggcaccgaaaaagaaagggaagaaaggcaaagccaaaggcaccccgattgtcgatgggctcgctccagaggacatgagcaaggagcaggtggaggagcatgtcagccgcatccgggaggagctggaccgcgagcgggaggaacgaaactacttccagctggagcgggacaagatccacaccttctgggagatcacacggaggcagctggaggagaagaaggctgagctgcggaacaaagaccgggagatggaagaagccgaggagaggcaccaggtggagatcaaggtgtacaagcagaaagtgaagcacctgctatatgagcaccagaacaacctgacagagatgaaggctgagggcactgtagtcatgaagctggcacagaaagagcaccgcatacaggagagtgtgctgcgcaaggacatgcgggcactgaaggtggagctcaaggagcaggagctggccagtgaggtggtggtgaagaacctgcggctgaaacacaccgaggagatcaccaggatgcggaatgattttgagaggcaagttcgagaaattgaggccaagtatgataagaagatgaagatgctgagggacgaactcgacttgcggagaaagactgagctccacgaagtggaggagaggaagaatggccagatccacacgctgatgcagcgccacgaggaggccttcaccgacattaagaactactacaacgacatcaccctcaacaacctggccctcatcaactccctcaaggagcagatggaggacatgcggaagaaggaggaccacctggagagggagatggcagaggtgtctgggcagaacaagcgcctggcagaccctctccagaaggctcgggaggagatgagcgagatgcagaaacagctcgcaaactacgagagggacaagcagatcctgctttgcacaaaagcccgtttgaaagtcagggagaaagagctgaaagacctgcagtgggagcatgaagtgttagagcagcgattcaccaaggtgcagcaggagcgggacgagctctatcggaagttcaccgcagccatccaggaggtgcagcagaagacagggttcaagaacctcgtgctagaacgcaagctgcaggctctgagcgccgctgtggagaagaaggaggtgcagttcaacgaggtcctggctgcctctaacctggaccctgcagccctgacgctggtgtcccgcaagctggaggatgttcttgagtcgaagaacagcaccatcaaggacctgcagtatgagctggcccaggtctgtaaggcccataacgacctgctgcgcacgtatgaggcaaagctgctggccttcgggatccctctggacaacgtgggcttcaagcccttggaaacagctgtgatcggacagacactgggccagggccccgcgggactggtgggcaccccgacgtagctgcccccctggggggccacagcccagagaaccagcctaggaacactcgggatgacaccccttatcacaccaaggacagcaagttttttagattttatcatcagcaaatgaaagcttttcacatgtt

SEQ ID NO: 118001 - DNA, 1080 bp, Artificial Sequence
  derived and/or modified sequence
ctggtcccggagtcgccgctgggcctgtccgctggcgtcatggcaccgaaaaagaaagggaagaaaggcaaagccaaaggcaccccgattgtcgatgggctcgctccagaggacatgagcaaggagcaggtggaggagcatgtcagccgcatccgggaggagctggaccgcgagcgggaggaacgaaactacttccagctggagcgggacaagatccacaccttctgggagatcacacggaggcagctggaggagaagaaggctgagctgcggaacaaagaccgggagatggaagaagccgaggagaggcaccaggtggagatcaaggtgtacaagcagaaagtgaagcacctgctatatgagcaccagaacaacctgacagagatgaaggctgagggcactgtagtcatgaagctggcacagaaagagcaccgcatacaggagagtgtgctgcgcaaggacatgcgggcactgaaggtggagctcaaggagcaggagctggccagtgaggtggtggtgaagaacctgcggctgaaattgaggccaagtatgataagaagatgaagatgctgagggacgaactcgacttgcggagaaagactgagctccacgaagtggaggagaggaagaatggccagatccacacgctgatgcagcgccacgaggaggccttcaccgacattaagaactactacaacgacatcaccctcaacaacctggccctcatcaactccctcaaggtgctgtgcgtgggctgggctggggaggcacactctgcctgtcctagaatgtgggctgcagagtcctggggatccagaccccagctctccaccccaacacacccagtactttttataagattgtttgacaatgcccctctcatatccttaactgaaattcctaaataacgtaacctatctctacctattgttaaaagcagtcaggatattgccctcaccgtagtgcagagggggaagtaatgaagtgtgttctggtttgtaaaagctcagatggaaccgcagtgagggccgtgatgtggctggagtggataggtgtcatagtcactgcctgcgacaggtg

SEQ ID NO: 118002 - DNA, 1437 bp, Artificial Sequence
  derived and/or modified sequence
atggcccccaagaagaagggcaagaagggcaaggccaagggcacccccatcgtggatggcctggcccctgaggacatgagcaaggagcaggtggaggagcacgtgagccgcatccgggaggagctggaccgggagcgggaggagaggaactacttccagctggagcgggacaagatccacaccttctgggagatcacccggcggcagctggaggagaagaaggccgagctgaggaacaaggaccgggagatggaggaggccgaggagcggcaccaggtggagatcaaggtgtacaagcagaaggtgaagcacctgctgtatgagcaccagaacaacctgacagagatgaaggccgagggcaccgtggtgatgaagctggcccagaaggagcaccgcatccaggagagcgtgctgaggaaggacatgagggccctgaaggtggagctgaaggagcaggagctggccagcgaggtggtggtgaagaacctgcggctgaagcacacagaggagatcaccaggatgagaaatgactttgagcggcaggtgcgggagattgaggccaagtatgacaagaagatgaagatgctgagagatgagctggacctgcggaggaagacagagctgcacgaggtggaggagaggaagaatggccagatccacaccctgatgcagagacatgaggaggccttcacagacatcaagaactactacaatgacatcaccctgaacaacctggccctgatcaacagcctgaaggagcagatggaggacatgaggaagaaggaggaccacctggagcgggagatggccgaggtgtctggccagaacaagaggctggccgaccccctgcagaaggcccgggaggagatgtctgagatgcagaagcagctggccaactatgaaagagacaagcagatcctgctgtgcaccaaggcccggctgaaggtgcgggagaaggagctgaaggacctgcagtgggagcacgaggtgctggagcagcgcttcaccaaggtgcagcaggagagagatgagctgtacaggaagttcaccgctgccatccaggaggtgcagcagaagacaggcttcaagaacctggtgctggagaggaagctgcaggccctgtctgctgctgtggagaagaaggaggtgcagttcaatgaggtgctggccgccagcaacctggaccctgctgccctgaccctggtgtccaggaagctggaggatgtgctggagagcaagaacagcaccatcaaggacctgcagtatgagctggcccaggtgtgcaaggcccacaatgacctgctgcggacctatgaggccaagctgctggccttcggcatccccctggacaacgtgggcttcaagcccctggagacagctgtgattggccagaccctgggccagggccctgctggcctggtgggcacccccacctag

SEQ ID NO: 118003 - DNA, 525 bp, Artificial Sequence
  derived and/or modified sequence
atggcccccaagaagaagggcaagaagggcaaggccaagggcacccccatcgtggatggcctggcccctgaggacatgagcaaggagcaggtggaggagcacgtgagccgcatccgggaggagctggaccgggagcgggaggagaggaactacttccagctggagcgggacaagatccacaccttctgggagatcacccggcggcagctggaggagaagaaggccgagctgaggaacaaggaccgggagatggaggaggccgaggagcggcaccaggtggagatcaaggtgtacaagcagaaggtgaagcacctgctgtatgagcaccagaacaacctgacagagatgaaggccgagggcaccgtggtgatgaagctggcccagaaggagcaccgcatccaggagagcgtgctgaggaaggacatgagggccctgaaggtggagctgaaggagcaggagctggccagcgaggtggtggtgaagaacctgcggctgaagctgcggcccagcatgatcagaagatag

SEQ ID NO: 118004 - DNA, 1437 bp, Artificial Sequence
  derived and/or modified sequence
atggcccccaagaagaagggcaagaagggcaaggccaagggcaccccgatcgtggatggtctggcccctgaggatatgtcaaaggaacaggttgaggaacacgtgtcccgtattcgggaagagctggatagagagagggaggagcggaattacttccagctggagagagacaaaatccataccttctgggaaattacgcgtcggcaattggaagagaaaaaagccgagctgcggaacaaggatagagagatggaggaagccgaagagcgacaccaggtggaaataaaagtgtacaagcagaaggtgaaacacctgctgtatgagcaccagaacaacctcacagagatgaaggcggaaggaaccgtcgttatgaagttagcacaaaaggaacatcggatccaagagtccgtgctcaggaaggatatgcgcgccctgaaagtagaactgaaagagcaagaactggcatccgaagtggtcgtcaagaacctgcgtctaaagcataccgaggaaattacccgcatgaggaacgacttcgagcggcaggtccgtgaaattgaagcaaagtatgataaaaagatgaaaatgctgcgtgatgaactggatctccgccggaaaacagaactgcacgaggttgaagagcgcaaaaacggtcaaattcacactctgatgcagcggcacgaggaggcatttaccgacataaaaaactattataacgacataacattgaataacctggccctgatcaatagtctcaaagaacagatggaagacatgcgcaagaaggaggaccatctggaaagggaaatggccgaggtgtcaggccaaaataagcggcttgccgatccacttcaaaaagcaagggaggaaatgagcgagatgcagaaacagctcgctaactacgagagggacaaacaaatcctcctatgtacgaaggctcggttgaaggtccgcgagaaagagctgaaggacttacagtgggaacacgaggtgctggagcagcgtttcacaaaagtgcaacaggagcgagacgagttgtatcgcaagtttaccgcagcaatccaggaagtccagcagaaaactggattcaagaatctggtcctcgaacgtaaactgcaggcattgagtgcagccgtggagaaaaaggaagtgcaattcaacgaagtgctcgccgcaagtaatctggaccccgctgccctgactctcgtcagtagaaagctcgaggacgtgttggagtctaaaaatagtaccattaaggacctccagtacgagttagcacaagtgtgcaaagcccataacgacctgcttaggacatacgaggcaaagctactcgcctttggtattcccctggacaatgtcggcttcaagccgcttgagactgcggtcatcgggcagacactcggtcagggcccagccggtctggtgggaactcctacatag

SEQ ID NO: 118005 - DNA, 525 bp, Artificial Sequence
  derived and/or modified sequence
atggcccccaagaagaagggcaagaagggcaaggccaagggcacccccatcgtggatggacttgccccagaagatatgtccaaggaacaggtggaggagcacgtttctcgaattcgcgaggaactcgaccgcgaacgagaagagcgcaactattttcagttggagcgcgacaaaatccatacattctgggaaatcacacgcagacagcttgaagaaaaaaaggccgagctcagaaataaagaccgcgaaatggaagaagcggaagagagacatcaagtggaaatcaaggtttacaagcaaaaggttaagcacttactgtacgagcaccaaaataatttaaccgaaatgaaagctgaggggactgtcgtgatgaagttagcccagaaggagcatagaatccaggagagcgtgctcagaaaggatatgcgtgctctcaaggtcgagctcaaggaacaagagctggcgtcggaggtggtggttaaaaatctgagactgaaattgcggcccagcatgatccggagatag

SEQ ID NO: 118006 - DNA, 1437 bp, Artificial Sequence
  derived and/or modified sequence
atggcgcctaagaaaaaggggaagaagggaaaagccaagggcaccccaattgtggatgggctggccccagaggacatgtccaaagagcaggtcgaggaacacgtctccaggatcagggaagaactggaccgcgaaagagaagagcgcaactacttccagttggaaagggacaagatccatacattttgggagatcactaggcggcaactggaggagaagaaggccgaactaaggaacaaggaccgggagatggaagaagctgaagagcggcaccaagtcgaaattaaggtctataagcagaaggtcaagcacctgctgtatgagcatcagaacaatctgaccgagatgaaggctgaggggaccgtggtgatgaagttagcgcaaaaggaacaccgaatccaagagagcgtccttaggaaggatatgagggcactgaaagtcgagctcaaggaacaggagctggcttctgaggttgtcgttaaaaacctgcgattaaaacacacggaggagatcacacgtatgaggaatgacttcgaaagacaggtgagggaaattgaggctaaatacgacaagaagatgaagatgctgcgggatgagctggatttgcgcaggaagacggagttgcatgaagtcgaagaaagaaaaaatggacaaatacataccctgatgcaaagacatgaagaggcctttactgatattaagaattactataatgatatcacccttaataatctcgccctcatcaactcattgaaggagcaaatggaagacatgcggaaaaaagaagatcacctcgaaagagagatggccgaggtcagcggtcaaaacaaacggcttgctgaccctctgcagaaagcaagggaggagatgtccgagatgcagaagcagcttgccaactacgaacgagacaagcagatattgctgtgtaccaaagcacggctgaaagttcgagagaaagagcttaaggacctacagtgggaacatgaagtcttggaacagagatttaccaaagttcaacaggagcgcgacgaactttacaggaaatttacagcagcaatacaggaggttcaacaaaagaccggcttcaaaaatttggtgctagaaaggaaacttcaagcactgtcggcagccgttgagaagaaagaggtccaattcaacgaggtcctagcagcctcgaacctggatcccgctgccctgacactagtttcacgcaaattggaagatgtgctggagagcaagaactccactatcaaggatctccagtatgaactggcccaggtttgcaaggcccataacgacctcctaaggacttacgaagcgaaactgctggcattcggaatccctctggataacgttgggttcaaaccactggagactgccgtgataggccagacactggggcagggaccagccggtctggtgggaacacccacttag

SEQ ID NO: 118007 - DNA, 525 bp, Artificial Sequence
  derived and/or modified sequence
atggcgccaaaaaagaaaggcaaaaagggtaaggcaaagggaactcccatagtcgatggcctggcacctgaagacatgtcaaaagaacaggttgaagagcacgtatcgagaattcgcgaagagttggaccgagaacgcgaggaacgcaattatttccagttggaacgagacaaaatacacactttttgggagatcacgcgccgtcaattggaagagaagaaggctgagcttcgaaacaaggatagagagatggaggaagcggaggaacggcaccaggtcgaaatcaaggtttacaaacagaaagtcaaacaccttctttacgagcaccaaaataatcttacagagatgaaggcagagggtaccgttgtgatgaagctggcacagaaggagcacaggatacaagagtccgtactgcgaaaagatatgagggctctaaaggtggagttgaaggaacaggagctcgctagtgaggtcgttgtcaagaacttgcgtctaaaacttaggccctctatgatcaggcgctag

SEQ ID NO: 118008 - DNA, 1437 bp, Artificial Sequence
  derived and/or modified sequence
atggcccccaagaagaagggcaagaagggcaaggccaagggcacccccatcgtggacggcctggcccccgaggacatgagcaaggagcaggtggaggagcacgtgagcagaatcagagaggagctggacagagagagagaggagagaaactacttccagctggagagagacaagatccacaccttctgggagatcaccagaagacagctggaggagaagaaggccgagctgagaaacaaggacagagagatggaggaggccgaggagagacaccaggtggagatcaaggtgtacaagcagaaggtgaagcacctgctgtacgagcaccagaacaacctgaccgagatgaaggccgagggcaccgtggtgatgaagctggcccagaaggagcacagaatccaggagagcgtgctgagaaaggacatgagagccctgaaggtggagctgaaggagcaggagctggccagcgaggtggtggtgaagaacctgagactgaagcacaccgaggagatcaccagaatgagaaacgacttcgagagacaggtgagagagatcgaggccaagtacgacaagaagatgaagatgctgagagacgagctggacctgagaagaaagaccgagctgcacgaggtggaggagagaaagaacggccagatccacaccctgatgcagagacacgaggaggccttcaccgacatcaagaactactacaacgacatcaccctgaacaacctggccctgatcaacagcctgaaggagcagatggaggacatgagaaagaaggaggaccacctggagagagagatggccgaggtgagcggccagaacaagagactggccgaccccctgcagaaggccagagaggagatgagcgagatgcagaagcagctggccaactacgagagagacaagcagatcctgctgtgcaccaaggccagactgaaggtgagagagaaggagctgaaggacctgcagtgggagcacgaggtgctggagcagagattcaccaaggtgcagcaggagagagacgagctgtacagaaagttcaccgccgccatccaggaggtgcagcagaagaccggcttcaagaacctggtgctggagagaaagctgcaggccctgagcgccgccgtggagaagaaggaggtgcagttcaacgaggtgctggccgccagcaacctggaccccgccgccctgaccctggtgagcagaaagctggaggacgtgctggagagcaagaacagcaccatcaaggacctgcagtacgagctggcccaggtgtgcaaggcccacaacgacctgctgagaacctacgaggccaagctgctggccttcggcatccccctggacaacgtgggcttcaagcccctggagaccgccgtgatcggccagaccctgggccagggccccgccggcctggtgggcacccccacctag

SEQ ID NO: 118009 - DNA, 525 bp, Artificial Sequence
  derived and/or modified sequence
atggcccccaagaagaagggcaagaagggcaaggccaagggcacccccatcgtggacggcctggcccccgaggacatgagcaaggagcaggtggaggagcacgtgagcagaatcagagaggagctggacagagagagagaggagagaaactacttccagctggagagagacaagatccacaccttctgggagatcaccagaagacagctggaggagaagaaggccgagctgagaaacaaggacagagagatggaggaggccgaggagagacaccaggtggagatcaaggtgtacaagcagaaggtgaagcacctgctgtacgagcaccagaacaacctgaccgagatgaaggccgagggcaccgtggtgatgaagctggcccagaaggagcacagaatccaggagagcgtgctgagaaaggacatgagagccctgaaggtggagctgaaggagcaggagctggccagcgaggtggtggtgaagaacctgagactgaagctgagacccagcatgatcagaagatag

SEQ ID NO: 118010 - protein, 423 aa, Artificial Sequence
  derived and/or modified sequence
MLRVRCLRGGSRGAEAVHYIGSRLGRTLTGWVQRTFQSTQAATASSRNSCAADDKATEPLPKDCPVSSYNEWDPLEEVIVGRAENACVPPFTIEVKANTYEKYWPFYQKQGGHYFPKDHLKKAVAEIEEMCNILKTEGVTVRRPDPIDWSLKYKTPDFESTGLYSAMPRDILIVVGNEIIEAPMAWRSRFFEYRAYRSIIKDYFHRGAKWTTAPKPTMADELYNQDYPIHSVEDRHKLAAQGKFVTTEFEPCFDAADFIRAGRDIFAQRSQVTNYLGIEWMRRHLAPDYRVHIISFKDPNPMHIDATFNIIGPGIVLSNPDRPCHQIDLFKKAGWTIITPPTPIIPDDHPLWMSSKWLSMNVLMLDEKRVMVDANEVPIQKMFEKLGITTIKVNIRNANSLGGGFHCWTCDVRRRGTLQSYLD

SEQ ID NO: 118011 - protein, 391 aa, Artificial Sequence
  derived and/or modified sequence
MLRVRCLRGGSRGAEAVHYIGSRLGRTLTGWVQRTFQSTQAATASSRNSCAADDKATEPLPKDCPVSSYNEWDPLEEVIVGRAENACVPPFTIEVKANTYEKYWPFYQKQGGHYFPKDHLKKAVAEIEEMCNILKTEGVTVRRPDPIDWSLKYKTPDFESTGLYSAMPRDILIVVGNEIIEAPMAWRSRFFEYRAYRSIIKDYFHRGAKWTTAPKPTMADELYNQDYPIHSVEDRHKLAAQGKFVTTEFEPCFDAADFIRAGRDIFAQRSQVTNYLGIEWMRRHLAPDYRVHIISFKDPNPMHIDATFNIIGPGIVLSNPDRPCHQIDLFKKAGWTIITPPTPIIPDDHPLWMSSKWLSMNVLMLDEKRVMVDANEVPIQKMFEKLGMYNK

SEQ ID NO: 118012 - DNA, 1272 bp, Artificial Sequence
  derived and/or modified sequence
atgctacgcgtccgctgtctccgaggcggcagtagaggcgccgaagctgtccactacatcggttccaggctggggaggactctcacaggatgggttcagagaaccttccagagtacccaggcagctaccgctagcagtaggaatagttgcgcagcggatgataaggcaaccgagcctctccccaaggactgcccagtgagctcatacaatgaatgggatcctctggaggaagtcatcgtcgggcgcgctgagaatgcttgtgttcccccatttacaattgaggtgaaagccaacacgtacgagaagtactggcccttttatcagaagcagggaggccattatttccctaaggatcatctgaagaaggccgtggccgaaatagaagaaatgtgtaatatccttaagacagaaggcgttactgttcggaggcccgacccaattgattggagtctcaagtacaaaacacccgacttcgagtccaccggtctgtacagcgccatgccccgggatatcctgatcgttgtcggtaacgaaattattgaggcccctatggcgtggcgctcccgcttttttgaataccgggcttacaggtccatcattaaagattattttcatcgcggggcgaagtggactaccgctccaaagcctaccatggccgacgagctgtataaccaggactaccctattcacagcgtggaagatagacacaagctggccgctcaggggaaattcgtgaccaccgagttcgaaccatgcttcgatgccgctgacttcatcagagccggaagagacatttttgcgcaacgctctcaggttactaactatctcggaatcgaatggatgcgtagacacctagcccctgactatcgggtccacattataagcttcaaagatcccaaccccatgcacatcgatgcgacatttaatataattgggcctgggattgtactgtcaaaccctgaccgcccctgccaccaaatcgatctgtttaaaaaggccggctggaccatcataaccccaccaacaccgatcatccctgacgatcaccctctttggatgagcagcaagtggttgtcaatgaacgtgctgatgctggatgaaaagcgggtcatggtcgacgcaaatgaagttccaattcagaagatgttcgaaaagctgggcatcacaactatcaaggtgaacattcggaacgcaaactcgcttggaggcggtttccactgctggacctgcgatgtgagaaggcggggaaccctgcagagttatctcgactag

SEQ ID NO: 118013 - DNA, 1176 bp, Artificial Sequence
  derived and/or modified sequence
atgctccgtgtcaggtgcctgagaggcggcagccgcggggccgaggccgtacactacattggcagcaggctcggccgcacgttaactggctgggtgcagcggacatttcagagcactcaggccgccacagcctcaagcagaaactcgtgtgccgccgacgataaggccacagaacctctgcccaaggattgcccagtaagcagttacaatgaatgggatccactggaagaggtcatcgtgggtcgagcggaaaacgcttgcgtgcccccatttaccattgaggttaaagccaatacctacgagaaatactggcctttttaccagaagcagggcggacactactttccgaaagatcacctgaaaaaggcagtcgctgagattgaggagatgtgtaatatcctgaaaactgaaggcgtgaccgtgagaagacctgacccaatcgactggtctctgaaatataaaacaccggacttcgaatcaacaggactgtattccgctatgcctcgggacattctgattgtcgttggtaatgaaatcatagaggcccctatggcctggcgaagtagatttttcgagtatagagcatatcgctctattattaaggattatttccatcgcggtgctaaatggactacagccccgaagccgaccatggctgatgagctctataatcaggattacccaatccattcagtggaggatcgacacaaactcgcagcgcaaggtaagtttgtaacaacagagttcgagccttgttttgatgcagccgatttcattcgcgcaggcagagatatctttgcacagagaagtcaggtgacaaactacctgggcatcgaatggatgagacggcacctggctcctgattaccgtgtacatatcatatccttcaaagacccaaatccaatgcatattgacgctacgttcaacattattggaccaggcatagtcctctccaatcccgaccgtccgtgtcatcaaatcgatctttttaaaaaagcgggctggacgatcatcaccccgcccacacccattattccagatgatcaccccctgtggatgtcatcgaagtggctgagtatgaatgtgcttatgctcgatgaaaaacgtgttatggtggacgctaacgaagtgcctatccagaaaatgttcgagaaactggggatgtataataagtag

SEQ ID NO: 118014 - DNA, 2597 bp, Artificial Sequence
  derived and/or modified sequence
aacgggccttcttgcgacgctcgggtctgggtccgggtccggacgtgcaacagaagccgtcagtggccccgctggctaaaaaagggcaagcatcggaggctcgagccagcggccgcggcgcttcccgacagttcctaattcggggcgctacgccggccccaccacctgttcccggcagccaatggggccgcggggggcggccggggcggagcgcggctacaaaaggcctcgggccccgcgcgcccgcccaccccgctccgggcgcgctctcgggaaggcttggaccgacgcggcccagaggccaggaacattccgcgcgtggaccagccgggccagggcgatgctgcgggtgcggtgtctgcgcggcgggagccgcggcgccgaggcggtgcactacatcggatctcggcttggacgaaccttgacaggatgggtgcagcgaactttccagagcacccaggcagctacggcttcctcccggaactcctgtgcagctgacgacaaagccactgagcctctgcccaaggactgccctgtctcttcttacaacgaatgggaccccttagaggaagtgatagtgggcagagcagaaaacgcctgtgttccaccgttcaccatcgaggtgaaggccaacacatatgaaaagtactggccattttaccagaagcaaggagggcattattttcccaaagatcatttgaaaaaggctgttgctgaaattgaagaaatgtgcaatattttaaaaacggaaggagtgacagtaaggaggcctgaccccattgactggtcattgaagtataaaactcctgattttgagtctacgggtttatacagtgcaatgcctcgagacatcctgatagttgtgggcaatgagattatcgaggctcccatggcatggcgttcacgcttctttgagtaccgagcgtacaggtcaattatcaaagactacttccaccgtggcgccaagtggacaacagctcctaagcccacaatggctgatgagctttataaccaggattatcccatccactctgtagaagacagacacaaattggctgctcagggaaaatttgtgacaactgagtttgagccatgctttgatgctgctgacttcattcgagctggaagagatatttttgcacagagaagccaggttacaaactacctaggcattgaatggatgcgtaggcatcttgctccagactacagagtgcatatcatctcctttaaagatcccaatcccatgcatattgatgctaccttcaacatcattggacctggtattgtgctttccaaccctgaccgaccatgtcaccagattgatcttttcaagaaagcaggatggactatcattactcctccaacaccaatcatcccagacgatcatccactctggatgtcatccaaatggctttccatgaatgtcttaatgctagatgaaaaacgtgttatggtggatgccaatgaagttccaattcaaaagatgtttgaaaagctgggtatcactaccattaaagttaacattcgtaatgccaattccctgggaggaggcttccattgctggacctgcgatgtccggcgccgaggcaccttacagtcctacttggactgaacaggcctgatggagcttgtggctggcctcagatacacctaagaagcttaggggcaaggttcattctcctgctttaaaaagtgcatgaactgtagtgctttaaacaatcatctccttaacaggggtcgtaagcctggtttgcttctattacttttctttgacataaagaaaataacttctgctaggtattactctctactcctaaagttatttactatttggcttcaagtataaaattttggtgaatgtgtaccaagaaaaaattagtcacctgagtaacttggccactaataattaaccatctacctctgtttttaattttctttccaaaaggcagcttgaaatgttggtcctaatcttaattttttttcctcttctatagacttgagaatgtttttctctaaatgagagaaagacttagaatgtacacagatccaaaatagaatcagattatctctttttttctaaaggagagaaagacttagaacatacacagatcctaagtagaaccaggtaattgtctctttttctaataaggaatttgggtaatttttaattttttgttttttaaaaaataacctagactatgcaaaacatcaaagtgaattttccatgaatgtttttaatattctcatctcaacattgtgatatatgctactaaaaaccttttcatatacatcttacctcatttcaagtgaattattttaatctttttctctctttccaaaaatttaggaatgtttagtgtaattggatttcgctatcagttcccatccttaagttttgatattcaatatctgatagatacactgcatctttggtcatctaagatttgtttacaaatgtgcaaattatttagagcatagactttataagcattaaaaaaaactaatggaggtaaaacctaaatgcgatgtgaaataattttagtgttgataccgtatgtgtatttttattctaataaacttttgtgttccagattgaa

SEQ ID NO: 118015 - DNA, 1522 bp, Artificial Sequence
  derived and/or modified sequence
cccaccccgctccgggcgcgctctcgggaaggcttggaccgacgcggcccagaggccaggaacattccgcgcgtggaccagccgggccagggcgatgctgcgggtgcggtgtctgcgcggcgggagccgcggcgccgaggcggtgcactacatcggatctcggcttggacgaaccttgacaggatgggtgcagcgaactttccagagcacccaggcagctacggcttcctcccggaactcctgtgcagctgacgacaaagccactgagcctctgcccaaggactgccctgtctcttcttacaacgaatgggaccccttagaggaagtgatagtgggcagagcagaaaacgcctgtgttccaccgttcaccatcgaggtgaaggccaacacatatgaaaagtactggccattttaccagaagcaaggagggcattattttcccaaagatcatttgaaaaaggctgttgctgaaattgaagaaatgtgcaatattttaaaaacggaaggagtgacagtaaggaggcctgaccccattgactggtcattgaagtataaaactcctgattttgagtctacgggtttatacagtgcaatgcctcgagacatcctgatagttgtgggcaatgagattatcgaggctcccatggcatggcgttcacgcttctttgagtaccgagcgtacaggtcaattatcaaagactacttccaccgtggcgccaagtggacaacagctcctaagcccacaatggctgatgagctttataaccaggattatcccatccactctgtagaagacagacacaaattggctgctcagggaaaatttgtgacaactgagtttgagccatgctttgatgctgctgacttcattcgagctggaagagatatttttgcacagagaagccaggttacaaactacctaggcattgaatggatgcgtaggcatcttgctccagactacagagtgcatatcatctcctttaaagatcccaatcccatgcatattgatgctaccttcaacatcattggacctggtattgtgctttccaaccctgaccgaccatgtcaccagattgatcttttcaagaaagcaggatggactatcattactcctccaacaccaatcatcccagacgatcatccactctggatgtcatccaaatggctttccatgaatgtcttaatgctagatgaaaaacgtgttatggtggatgccaatgaagttccaattcaaaagatgtttgaaaagctgggtatgtacaacaaatgaaacatgttgtcatacatgaaaacgttaaatgagaagaactaaagaaatgacatgctaggtttgataaatggtttgtctaattcaattttgattccttttagaggcaccaagttattatttcacagaaagtcagtatttttattttcaacacacgtagccccaacaagttggagatgcatcctgagctcctgagacatccccttaacaataagtttataaatcttatatgacttagccaacgttttggtgccc

SEQ ID NO: 118016 - DNA, 1272 bp, Artificial Sequence
  derived and/or modified sequence
atgctgcgggtgcgctgcctgcggggcggcagcagaggagctgaggccgtgcactacatcggcagccggctgggccgcaccctgaccggctgggtgcagaggaccttccagagcacccaggccgccacagccagcagcaggaacagctgtgccgcagatgacaaggccacagagcccctgcccaaggactgccctgtgagcagctacaatgagtgggaccccctggaggaggtgattgtgggccgggcagaaaatgcctgtgtgccccccttcaccatcgaggtgaaggccaacacctatgagaagtactggcccttctaccagaagcagggcggccactacttccccaaggaccacctgaagaaggctgtggccgagattgaggagatgtgcaacatcctgaagacagagggcgtgacagtgcggcggccagaccccatcgactggagcctgaagtacaagaccccagactttgagagcacaggcctgtacagcgccatgccccgggacatcctgattgtggtgggcaatgagatcatcgaggcccccatggcctggaggagccgcttctttgagtaccgggcctaccgcagcatcatcaaggactacttccacagaggagccaagtggaccacagcccccaagcccaccatggctgatgagctgtacaaccaggactaccccatccacagcgtggaggacagacacaagctggccgcccagggcaagtttgtgaccacagaatttgagccctgctttgatgctgctgacttcatccgggccggccgggacatctttgcccagaggagccaggtgaccaactacctgggcatcgagtggatgaggaggcacctggccccagactacagagtgcacatcatctccttcaaggaccccaaccccatgcacattgatgccaccttcaacatcatcggccctggcatcgtgctgagcaacccagaccggccctgccaccagattgacctcttcaagaaggccggctggaccatcatcaccccacccacccccatcatcccagatgaccaccccctgtggatgagcagcaagtggctgtccatgaatgtgctgatgctggatgagaagagggtgatggtggatgccaatgaggtgcccatccagaagatgtttgagaagctgggcatcaccaccatcaaggtgaacatcagaaatgccaacagcctgggcggcggcttccactgctggacctgtgatgtgagaagaagaggcaccctgcagagctacctggactag

SEQ ID NO: 118017 - DNA, 1176 bp, Artificial Sequence
  derived and/or modified sequence
atgctgcgggtgcgctgcctgcggggcggcagcagaggagctgaggccgtgcactacatcggcagccggctgggccgcaccctgaccggctgggtgcagaggaccttccagagcacccaggccgccacagccagcagcaggaacagctgtgccgcagatgacaaggccacagagcccctgcccaaggactgccctgtgagcagctacaatgagtgggaccccctggaggaggtgattgtgggccgggcagaaaatgcctgtgtgccccccttcaccatcgaggtgaaggccaacacctatgagaagtactggcccttctaccagaagcagggcggccactacttccccaaggaccacctgaagaaggctgtggccgagattgaggagatgtgcaacatcctgaagacagagggcgtgacagtgcggcggccagaccccatcgactggagcctgaagtacaagaccccagactttgagagcacaggcctgtacagcgccatgccccgggacatcctgattgtggtgggcaatgagatcatcgaggcccccatggcctggaggagccgcttctttgagtaccgggcctaccgcagcatcatcaaggactacttccacagaggagccaagtggaccacagcccccaagcccaccatggctgatgagctgtacaaccaggactaccccatccacagcgtggaggacagacacaagctggccgcccagggcaagtttgtgaccacagaatttgagccctgctttgatgctgctgacttcatccgggccggccgggacatctttgcccagaggagccaggtgaccaactacctgggcatcgagtggatgaggaggcacctggccccagactacagagtgcacatcatctccttcaaggaccccaaccccatgcacattgatgccaccttcaacatcatcggccctggcatcgtgctgagcaacccagaccggccctgccaccagattgacctcttcaagaaggccggctggaccatcatcaccccacccacccccatcatcccagatgaccaccccctgtggatgagcagcaagtggctgtccatgaatgtgctgatgctggatgagaagagggtgatggtggatgccaatgaggtgcccatccagaagatgtttgagaagctgggcatgtacaacaagtag

SEQ ID NO: 118018 - DNA, 1272 bp, Artificial Sequence
  derived and/or modified sequence
atgctgcgggtgcggtgcctgcggggcggcagccggggcgccgaggccgtccattacattggatctaggctaggcagaacactgacggggtgggttcaacggacttttcagagcacacaggctgcaaccgcaagttctcgtaactcttgcgccgctgacgacaaagcaacggaaccactgccaaaagactgtccggtgagcagttacaatgaatgggatccacttgaggaagttattgtcggccgggctgagaacgcatgtgttcctccatttacgatcgaagttaaggcaaatacttatgaaaaatactggcccttctaccagaagcagggaggacattactttcccaaggatcacttgaaaaaagctgtcgctgagatcgaagaaatgtgcaacatactgaagactgagggcgtgacagttagaagacccgatccgatcgattggagcttgaaatacaagactccagacttcgaaagtacagggctgtatagtgccatgccccgagacatcctgatcgtggtgggaaacgaaatcattgaggcccctatggcctggcgcagcaggttctttgagtacagggcttatagatctataatcaaagattacttccatcggggtgccaagtggacgacggcgccgaaacctactatggctgatgaactgtacaatcaggactacccaatccactctgtggaggacaggcacaagcttgctgcacagggtaagtttgtgaccactgaatttgaaccgtgtttcgatgccgccgattttattcgcgccggtcgagacatcttcgctcagcggagccaagtcactaattacctgggcatcgaatggatgcggcgccacttggcccccgactacagggtgcacatcatctccttcaaggacccaaacccaatgcatatcgacgctacgtttaacataattggacccggcatcgttctttctaacccagatcgcccgtgtcaccagatagacctcttcaagaaagccgggtggaccattattacacctccaacccctattattcccgatgatcaccccctgtggatgtcctcaaagtggctgtcaatgaacgtcctgatgttggatgagaaacgcgtcatggtcgacgcaaacgaggtccctatacaaaaaatgttcgaaaagctgggcatcacgaccataaaagtgaacatcagaaatgcaaattctttggggggcggatttcactgttggacgtgcgacgtgcgcaggcggggtactctgcagagctatcttgactag

SEQ ID NO: 118019 - DNA, 1176 bp, Artificial Sequence
  derived and/or modified sequence
atgctgcgggtgcggtgcctgcggggcggcagccggggcgccgaggctgttcactatatcgggtccaggctgggacgcacgttgacaggctgggttcaacgtactttccagagtacacaggccgccacagcctcctccagaaattcctgcgccgctgatgataaagcgaccgagcctctgcccaaggactgtccggtatcaagttacaacgagtgggatccattggaggaggtcatcgttggcagggctgagaacgcctgtgttccaccatttactatcgaagtcaaagccaatacctacgagaagtactggcctttctaccagaagcaaggtggacactactttcccaaagaccatcttaaaaaggccgtggccgagatagaggaaatgtgtaacattctgaagactgagggggtgaccgtaagacgacccgatccgattgactggtcccttaagtataagaccccggacttcgagtcaacgggtctgtattccgcaatgcccagagatatactgatcgtcgtggggaatgagatcatcgaagctccaatggcctggcggtccaggttcttcgaatatcgagcctacaggagtataatcaaagactacttccatcgtggggccaagtggacaaccgctccaaagcctactatggccgacgaactctacaaccaggattatccaatccacagtgttgaagaccgtcacaagttggctgcacagggaaagttcgtgaccaccgagtttgaaccatgcttcgatgctgccgactttataagagctggaagggacattttcgcgcagagatcacaggtgaccaactaccttggcatcgagtggatgagaaggcatctcgctccagactatcgcgtgcacatcattagctttaaggatcccaatccaatgcatatagacgctacgtttaacattatcgggccaggaatagtcctctcgaatcccgatcggccatgtcatcagattgatctcttcaagaaagccggatggaccatcataacgcctcccactcctatcatccctgacgaccaccccttgtggatgtcctccaagtggctttccatgaacgttctcatgctggatgagaaacgagttatggtcgatgccaatgaagtgcccatccagaagatgtttgaaaagctcggcatgtataataagtag

SEQ ID NO: 118020 - DNA, 1272 bp, Artificial Sequence
  derived and/or modified sequence
atgctgagggtgcgctgtctacggggtggatcaaggggtgcagaagctgttcactatattgggtcgcggctggggcgtactctgacaggatgggtgcagaggacttttcagagcacgcaagcagcgaccgctagttctagaaacagctgcgcagccgacgacaaggctacggagccgctgcccaaggattgcccagtaagtagctacaatgagtgggatcccctggaggaagtgatcgtgggtcgcgcagagaacgcctgcgtgccaccattcaccatcgaagtgaaggcaaatacctatgaaaaatactggccattctaccagaagcaaggcggacactattttcctaaggaccacttaaagaaggccgtggctgagatcgaagagatgtgcaacattcttaagacagagggggtgactgtgcgcagaccagaccccatcgactggagcttaaagtacaaaacgccagatttcgagtctaccgggctgtacagcgccatgcctagggatattctgatcgtcgtggggaacgagattattgaagcccctatggcatggaggtcaaggtttttcgagtaccgcgcttaccggtctatcataaaggattactttcaccgcggagccaagtggacaacggctccaaagcctacaatggcagatgagctttacaaccaggattacccaatccattccgtggaagaccggcacaagctggcggctcaaggcaaattcgtgaccacagaatttgagccttgctttgatgcagcggatttcatcagggctggcagggatatctttgcccagagaagccaggttactaattatcttgggatcgaatggatgcgccgacaccttgccccagactatcgcgttcacatcatctcctttaaggaccccaatcctatgcacattgacgccacttttaacataatcggtcccggaatagtactctcgaatccagaccgcccatgccaccaaatcgacctctttaaaaaggctggctggaccattataacccctcctaccccaatcattcctgacgaccaccctctgtggatgtcctccaagtggctgtctatgaatgtgcttatgctggatgagaagcgggtgatggtggatgccaacgaggtgccaatccagaaaatgtttgagaagctgggaatcacgactatcaaggtgaacataaggaacgcaaacagtttagggggaggctttcactgttggacttgtgacgttagacggaggggcacgctgcagagctatctcgattag

SEQ ID NO: 118021 - DNA, 1176 bp, Artificial Sequence
  derived and/or modified sequence
atgctgcgcgtgaggtgtctgaggggtggatcccgaggggctgaggcggtgcactatatcgggtcgagattgggacggaccctgactggatgggtgcaaagaacgttccaaagcactcaagccgcaacagcctcatcgcgcaactcatgcgctgctgacgataaagctaccgaaccattgcccaaagactgccccgtcagttcatacaacgaatgggatccactcgaagaagtaatcgtcggcagggccgaaaacgcttgtgtgcccccatttaccattgaggtaaaagcaaacacctatgagaaatactggccattctatcagaagcagggaggtcactattttcctaaagatcatctgaagaaagccgtcgccgagattgaagagatgtgcaatattctgaaaactgaaggagtaacggttaggcggccagaccctattgactggtcccttaagtataagacccccgacttcgagtctactggtctgtacagcgccatgcccagggacatcctaatcgtggtgggaaacgaaataatagaagccccaatggcatggagatctcgtttcttcgagtaccgggcatacagaagtattataaaggactatttccacagaggtgcgaagtggacaaccgcccctaaaccgactatggcggatgaactgtacaaccaagattatcccatccactctgtggaggatcgccacaagcttgccgcacaaggtaaatttgttacaacagagtttgaaccttgcttcgacgctgccgattttatccgagccggacgggatatctttgctcagagatcgcaggtaactaactatctcggaatagaatggatgcgtcgacacctggctcctgattatcgggtccacattataagttttaaggatcccaacccgatgcacattgacgccacctttaacattattggccctggaattgtgctctctaaccctgacaggccgtgccatcagatcgacctcttcaagaaagcaggatggacaattattactcctcccacgccgatcatcccggacgatcaccctctttggatgagtagcaagtggctgtcaatgaatgtgctgatgctggatgagaagcgagttatggtagatgcaaatgaggtgccaattcagaagatgtttgagaaattgggaatgtacaacaagtag

SEQ ID NO: 118022 - DNA, 1272 bp, Artificial Sequence
  derived and/or modified sequence
atgctgagagtgagatgcctgagaggcggcagcagaggcgccgaggccgtgcactacatcggcagcagactgggcagaaccctgaccggctgggtgcagagaaccttccagagcacccaggccgccaccgccagcagcagaaacagctgcgccgccgacgacaaggccaccgagcccctgcccaaggactgccccgtgagcagctacaacgagtgggaccccctggaggaggtgatcgtgggcagagccgagaacgcctgcgtgccccccttcaccatcgaggtgaaggccaacacctacgagaagtactggcccttctaccagaagcagggcggccactacttccccaaggaccacctgaagaaggccgtggccgagatcgaggagatgtgcaacatcctgaagaccgagggcgtgaccgtgagaagacccgaccccatcgactggagcctgaagtacaagacccccgacttcgagagcaccggcctgtacagcgccatgcccagagacatcctgatcgtggtgggcaacgagatcatcgaggcccccatggcctggagaagcagattcttcgagtacagagcctacagaagcatcatcaaggactacttccacagaggcgccaagtggaccaccgcccccaagcccaccatggccgacgagctgtacaaccaggactaccccatccacagcgtggaggacagacacaagctggccgcccagggcaagttcgtgaccaccgagttcgagccctgcttcgacgccgccgacttcatcagagccggcagagacatcttcgcccagagaagccaggtgaccaactacctgggcatcgagtggatgagaagacacctggcccccgactacagagtgcacatcatcagcttcaaggaccccaaccccatgcacatcgacgccaccttcaacatcatcggccccggcatcgtgctgagcaaccccgacagaccctgccaccagatcgacctgttcaagaaggccggctggaccatcatcaccccccccacccccatcatccccgacgaccaccccctgtggatgagcagcaagtggctgagcatgaacgtgctgatgctggacgagaagagagtgatggtggacgccaacgaggtgcccatccagaagatgttcgagaagctgggcatcaccaccatcaaggtgaacatcagaaacgccaacagcctgggcggcggcttccactgctggacctgcgacgtgagaagaagaggcaccctgcagagctacctggactag

SEQ ID NO: 118023 - DNA, 1176 bp, Artificial Sequence
  derived and/or modified sequence
atgctgagagtgagatgcctgagaggcggcagcagaggcgccgaggccgtgcactacatcggcagcagactgggcagaaccctgaccggctgggtgcagagaaccttccagagcacccaggccgccaccgccagcagcagaaacagctgcgccgccgacgacaaggccaccgagcccctgcccaaggactgccccgtgagcagctacaacgagtgggaccccctggaggaggtgatcgtgggcagagccgagaacgcctgcgtgccccccttcaccatcgaggtgaaggccaacacctacgagaagtactggcccttctaccagaagcagggcggccactacttccccaaggaccacctgaagaaggccgtggccgagatcgaggagatgtgcaacatcctgaagaccgagggcgtgaccgtgagaagacccgaccccatcgactggagcctgaagtacaagacccccgacttcgagagcaccggcctgtacagcgccatgcccagagacatcctgatcgtggtgggcaacgagatcatcgaggcccccatggcctggagaagcagattcttcgagtacagagcctacagaagcatcatcaaggactacttccacagaggcgccaagtggaccaccgcccccaagcccaccatggccgacgagctgtacaaccaggactaccccatccacagcgtggaggacagacacaagctggccgcccagggcaagttcgtgaccaccgagttcgagccctgcttcgacgccgccgacttcatcagagccggcagagacatcttcgcccagagaagccaggtgaccaactacctgggcatcgagtggatgagaagacacctggcccccgactacagagtgcacatcatcagcttcaaggaccccaaccccatgcacatcgacgccaccttcaacatcatcggccccggcatcgtgctgagcaaccccgacagaccctgccaccagatcgacctgttcaagaaggccggctggaccatcatcaccccccccacccccatcatccccgacgaccaccccctgtggatgagcagcaagtggctgagcatgaacgtgctgatgctggacgagaagagagtgatggtggacgccaacgaggtgcccatccagaagatgttcgagaagctgggcatgtacaacaagtag

SEQ ID NO: 118024 - protein, 286 aa, Artificial Sequence
  derived and/or modified sequence
MAARVLRARGAAWAGGLLQRAAPCSLLPRLRTWTSSSNRSREDSWLKSLFVRKVDPRKDAHSNLLAKKETSNLYKLQFHNVKPECLEAYNKICQEVLPKIHEDKHYPCTLVGTWNTWYGEQDQAVHLWRYEGGYPALTEVMNKLRENKEFLEFRKARSDMLLSRKNQLLLEFSFWNEPVPRSGPNIYELRSYQLRPGTMIEWGNYWARAIRFRQDGNEAVGGFFSQIGQLYMVHHLWAYRDLQTREDIRNAAWHKHGWEELVYYTVPLIQEMESRIMIPLKTSPLQ

SEQ ID NO: 118025 - DNA, 861 bp, Artificial Sequence
  derived and/or modified sequence
atggccgcgcgggtattaagagcccgcggcgccgcatgggccggcggactgttgcagagggccgccccgtgttccctgctgcctcggctgaggacatggacttctagttcaaaccgaagccgagaagattcctggttgaagtctctgttcgtccgcaaggtcgatccccgaaaggacgcacacagtaatctactcgcaaagaaagagacatccaatctgtacaagctgcagttccacaacgtgaagcccgagtgtctggaggcctacaataaaatttgtcaggaggtgctgccaaagatccatgaggataagcattatccctgtaccctcgtgggcacatggaatacatggtatggggagcaggatcaggcagttcatctctggagatacgagggggggtatcccgcgctcaccgaggttatgaacaagttaagagaaaataaggaattcctcgagttccgaaaggctagaagtgatatgttgctgtctaggaaaaaccagctactgctcgagttctccttctggaacgaacctgtaccgagaagcggaccgaatatttatgagctgcgcagctatcagttgaggccaggaacgatgattgaatggggcaattattgggccagggccattcgctttagacaagatggcaacgaagcagtggggggctttttcagccaaataggccagctttatatggtgcaccatctatgggcttacagagatctacaaaccagggaggacatacgtaatgcagcctggcacaagcatggctgggaggagctggtgtactacacagtccctctgatccaggagatggagtcacggatcatgatacccttgaagacgtctcctcttcaatag

SEQ ID NO: 118026 - DNA, 1999 bp, Artificial Sequence
  derived and/or modified sequence
gggcggtgggagccgaggcgccgagcaagatggcggcgcgagtgctgcgcgcccgcggagcggcctgggccggcggcctcctgcagcgggcggccccctgcagcctcctgcccaggctccggacatggacatcttccagcaacagatctcgagaagacagctggctaaaatccttatttgtccggaaagttgatccaagaaaagatgcccactccaatctcctagccaaaaaggaaacaagcaatctatacaaattacagtttcacaatgttaaaccggaatgcctagaagcatacaacaaaatttgtcaagaggtgttgccaaagattcacgaagataaacactacccttgtactttggtggggacttggaacacgtggtatggcgagcaggaccaagctgtccacctctggaggtatgaaggaggctatccagccctcacagaagtcatgaataaactcagagaaaataaggaatttttggaatttcgtaaggcaagaagtgacatgcttctctccaggaagaatcagctcctgttggagttcagtttctggaatgagcctgtgccaagatccggacctaatatatatgaactcaggtcttaccaactccgaccaggaaccatgattgaatggggcaattactgggctcgtgcaatccgcttcagacaggatggtaacgaagccgtcggaggattcttctctcagattgggcagctgtacatggtgcaccatctttgggcttacagggatcttcagaccagggaagacatacggaatgcagcatggcacaaacatggctgggaggaattggtatattacacagttccacttattcaggaaatggaatccagaatcatgatcccactgaagacctcgcccctccagtaaagctgtagagtttctatgtgcctacatacatttctgtgacaagtatttgtcgtaaattaattttaattgtgtatcaagtgaaaaagaaacactgaggttttaagctgctgtatatagcttgtgagaaacctcttttctttaaaatttacataatcacaagaaaggaaagaattacagttggactgattgtgacagtgccttgtcgtcctctttgaaacaccccgtgttgtccagtataccttataacactgagccacttctccccaccctccagaaggggtccacgttgaattctgaatcatcttgaaaataagattccaaccacaaaaaaaatttagccatttctttactaaaaaaaaccaaaaaacaaatctgttttataatcacagatttttagacaaatttcttgtatcaggaagaaatacaaattttgtcatgtttctcaagcagtttttctgagtagtttctgaggaggaacaaattacaagtgtacccaataactgaaaatgttttaactcactctcatttgtaagcagtccacatagtagacaatgggttttccaagctgggcaaggtacatttaatcagtaaatcagtttcacatcatgtattgtgatgtttcaatgtgagacacaaaaacaatggcttgaaacttgtgtatcatatgtgattttgaaatgaacaccttgaatagcactaatttttatttgtggtatttttctataacaaaacaagtagctctaggaaaagaggttttattttgtaaacgatcatttgtgacctcagacactctctggctaatattttaataagctcacagcagataattctgagatcatgggtgaggggtggtgcatgttgagatttaaattggcataaagctgcatactttttgtctagctgtttgatttcattttttaatatagtatgccaattttgtgactgttaccatgtgaaagtcctgttgaaatgaacaattgtctgccccacaatcaagaatgtatgtgtaaagtgtgaataaatctcatatcaaatgtcaaacttttacatgtgaatgattttctcaaagaacatagaaaagtcaataaaatcctcttaatttccacata

SEQ ID NO: 118027 - DNA, 861 bp, Artificial Sequence
  derived and/or modified sequence
atggccgcccgggtgctgcgggcccggggagctgcctgggccggcggcctgctgcagagagctgccccctgcagcctgctgccccggctgcggacctggaccagcagcagcaacagaagccgggaggacagctggctgaagagcctgtttgtgaggaaggtggaccccaggaaggatgcccacagcaacctgctggccaagaaggagaccagcaacctgtacaagctgcagttccacaacgtgaagccagagtgcctggaggcctacaacaagatctgccaggaggtgctgcccaagatccacgaggacaagcactacccctgcaccctggtgggcacctggaacacctggtacggggagcaggaccaggccgtgcacctgtggaggtatgagggcggctacccagccctgacagaggtgatgaacaagctgcgggagaacaaggagttcctggagttcaggaaggcccggagtgacatgctgctgagcaggaagaaccagctgctgctggagttctccttctggaatgaacctgtgcccaggagcggccccaacatctatgagctgcggagctaccagctgcggcccggcaccatgattgagtggggcaactactgggcccgggccatccgcttccggcaggatggaaatgaagctgtgggcggcttcttcagccagatcggccagctgtacatggtgcaccacctgtgggcctacagagacctgcagacccgggaggacatcagaaatgctgcctggcacaagcacggctgggaggagctggtgtactacacagtgcccctcatccaggagatggagagccgcatcatgatccccctgaagaccagccccctgcagtag

SEQ ID NO: 118028 - DNA, 861 bp, Artificial Sequence
  derived and/or modified sequence
atggccgcccgggtgctgcgggcccggggcgccgcctgggccggcggtctgctgcagcgagcggctccctgttccctgcttcctcgcttgcgaacatggacctcaagtagcaatcgctcgcgggaggatagttggctgaaatccttattcgttcgcaaagtagacccacggaaagacgctcatagtaacctcctcgctaagaaagaaaccagcaatttatataaactgcagtttcataacgtcaaacctgaatgcctggaggcctacaacaagatctgccaagaagtattacccaaaattcacgaggataaacattatccttgtacccttgtaggaacttggaacacctggtatggcgagcaggaccaagccgtgcatctgtggagatacgaggggggatatcccgccctcactgaggtgatgaacaaactgagggaaaataaggagtttctggaatttcgcaaagctcgcagcgatatgttgctgagccgcaagaatcagctgcttttggagttctccttttggaacgagccagtgccacggagcgggcccaacatctatgagctgagatcctaccagctgcgaccaggtactatgatagagtggggtaactactgggcccgagccatacgattcagacaggatggtaatgaagcagttggtggctttttcagccagatcggacagctctacatggtccatcatctgtgggcataccgcgatttgcaaacccgggaggatatccgcaatgccgcctggcacaagcatgggtgggaggagctagtctactacacagttcccctaatccaagaaatggaaagccgtattatgatcccactcaaaacttcaccgcttcagtag

SEQ ID NO: 118029 - DNA, 861 bp, Artificial Sequence
  derived and/or modified sequence
atggctgctagggtgctgagggcgcgtggcgctgcgtgggctgggggactcctgcagagggcagcaccttgctcgctgctccccagattgaggacatggacaagcagtagcaacagatcaagggaagacagctggcttaaatctttgtttgttcgcaaagtcgaccccagaaaagacgctcattcaaatcttctggctaaaaaggaaacctctaacctttacaagttgcaattccataacgtgaagcccgaatgtttagaagcatacaataagatctgccaggaggtcctgcccaagatccacgaggataaacactatccctgtacactcgttgggacttggaatacctggtatggtgagcaggaccaagccgtgcacctgtggcgatacgaagggggttaccctgcgctcactgaggtgatgaacaagctgagagagaacaaggaattcctcgaattcaggaaggcccgttccgacatgctgctctcccgcaagaaccagctccttctagagttcagcttttggaacgagcctgtgcctcgttctggccctaatatctacgagctgagaagttatcagcttagaccagggaccatgattgagtggggcaattattgggcgagggcaataaggttccggcaggacggaaacgaggccgtcggagggttcttctcacagataggccaactatatatggtccaccacttatgggcctatagagacttacaaacaagagaagacatccgaaatgctgcatggcataaacacggatgggaggaattagtgtactacacggtcccattgatccaagagatggaaagtagaataatgattcccctgaagacctccccactccagtag

SEQ ID NO: 118030 - DNA, 861 bp, Artificial Sequence
  derived and/or modified sequence
atggccgccagagtgctgagagccagaggcgccgcctgggccggcggcctgctgcagagagccgccccctgcagcctgctgcccagactgagaacctggaccagcagcagcaacagaagcagagaggacagctggctgaagagcctgttcgtgagaaaggtggaccccagaaaggacgcccacagcaacctgctggccaagaaggagaccagcaacctgtacaagctgcagttccacaacgtgaagcccgagtgcctggaggcctacaacaagatctgccaggaggtgctgcccaagatccacgaggacaagcactacccctgcaccctggtgggcacctggaacacctggtacggcgagcaggaccaggccgtgcacctgtggagatacgagggcggctaccccgccctgaccgaggtgatgaacaagctgagagagaacaaggagttcctggagttcagaaaggccagaagcgacatgctgctgagcagaaagaaccagctgctgctggagttcagcttctggaacgagcccgtgcccagaagcggccccaacatctacgagctgagaagctaccagctgagacccggcaccatgatcgagtggggcaactactgggccagagccatcagattcagacaggacggcaacgaggccgtgggcggcttcttcagccagatcggccagctgtacatggtgcaccacctgtgggcctacagagacctgcagaccagagaggacatcagaaacgccgcctggcacaagcacggctgggaggagctggtgtactacaccgtgcccctgatccaggagatggagagcagaatcatgatccccctgaagaccagccccctgcagtag

SEQ ID NO: 118031 - protein, 348 aa, Artificial Sequence
  derived and/or modified sequence
MSAAFPPSLMMMQRPLGSSTAFSIDSLIGSPPQPSPGHFVYTGYPMFMPYRPVVLPPPPPPPPALPQAALQPALPPAHPHHQIPSLPTGFCSSLAQGMALTSTLMATLPGGFSASPQHQEAAAARKFAPQPLPGGGNFDKAEALQADAEDGKGFLAKEGSLLAFSAAETVQASLVGAVRGQGKDESKVEDDPKGKEESFSLESDVDYSSDDNLTGQAAHKEEDPGHALEETPPSSGAAGSTTSTGKNRRRRTAFTSEQLLELEKEFHCKKYLSLTERSQIAHALKLSEVQVKIWFQNRRAKWKRVKAGNANSKTGEPSRNPKIVVPIPVHVSRFAIRSQHQQLEQARP

SEQ ID NO: 118032 - DNA, 1335 bp, Artificial Sequence
  derived and/or modified sequence
gacttttcgcctctcgctggcctctaccgagcgcgtctatgagcgcagcgttcccgccgtcgctgatgatgatgcagcgcccgctggggagtagcaccgccttcagcatagactcgctgatcggcagcccgccgcagcccagccccggccatttcgtctacaccggctaccccatgttcatgccctaccggccggtagtgctgccgccgccgccgccgccgccgcccgcgctgccccaggccgcgctgcagccagcgctgccgcccgcacaccctcaccaccagatccccagcctgcccacaggcttctgctccagcctggcgcagggcatggcgctcacctctacgctcatggccacgctccccggcggcttctccgcgtcgccccagcaccaggaggcggcagcggcccgcaagttcgcgccgcagccgctgcccggcggcggtaacttcgacaaggcggaggcgctgcaggctgacgcggaggacggcaaaggcttcctggccaaagagggctcgctgctcgccttctccgcggccgagacggtgcaggcttcgctcgtcggggctgtccgagggcaagggaaagacgagtcaaaggtggaagacgacccgaagggcaaggaggagagcttctcgctggagagcgatgtggactacagctcggatgacaatctgactggccaggcagctcacaaggaggaagacccgggccacgcgctggaggagaccccgccgagcagcggcgccgcgggcagcaccacgtctacgggcaagaaccggcggcggcggactgccttcaccagcgagcagctgctggagctagagaaggagttccactgcaaaaagtacctctccttgaccgagcgctcgcagatcgcccacgccctcaaactcagcgaggtgcaggtgaaaatctggttccagaaccgacgggccaagtggaaacgggtgaaggcaggcaatgccaattccaagacaggggagccctcccggaaccctaagatcgtcgtccccatccctgtccacgtcagcaggttcgctatcagaagtcagcatcagcagctagaacaggcccggccctgagggtccagaagggccagggcctggcacccacctggagaagcccccgcacccgagggaacccatggtggactccactgtgtttgaagcaacaaagtcacagcccagctgtggccatcccaagcaaattgagaatatattcactaaatgggcttaaaagactgcttttgaaggggcttacagccacaccagaagacacgctaaatatttattatactatcctactttgtacataaatatctctatagactgg

SEQ ID NO: 118033 - DNA, 1047 bp, Artificial Sequence
  derived and/or modified sequence
atgtccgcagctttccctccctccctgatgatgatgcagcgtccgctcggcagttctacagccttttctatcgatagtcttattgggagccccccacagccgtcccctggtcatttcgtttataccggctatccaatgtttatgccataccgccctgtggttctgcctccaccaccacctccaccaccagctctgccccaggccgctctgcagccagccttgccgcccgcccacccccaccatcaaattccatcacttcctaccggattttgctcctcactggctcaaggaatggcattaaccagcaccttgatggctacactgccaggcggtttctctgcgtctccacaacatcaggaggctgcagctgctaggaaatttgccccgcagcctctgccgggaggaggaaattttgacaaagccgaagcactccaggctgacgctgaagatggaaagggcttcttggcaaaggaaggcagtcttcttgccttctctgctgctgagaccgttcaggcttcactcgtcggggctgtgagaggtcagggcaaagatgaaagcaaagtggaagatgatcctaaagggaaggaagagtccttctccttagagagcgatgttgattacagcagcgatgataacctaacgggtcaggccgctcataaggaagaagaccccggccatgccctggaagaaaccccccccagtagcggcgcagctgggtctacaacctcgaccggaaagaatagaagacggagaacagcattcacgtctgagcagctgctggaactggaaaaggagttccattgtaaaaaatatctctcattgactgaacggagccagattgcccatgccctcaagttgagtgaagttcaggtcaagatatggttccagaatcggagagccaagtggaaaagagtgaaggccggtaatgctaacagtaagacaggcgaaccatctcggaatcccaagattgtggtccctatccccgtgcacgtgtccagatttgccatccgcagtcagcaccagcagttggagcaggctcgaccctag

SEQ ID NO: 118034 - DNA, 2123 bp, Artificial Sequence
  derived and/or modified sequence
ccgccggagataagtacgccggcttcgcgcgctccccagcggcccgcgggaggcgacggacggcgggacggacggacggacggcagcttaccggggccgagggccaaacccgcgaagcgcgcgggctccgacgggcaagcggcggacgggggctccggcgagccctcggggcccgggcgccctctccactccggggcgcacggcctcaccccgcacaccccctgcacccgcccggcatgcagcgggcccaggactgaggggcggaggcgtctgctctccgggtcccgctcggcccctgcccggcgctcccggcggtgctcccggcgtccggcgggcttcccggcggcggcgcggcgcggggacttttcgcctctcgctggcctctaccgagcgcgtctatgagcgcagcgttcccgccgtcgctgatgatgatgcagcgcccgctggggagtagcaccgccttcagcatagactcgctgatcggcagcccgccgcagcccagccccggccatttcgtctacaccggctaccccatgttcatgccctaccggccggtagtgctgccgccgccgccgccgccgccgcccgcgctgccccaggccgcgctgcagccagcgctgccgcccgcacaccctcaccaccagatccccagcctgcccacaggcttctgctccagcctggcgcagggcatggcgctcacctctacgctcatggccacgctccccggcggcttctccgcgtcgccccagcaccaggaggcggcagcggcccgcaagttcgcgccgcagccgctgcccggcggcggtaacttcgacaaggcggaggcgctgcaggctgacgcggaggacggcaaaggcttcctggccaaagagggctcgctgctcgccttctccgcggccgagacggtgcaggcttcgctcgtcggggctgtccgagggcaagggaaagacgagtcaaaggtggaagacgacccgaagggcaaggaggagagcttctcgctggagagcgatgtggactacagctcggatgacaatctgactggccaggcagctcacaaggaggaagacccgggccacgcgctggaggagaccccgccgagcagcggcgccgcgggcagcaccacgtctacgggcaagaaccggcggcggcggactgccttcaccagcgagcagctgctggagctagagaaggagttccactgcaaaaagtacctctccttgaccgagcgctcgcagatcgcccacgccctcaaactcagcgaggtgcaggtgaaaatctggttccagaaccgacgggccaagtggaaacgggtgaaggcaggcaatgccaattccaagacaggggagccctcccggaaccctaagatcgtcgtccccatccctgtccacgtcagcaggttcgctatcagaagtcagcatcagcagctagaacaggcccggccctgagggtccagaagggccagggcctggcacccacctggagaagcccccgcacccgagggaacccatggtggactccactgtgtttgaagcaacaaagtcacagcccagctgtggccatcccaagcaaattgagaatatattcactaaatgggcttaaaagactgcttttgaaggggcttacagccacaccagaagacacgctaaatatttattatactatcctactttgtacataaatatctctatagactggatctcagctgcagtattttgaaagttataggacttaattacccagtaatttctccactcattccagaagaaaacaaaacctctgctgtaatctgcgcggttagcagccacctttccatacttttccaaaggtaaacgtgaaacccaagaacaagcactggggtttaaactgattttggtttgcgttctggctttttgagttgactgaaaagcagacattgttaggcagcctggaaattcgctttgctttgctttgcttttgcctggctttggtttcccctggggttgcctatcctatctgagccatgtgaagcacgtctccgttgtgttaatttatttcaatgtagcttattttcttataagttatgacatttaaacaatttcagtcttgtgaataataaaaaggagagagggggggaaaaagaccaa

SEQ ID NO: 118035 - DNA, 1047 bp, Artificial Sequence
  derived and/or modified sequence
atgtctgctgccttcccccccagcctgatgatgatgcagaggcccctgggcagcagcacagccttcagcattgacagcctcatcggcagccccccccagcccagccctggccactttgtgtacacaggctaccccatgttcatgccctacagacctgtggtgctgcccccacctcctcctcctcctccagccctgccccaggccgccctgcagcctgccctgcccccagcccacccccaccaccagatccccagcctgcccaccggcttctgcagcagcctggcccagggcatggccctgaccagcaccctgatggccaccctgcccggcggcttcagcgccagcccccagcaccaggaggccgctgctgccaggaagtttgccccccagcccctgcccggcggcggcaactttgacaaggccgaggccctgcaggctgatgctgaagatggcaagggcttcctggccaaggagggcagcctgctggccttctctgctgctgagaccgtgcaggccagcctggtgggcgctgtgcggggccagggcaaggatgagagcaaggtggaggatgaccccaagggcaaggaggagagcttcagcctggagagtgatgtggactacagcagtgatgacaacctgaccggccaggccgcccacaaggaggaggaccccggccacgccctggaggagaccccacccagcagtggagctgctggcagcaccaccagcacaggcaagaacagaagaagaagaacagccttcaccagcgagcagctgctggagctggagaaggagttccactgcaagaagtacctgagcctgacagagaggagccagatcgcccacgccctgaagctgtctgaggtgcaggtgaagatctggttccagaacagaagagccaagtggaagagggtgaaggctggaaatgccaacagcaagacaggagagcccagcaggaaccccaagatcgtggtgcccatccctgtgcacgtgtccagatttgccatccgcagccagcaccagcagctggagcaggcccggccctag

SEQ ID NO: 118036 - DNA, 1047 bp, Artificial Sequence
  derived and/or modified sequence
atgagcgccgccttcccccccagcctgatgatgatgcagcggccccttggatccagcacagcgttctccattgactccctgatcggctctcctccacaaccaagtcccggacattttgtctataccgggtatcctatgttcatgccctacaggcctgtcgtgctgccaccccccccaccaccacctcccgctctgccacaggcagcccttcagcccgcattgcccccagcacatccacatcaccagatcccgagtctgcccaccggcttctgcagtagcctggcacaagggatggcactgaccagcacccttatggcaaccctgccaggcggttttagcgcatctccacagcatcaggaggccgccgcagccaggaaatttgcccctcagcctctcccaggcggcggaaactttgacaaggccgaggcgctgcaggccgatgccgaagatggaaagggtttcttagctaaggaggggtcattgctggcttttagtgccgctgaaactgtccaggcatccctggtgggcgcagtcagggggcagggcaaggatgaatccaaagtcgaagatgaccccaagggtaaggaagagtccttcagcctcgagtcagatgtcgattacagctccgatgataacctgacgggtcaagctgcccataaggaagaagatcctggccacgccctggaggaaacccctccatcctcaggagctgctggaagtacaaccagcacagggaagaatcgaagacgaaggactgctttcacctcagagcaacttttagagctggagaaagagttccattgcaagaagtacctcagcctaaccgaacgctcccagatcgctcacgcattaaaactgtccgaagttcaggtcaagatttggtttcaaaacagaagggccaagtggaagagagtaaaagctggaaacgcaaactcaaagactggcgagccatctagaaaccctaaaattgtcgtgcctatcccggtacatgtctcacgattcgcaatccggtcccagcaccaacagcttgagcaggcgcggccatag

SEQ ID NO: 118037 - DNA, 1047 bp, Artificial Sequence
  derived and/or modified sequence
atgagcgccgcttttccgccttctctgatgatgatgcagaggcctctggggtccagcaccgcttttagcatagacagccttatagggtctccgccacaaccctcccccggtcactttgtctataccggataccccatgtttatgccgtatcgacctgttgtcttaccccctcccccaccacctccaccggctctgccccaggctgctctccagcctgccctaccaccagcccacccccatcaccaaatcccctccctccctactggtttctgctccagcctagcccaaggcatggcccttacctccacccttatggctaccctgcccggtggcttttctgcctcaccgcagcatcaagaagcagccgcagcacgtaaatttgctcctcaaccacttcctgggggaggtaattttgacaaggccgaggcacttcaagctgacgccgaggatggcaaaggtttcctggccaaagagggcagcctcctggcattctcagctgcagagacagtgcaggcttcactggtcggagctgtgagaggtcagggaaaggatgaatcgaaggttgaggacgacccaaagggtaaggaagaatctttcagcctggagagcgacgtggactattccagcgacgacaaccttactgggcaagccgcacataaggaagaggacccaggccacgcactggaggaaacacccccttcttccggagccgcagggtccacgacctcaaccggaaagaacaggaggcgacggaccgcatttacatctgagcagcttctggaactggaaaaggagtttcattgcaagaaatatctatctcttaccgagagatcgcagatcgcacacgctctgaagctgtcagaggttcaggttaaaatttggttccagaacaggagggctaagtggaagagagtcaaagccggtaacgcaaactcgaagaccggggaacccagtcgcaaccctaagatagtggtgccaattccagttcacgtgtcccgcttcgcaatcaggtctcaacatcagcagttggagcaagcgagaccctag

SEQ ID NO: 118038 - DNA, 1047 bp, Artificial Sequence
  derived and/or modified sequence
atgagcgccgccttcccccccagcctgatgatgatgcagagacccctgggcagcagcaccgccttcagcatcgacagcctgatcggcagccccccccagcccagccccggccacttcgtgtacaccggctaccccatgttcatgccctacagacccgtggtgctgccccccccccccccccccccccccgccctgccccaggccgccctgcagcccgccctgccccccgcccacccccaccaccagatccccagcctgcccaccggcttctgcagcagcctggcccagggcatggccctgaccagcaccctgatggccaccctgcccggcggcttcagcgccagcccccagcaccaggaggccgccgccgccagaaagttcgccccccagcccctgcccggcggcggcaacttcgacaaggccgaggccctgcaggccgacgccgaggacggcaagggcttcctggccaaggagggcagcctgctggccttcagcgccgccgagaccgtgcaggccagcctggtgggcgccgtgagaggccagggcaaggacgagagcaaggtggaggacgaccccaagggcaaggaggagagcttcagcctggagagcgacgtggactacagcagcgacgacaacctgaccggccaggccgcccacaaggaggaggaccccggccacgccctggaggagaccccccccagcagcggcgccgccggcagcaccaccagcaccggcaagaacagaagaagaagaaccgccttcaccagcgagcagctgctggagctggagaaggagttccactgcaagaagtacctgagcctgaccgagagaagccagatcgcccacgccctgaagctgagcgaggtgcaggtgaagatctggttccagaacagaagagccaagtggaagagagtgaaggccggcaacgccaacagcaagaccggcgagcccagcagaaaccccaagatcgtggtgcccatccccgtgcacgtgagcagattcgccatcagaagccagcaccagcagctggagcaggccagaccctag

SEQ ID NO: 118039 - protein, 625 aa, Artificial Sequence
  derived and/or modified sequence
MPGTKRFQHVIETPEPGKWELSGYEAAVPITEKSNPLTQDLDKADAENIVRLLGQCDAEIFQEEGQALSTYQRLYSESILTTMVQVAGKVQEVLKEPDGGLVVLSGGGTSGRMAFLMSVSFNQLMKGLGQKPLYTYLIAGGDRSVVASREGTEDSALHGIEELKKVAAGKKRVIVIGISVGLSAPFVAGQMDCCMNNTAVFLPVLVGFNPVSMARNDPIEDWSSTFRQVAERMQKMQEKQKAFVLNPAIGPEGLSGSSRMKGGSATKILLETLLLAAHKTVDQGIAASQRCLLEILRTFERAHQVTYSQSPKIATLMKSVSTSLEKKGHVYLVGWQTLGIIAIMDGVECIHTFGADFRDVRGFLIGDHSDMFNQKAELTNQGPQFTFSQEDFLTSILPSLTEIDTVVFIFTLDDNLTEVQTIVEQVKEKTNHIQALAHSTVGQTLLIPLKKLFPSIISITWPLLFFEYEGNFIQKFQRELSTKWVLNTVSTGAHVLLGKILQNHMLDLRISNSKLFWRALAMLQRFSGQSKARCIESLLRAIHFPQPLSDDIRAAPISCHVQVAHEKEQVIPIALLSLLFRCSITEAQAHLAAAPSVCEAVRSALAGPGQKRTADPLEILEPDVQ

SEQ ID NO: 118040 - protein, 435 aa, Artificial Sequence
  derived and/or modified sequence
MDCCMNNTAVFLPVLVGFNPVSMARNDPIEDWSSTFRQVAERMQKMQEKQKAFVLNPAIGPEGLSGSSRMKGGSATKILLETLLLAAHKTVDQGIAASQRCLLEILRTFERAHQVTYSQSPKIATLMKSVSTSLEKKGHVYLVGWQTLGIIAIMDGVECIHTFGADFRDVRGFLIGDHSDMFNQKAELTNQGPQFTFSQEDFLTSILPSLTEIDTVVFIFTLDDNLTEVQTIVEQVKEKTNHIQALAHSTVGQTLLIPLKKLFPSIISITWPLLFFEYEGNFIQKFQRELSTKWVLNTVSTGAHVLLGKILQNHMLDLRISNSKLFWRALAMLQRFSGQSKARCIESLLRAIHFPQPLSDDIRAAPISCHVQVAHEKEQVIPIALLSLLFRCSITEAQAHLAAAPSVCEAVRSALAGPGQKRTADPLEILEPDVQ

SEQ ID NO: 118041 - DNA, 1878 bp, Artificial Sequence
  derived and/or modified sequence
atgcctggtaccaaacggttccagcacgttatcgagacccctgaaccagggaaatgggaactttccggctacgaagctgccgtgccgatcaccgagaagtcaaatccgctcactcaggatctggataaagcagacgccgagaatatcgtgaggctgctgggccagtgtgatgcggagatcttccaggaagagggtcaggccttgagcacctatcagaggctatactccgagagtattttgaccacgatggtccaggtcgcaggcaaggtccaggaagtcctgaaagagcccgacggcggcttagtcgttcttagcggaggcgggacgtctggacgcatggctttcctgatgtcagtaagctttaaccagcttatgaaggggctggggcaaaaaccattgtatacctatctcatagccgggggcgacagaagtgttgtcgcaagccgagagggtacagaggactctgccctgcacggcattgaagagttgaagaaagtggccgcgggcaaaaagcgggtgatagtgatcggcatttcagtgggactgagcgccccatttgtagccggccaaatggattgctgcatgaataataccgcagtctttctccctgtgctggtcggttttaacccagtctctatggctaggaacgaccctatcgaagattggtcgtctacctttcggcaggtggccgagagaatgcaaaagatgcaagagaagcagaaggccttcgtgcttaaccccgcgattggacctgagggactgtctgggtccagcagaatgaaaggaggttctgctactaagattctgctcgagacactgctgctggccgcgcacaaaacagttgaccagggtatcgccgcgtcgcagcgctgcctactcgaaatccttaggactttcgagcgcgcccatcaggtgacctactctcaatctcccaagatagctaccctcatgaagagtgttagcacaagcctcgaaaaaaagggccacgtctatctcgtgggatggcaaacgctagggataattgcgattatggatggggtggagtgtatccatacatttggggccgattttcgggatgtgcggggctttttaataggcgaccattcagacatgttcaaccagaaggccgagttgactaaccagggcccacagtttacatttagccaggaggatttccttacctctatcttgccatccctgactgagatcgacaccgtggtgtttatcttcacgctggatgacaatcttacagaggttcagactattgttgaacaagtcaaagagaagactaaccacatccaagctttggctcacagcaccgtggggcagactctgttgattcctctcaagaaactcttcccttctatcatctccattacttggcctctgctgttcttcgaatacgagggcaattttatacagaagttccaacgtgaactaagtaccaaatgggtcttgaacaccgtcagcactggagcgcacgtgctactcggtaagatactgcagaaccacatgctcgacctcaggatatccaattccaagctcttctggagagctctcgctatgttgcagagattctccggtcagagtaaggctcgttgcatcgagtcactgttgagagccattcacttcccacagcctctctctgacgacattcgggccgcccctattagctgccatgttcaagtggcacacgagaaagagcaggtgatccctatcgccctgctcagcctgcttttccggtgcagcatcacagaagcacaagcccatctggccgcggccccgtcagtgtgcgaagccgttcgcagcgccctggctggccccggacagaaacggacagcagaccctctggagattctggaacctgacgtacagtag

SEQ ID NO: 118042 - DNA, 2186 bp, Artificial Sequence
  derived and/or modified sequence
gtgaccagaggggtttgtgtggctgaagaggcaggaggaacagtgtatccacagcgtgggaccatgccaggcacaaaacggtttcaacatgtcattgagaccccggagcctggcaagtgggagttgtctgggtacgaggcagctgtgccaatcacggagaagtcaaacccactgacccaggatctagacaaagcagatgctgagaacattgttcgactgctagggcaatgtgatgctgagatcttccaggaggaggggcaagccctgtccacataccagagactctacagcgaatccattctgaccaccatggtacaggtggctgggaaagttcaggaagtgctgaaggagccagatggggggctggttgtgctgagtggagggggcacctctggccggatggcattcctcatgtcggtgtcctttaatcagctgatgaaaggtctgggacagaaacctctttacacctacctcattgcaggtggtgacaggtctgtggtggcctctagggaggggacagaagatagtgccttgcacgggattgaggaactgaagaaggtggctgccgggaagaagagagtgattgtcattggcatttctgtgggactctctgctccctttgtggcaggccagatggactgctgcatgaacaacacagctgtcttcttgccagtcctggttggcttcaatccagtgagcatggccagaaatgaccccattgaagactggagttcaacattccgacaagtagcagagcggatgcagaaaatgcaggagaaacagaaagcttttgtgctcaatcctgccatcgggcccgagggtctcagcggctcctcccggatgaaaggtggaagtgccaccaagattctgctggaaaccctgttattagcagcccataagactgtggaccagggcattgcagcatctcaaagatgcctcctggaaatcttgcggacatttgagcgagctcatcaggtgacctacagccaaagccccaagattgccaccctgatgaagagtgtcagcaccagtctggagaagaaaggccacgtgtacctggttggctggcagaccctgggcatcattgccatcatggatggagtagagtgcatccacacctttggtgctgatttccgagatgtccgtggctttctcattggtgatcacagtgacatgtttaaccagaaggctgagctcaccaaccagggtccccagttcaccttctcccaggaggacttcctgacttccatccttccctctctcacggaaatcgatactgtggtcttcattttcaccctggatgacaacctcacggaggtgcagactatagtggagcaggtgaaagagaagaccaaccacatccaggccctggcacacagcaccgtgggtcagaccttgctgatccctctgaagaagctctttccctccatcatcagcatcacatggccactgcttttctttgaatatgaagggaacttcatccagaagttccagcgtgagctaagcaccaaatgggtgctgaatacagtgagtacaggtgctcatgtgcttcttggtaagatcctacaaaaccacatgttggaccttcggattagcaactccaagctcttctggcgggcgctggccatgctgcagcggttctctggacagtccaaggctcgatgcatcgagagcctcctccgagcgatccactttccccagccactgtcagatgatattcgggctgctcccatctcctgccatgtccaggttgcacatgagaaggaacaggtgatacccatcgccttgctgagcctcctattccggtgctcgatcactgaggctcaggcacacctggctgcagctccttctgtctgtgaggctgtcaggagtgctcttgctgggccaggtcagaagcgcactgcggaccccctcgagatcctagagcctgacgttcagtgaacccatgtttctgggtgggtgaaaggggcccaaccctgcccacttcagcccagcccgcccaaggggacttgtgccagcagaacatgtgggaggaagaagccccgtttccagggcatccgcagcccagggtagggagaaatattctctccactttgggggagagttcttgctctcgacctagtggtttctactctcaccgacttattctgatttcagaaataaaatgaaatgtcttattttggaaa

SEQ ID NO: 118043 - DNA, 2116 bp, Artificial Sequence
  derived and/or modified sequence
agaggggtttgtgtggctgaagaggcaggaggaacagtgtatccacagcgtgggaccatgccaggcacaaaacggtttcaacatgtcattgagaccccggagcctggcaagtgggagttgtctgggtacgaggcagctgtgccaatcacggagaagtcaaacccactgacccaggatctagacaaagcagatgctgagaacattgttcgactgctagggcaatgtgatgctgagatcttccaggaggaggggcaagccctgtccacataccagagactctacagcgaatccattctgaccaccatggtacaggtggctgggaaagttcaggaagtgctgaaggagccagatggggggctggttgtgctgagtggagggggcacctctggccggatggcattcctcatgtcggtgtcctttaatcagctgatgaaaggtctgggacagaaacctctttacacctacctcattgcaggtggtgacaggtggctgccgggaagaagagagtgattgtcattggcatttctgtgggactctctgctccctttgtggcaggccagatggactgctgcatgaacaacacagctgtcttcttgccagtcctggttggcttcaatccagtgagcatggccagaaatgaccccattgaagactggagttcaacattccgacaagtagcagagcggatgcagaaaatgcaggagaaacagaaagcttttgtgctcaatcctgccatcgggcccgagggtctcagcggctcctcccggatgaaaggtggaagtgccaccaagattctgctggaaaccctgttattagcagcccataagactgtggaccagggcattgcagcatctcaaagatgcctcctggaaatcttgcggacatttgagcgagctcatcaggtgacctacagccaaagccccaagattgccaccctgatgaagagtgtcagcaccagtctggagaagaaaggccacgtgtacctggttggctggcagaccctgggcatcattgccatcatggatggagtagagtgcatccacacctttggtgctgatttccgagatgtccgtggctttctcattggtgatcacagtgacatgtttaaccagaaggctgagctcaccaaccagggtccccagttcaccttctcccaggaggacttcctgacttccatccttccctctctcacggaaatcgatactgtggtcttcattttcaccctggatgacaacctcacggaggtgcagactatagtggagcaggtgaaagagaagaccaaccacatccaggccctggcacacagcaccgtgggtcagaccttgctgatccctctgaagaagctctttccctccatcatcagcatcacatggccactgcttttctttgaatatgaagggaacttcatccagaagttccagcgtgagctaagcaccaaatgggtgctgaatacagtgagtacaggtgctcatgtgcttcttggtaagatcctacaaaaccacatgttggaccttcggattagcaactccaagctcttctggcgggcgctggccatgctgcagcggttctctggacagtccaaggctcgatgcatcgagagcctcctccgagcgatccactttccccagccactgtcagatgatattcgggctgctcccatctcctgccatgtccaggttgcacatgagaaggaacaggtgatacccatcgccttgctgagcctcctattccggtgctcgatcactgaggctcaggcacacctggctgcagctccttctgtctgtgaggctgtcaggagtgctcttgctgggccaggtcagaagcgcactgcggaccccctcgagatcctagagcctgacgttcagtgaacccatgtttctgggtgggtgaaaggggcccaaccctgcccacttcagcccagcccgcccaaggggacttgtgccagcagaacatgtgggaggaagaagccccgtttccagggcatccgcagcccagggtagggagaaatattctctccactttgggggagagttcttgctctcgacctagtggtttctactctcaccgacttattctgatttcagaaataaaatgaaatgtcttattttggaaagtt

SEQ ID NO: 118044 - DNA, 1878 bp, Artificial Sequence
  derived and/or modified sequence
atgcctggcaccaagcgcttccagcacgtgattgagaccccagagcccgggaagtgggagctgagcggctatgaggccgctgtgcccatcacagagaagagcaaccccctgacccaggacctggacaaggcagatgctgaaaatattgtgcggctgctgggccagtgtgatgctgagatcttccaggaggagggccaggccctgagcacctaccagaggctgtacagcgagagcatcctgaccaccatggtgcaggtggccggcaaggtgcaggaggtgctgaaggagccagatggcggcctggtggtgctgagcggcggcggcaccagcggccgcatggccttcctgatgtctgtgtccttcaaccagctgatgaagggcctgggccagaagcccctgtacacctacctgattgctggaggagacagatctgtggtggccagccgggagggcacagaagattctgccctgcacggcatcgaggagctgaagaaggtggccgccggcaagaagagggtcatcgtcatcggcatctctgtgggcctgagcgccccctttgtggccggccagatggactgctgcatgaacaacacagctgtgttcctgcctgtgctggtgggcttcaaccctgtgtccatggccagaaatgaccccatcgaggactggagcagcaccttccggcaggtggccgagaggatgcagaagatgcaggagaagcagaaggcctttgtgctgaacccagccatcggccctgagggcctgagcggcagcagcaggatgaagggcggcagcgccaccaagatcctgctggagaccctgctgctggccgcccacaagacagtggaccagggcattgctgccagccagcgctgcctgctggagatcctgcggacctttgagcgggcccaccaggtgacctacagccagagccccaagatcgccaccctgatgaagtctgtgtccaccagcctggagaagaagggccacgtgtacctggtgggctggcagaccctgggcatcatcgccatcatggatggagtggagtgcatccacacctttggagctgacttcagagatgtgcggggcttcctgattggagaccacagcgacatgttcaaccagaaggccgagctgaccaaccagggcccccagttcaccttcagccaggaggacttcctgaccagcatcctgcccagcctgacagaaattgacacagtggtgttcatcttcaccctggatgacaacctgacagaggtgcagaccatcgtggagcaggtgaaggagaagaccaaccacatccaggccctggcccacagcacagtgggccagaccctgctgatccccctgaagaagctgttccccagcatcatcagcatcacctggcccctgctcttctttgaatatgagggcaacttcatccagaagttccagcgggagctgagcaccaagtgggtgctgaacacagtgtccactggagcccacgtgctgctgggcaagatcctgcagaaccacatgctggacctgcgcatcagcaacagcaagctgttctggagggccctggccatgctgcagcgcttcagcggccagagcaaggcccgctgcatcgagagcctgctgcgggccatccacttcccccagcccctgagtgatgacatccgggccgcccccatcagctgccacgtgcaggtggcccacgagaaggagcaggtgatccccatcgccctgctgagcctgctcttccgctgcagcatcacagaggcccaggcccacctggccgccgcccccagcgtgtgtgaggccgtgcgcagcgccctggccggccctggccagaagaggacagctgaccccctggagatcctggagccagatgtgcagtag

SEQ ID NO: 118045 - DNA, 1878 bp, Artificial Sequence
  derived and/or modified sequence
atgcccggcaccaagcggttccagcacgtgatcgagacccccgagcccggcaagtgggagctgtctggctatgaggcagctgtccctatcacggaaaaatcaaacccactgacacaggacctggacaaggccgatgcagaaaacatcgtgcggctcttgggccagtgtgacgcagagattttccaggaggagggtcaggcactgtcaacctatcagcgtctctattccgagagtattctgactacaatggtgcaggtcgcaggaaaagtccaggaggtccttaaagagcccgatggtggacttgtggtcctgtctggcggaggcacaagtggtagaatggcgtttctgatgagcgtgtcctttaaccagctgatgaaaggactgggccagaagcccttgtacacctacttaatagcaggaggggacaggagcgttgttgcaagcagagaaggaaccgaggattccgccctccacggcatcgaggagctcaaaaaggtggcagccggaaaaaaacgtgtgattgtgattggtataagcgtgggcctttccgctcccttcgtggctggccaaatggactgttgtatgaacaacacggccgtgtttcttcccgtgctggtcggcttcaacccagtgtcaatggctaggaacgaccccattgaagactggtcctccacatttcgccaggtcgccgagcggatgcagaagatgcaggaaaagcagaaagcgttcgtgttgaaccctgccatagggccagaaggcttaagcgggtctagtcgcatgaagggcggcagtgccacaaagatcctgttagaaaccttgctgcttgctgcccataaaaccgttgaccaaggtattgccgcctcccaacggtgcctgctggagatcctccgcacctttgagagggcccatcaggtgacttactcacagagcccaaaaatcgcaaccctgatgaagtccgtgtccacttcgctcgagaagaagggacacgtttacttggtgggctggcagaccctcggcattatcgccataatggatggcgtcgagtgcatccacacttttggcgctgatttcagagacgtcaggggattcctcattggggaccacagtgatatgtttaatcaaaaagctgaattaactaatcagggcccacagttcacattcagccaggaggactttctgaccagtattctgccgagtctgacggagattgataccgtcgttttcatcttcactctggacgataacctgacagaagtgcagactatcgtcgaacaggttaaagagaaaacaaatcatatccaagccttggcacactcaaccgttgggcaaaccctactgattccactgaaaaaactttttccaagtatcattagtatcacatggcccctacttttcttcgaatacgagggaaatttcatccaaaagtttcagcgggagctttccacgaaatgggtcttgaataccgttagcaccggcgcacatgtgctgctcggcaaaattctgcaaaaccacatgctagacttaaggatatccaactccaagttgttttggagagcactagcaatgttgcagcggttttccggccagtccaaagcccgatgcattgagagcctcttgagggccatccactttcctcagccacttagcgacgacatccgcgcggctccaattagttgtcatgttcaggtcgctcacgagaaggagcaggtgatcccaattgcactgctatcactcctgtttcgctgctcaattacggaagcccaggcccacctggcagcagcgccttctgtttgcgaggccgtgcgaagcgcgctggccgggcccggccaaaagagaacagccgatccactagagatactggagcccgatgttcagtag

SEQ ID NO: 118046 - DNA, 1878 bp, Artificial Sequence
  derived and/or modified sequence
atgcctggcacaaagcgattccagcatgtgatcgaaacccccgagcctggaaaatgggagcttagtggctacgaagctgccgtgccaattaccgagaaatcaaacccactcactcaagacctggacaaagcagacgccgagaacatcgtcaggctcctgggccagtgtgacgctgaaatcttccaagaggagggacaagctctttctacatatcagcgcctgtatagcgaatcgatactgacaaccatggttcaagtcgcaggtaaagttcaagaggtcttaaaagagccagacgggggtttggtcgtgctgagtggaggtggcacttcgggacgaatggcatttctgatgagcgtgagtttcaaccaattaatgaaaggtctcggccagaagccattgtatacatatctgattgctggaggggacagatctgtcgtggccagccgcgagggcacagaggactcagccctgcacggcatcgaggaactgaagaaggtggctgcagggaaaaagcgcgttatcgtcattgggatctcagtcggactgtcggcacccttcgtagcaggacagatggattgttgtatgaacaatacggctgtgtttctgcctgtcctggtcgggttcaaccccgtgtccatggcgagaaatgatcccatcgaagactggagttccacgtttagacaagtcgcagagcggatgcagaagatgcaagaaaaacaaaaagccttcgtgctgaatcccgcaatcggaccagaaggactgtctggaagctctagaatgaaggggggtagcgccaccaaaatcttgctagagacgttgctcctggccgcacacaagacggtggatcagggcatagccgctagccagagatgcttgctggagatcctgcgcacctttgaaagagcccatcaggtaacatacagccaaagccctaagatcgccaccttaatgaagagcgtcagcacctctctggaaaaaaaaggccatgtttacttggttggctggcaaacgctggggatcatagccatcatggatggggtcgagtgcattcacaccttcggcgcagacttcagggacgtgagggggttccttataggcgaccacagcgacatgttcaaccaaaaagccgaacttactaatcagggtccccagttcacattttcccaagaggatttcctgacgagcatcctgccttcactgacagaaatcgacaccgtcgtatttatctttacgctggacgacaatctgacagaggtgcagacaatagtcgagcaggtcaaagaaaaaacgaatcacattcaggctttggcccatagcacggtgggacagaccctgctcatacccctgaagaaacttttcccaagtataatttctatcacctggccgctccttttcttcgagtatgagggtaatttcattcagaaattccaacgagagctttctaccaagtgggtgctcaatactgtcagtaccggcgctcacgtgctcctgggaaagatcctgcagaatcacatgctggacctccgtatctctaattccaagctattttggagggcactggcaatgctccagcgtttttccggccagtccaaagcaaggtgcatagaaagcctgctccgcgctatccattttcctcagcccctgagcgatgacatccgcgctgcaccaatctcttgccacgtccaggtggcacatgagaaagagcaagttatccccattgcacttctgagtctcctgttcaggtgttccatcacggaagctcaggcacacttagctgcggctccgtccgtttgtgaagctgtgcggtcggccctcgcaggtccgggtcagaagcgcacagctgacccactggagatcctcgagcccgatgtccagtag

SEQ ID NO: 118047 - DNA, 1878 bp, Artificial Sequence
  derived and/or modified sequence
atgcccggcaccaagagattccagcacgtgatcgagacccccgagcccggcaagtgggagctgagcggctacgaggccgccgtgcccatcaccgagaagagcaaccccctgacccaggacctggacaaggccgacgccgagaacatcgtgagactgctgggccagtgcgacgccgagatcttccaggaggagggccaggccctgagcacctaccagagactgtacagcgagagcatcctgaccaccatggtgcaggtggccggcaaggtgcaggaggtgctgaaggagcccgacggcggcctggtggtgctgagcggcggcggcaccagcggcagaatggccttcctgatgagcgtgagcttcaaccagctgatgaagggcctgggccagaagcccctgtacacctacctgatcgccggcggcgacagaagcgtggtggccagcagagagggcaccgaggacagcgccctgcacggcatcgaggagctgaagaaggtggccgccggcaagaagagagtgatcgtgatcggcatcagcgtgggcctgagcgcccccttcgtggccggccagatggactgctgcatgaacaacaccgccgtgttcctgcccgtgctggtgggcttcaaccccgtgagcatggccagaaacgaccccatcgaggactggagcagcaccttcagacaggtggccgagagaatgcagaagatgcaggagaagcagaaggccttcgtgctgaaccccgccatcggccccgagggcctgagcggcagcagcagaatgaagggcggcagcgccaccaagatcctgctggagaccctgctgctggccgcccacaagaccgtggaccagggcatcgccgccagccagagatgcctgctggagatcctgagaaccttcgagagagcccaccaggtgacctacagccagagccccaagatcgccaccctgatgaagagcgtgagcaccagcctggagaagaagggccacgtgtacctggtgggctggcagaccctgggcatcatcgccatcatggacggcgtggagtgcatccacaccttcggcgccgacttcagagacgtgagaggcttcctgatcggcgaccacagcgacatgttcaaccagaaggccgagctgaccaaccagggcccccagttcaccttcagccaggaggacttcctgaccagcatcctgcccagcctgaccgagatcgacaccgtggtgttcatcttcaccctggacgacaacctgaccgaggtgcagaccatcgtggagcaggtgaaggagaagaccaaccacatccaggccctggcccacagcaccgtgggccagaccctgctgatccccctgaagaagctgttccccagcatcatcagcatcacctggcccctgctgttcttcgagtacgagggcaacttcatccagaagttccagagagagctgagcaccaagtgggtgctgaacaccgtgagcaccggcgcccacgtgctgctgggcaagatcctgcagaaccacatgctggacctgagaatcagcaacagcaagctgttctggagagccctggccatgctgcagagattcagcggccagagcaaggccagatgcatcgagagcctgctgagagccatccacttcccccagcccctgagcgacgacatcagagccgcccccatcagctgccacgtgcaggtggcccacgagaaggagcaggtgatccccatcgccctgctgagcctgctgttcagatgcagcatcaccgaggcccaggcccacctggccgccgcccccagcgtgtgcgaggccgtgagaagcgccctggccggccccggccagaagagaaccgccgaccccctggagatcctggagcccgacgtgcagtag

SEQ ID NO: 118048 - protein, 475 aa, Artificial Sequence
  derived and/or modified sequence
MERDEPPPSGGGGGGGSAGFLEPPAALPPPPRNGFCQDELAELDPGTNDRAEQRTCLICGDRATGLHYGIISCEGCKGFFKRSICNKRVYRCSRDKNCVMSRKQRNRCQYCRLLKCLQMGMNRKAIREDGMPGGRNKSIGPVQISEEEIERIMSGQEFEEEANHWSNHGDSDHSSPGNRASESNQPSPGSTLSSRSVELNGFMAFREQYMGMSVPPHYQYIPHLFSYSGHSPLLPQQARSLDPQSYSLIHQLLSAEDLEPLGTPMLIEDGYAVTQAELFALLCRLADELLFRQIAWIKKLPFFCELSIKDYTCLLSSTWQELILLSSLTVYSKQIFGELADVTAKYSPSDEELHRFSDEGMEVIERLIYLYHKFHQLKVSNEEYACMKAINFLNQDIRGLTSASQLEQLNKRYWYICQDFTEYKYTHQPNRFPDLMMCLPEIRYIAGKMVNVPLEQLPLLFKVVLHSCKTSVGKE

SEQ ID NO: 118049 - DNA, 1903 bp, Artificial Sequence
  derived and/or modified sequence
gcggcgcggaggggcgcggagcggcgcggagccgggcggctcggggcccagagagagccgcggccgggagctcgcgggctcctgacaacctcctcccctcggcggacgacgaccacggcgactagggcgccggtcatggcggagcaacaaacccggcgcggaccctaggcaccaccgcatggagcgggacgaaccgccgcctagcggagggggaggcggcgggggctcggcggggttcctggagcctcccgccgcgctccctccgccgccgcgcaacggtttctgtcaggatgaattggcagagcttgacccaggcactaatgatcgggctgaacaacgaacctgtctcatttgtggggaccgcgctacaggcttgcactatgggatcatctcctgtgagggctgcaaagggtttttcaagcggagcatttgcaacaaacgggtatatcgatgcagtcgtgacaagaactgtgtcatgtctcggaagcagaggaacaggtgccagtactgccgcctgctcaaatgcctccagatggggatgaaccggaaggctatcagagaagatggcatgcctggaggccggaataagagcattgggccagtccagatatcggaagaagaaatcgaaaggatcatgtctgggcaggagtttgaggaagaggccaatcactggagcaaccatggtgatagtgaccacagttcccctgggaacagggcttcggagagcaaccagccctcaccaggctccacactgtcttccaggtctgtggaactgaatggattcatggccttcagggaacagtacatgggaatgtctgtgcctccacattaccaatatataccgcacctttttagctattctggccactcaccacttctgccccaacaagctcgcagcctggatccccagtcatacagtctgattcaccagctgttatcagccgaggacctggaaccattgggcacgcccatgttgattgaagatggatacgctgtgacacaggcagaactatttgccctgctttgccgcctggccgacgagctgctctttaggcagattgcctggatcaagaaactgcctttcttctgcgagctctcaatcaaggattacacgtgcctcttgagctctacgtggcaggagctaatcctgctgtcttccctcaccgtttacagcaagcagatctttggggaactggctgatgtcactgccaagtactcgccctccgatgaagaactacacagatttagtgatgaagggatggaggtgatcgagcggctcatctacctctatcacaagttccatcagctaaaggtcagcaacgaggagtatgcttgcatgaaagcaattaacttcctaaatcaagatatcaggggtctgaccagtgcctcacagctggaacaattgaataaacgatactggtacatttgccaggattttactgaatataaatacacacatcagccgaaccgctttcctgatctcatgatgtgcttacctgagattcgatatattgcaggaaagatggtgaatgtgcccctggagcagctgcccctcctctttaaggtggtgctgcattcctgcaagaccagtgtgggcaaggaatgacctgttccaggcgccctcctcaggccaaccacagcgtcttgggtgggcaggacaggctctggagggaaaagccagagagaccaagatggaggctgtggagcagcatttcccgttgcctccatagcaagaagagtttttgtttgtttgtctgtttttttaacctcatttttctatatatttatttcacgacagagttgaatgtatggccttcaacatgatgcacatgcttttgtgtgaatgcagccaatgcattttcttacagtttacagaatgtgaagatgaaaaaaaaaaaaaaaa

SEQ ID NO: 118050 - DNA, 1428 bp, Artificial Sequence
  derived and/or modified sequence
atggagcgagatgagcctccccctagcggggggggcggtggaggcgggagcgctggcttcctcgagcccccggctgctttgccaccccctcctcggaacggattctgccaggatgagctggctgagttagaccctggcacaaacgatcgagcggagcagcgaacatgtcttatttgcggagatcgtgctactggcctgcattacggaattatctcttgcgaaggttgtaaagggttctttaagcggagcatctgcaacaaacgggtttacagatgctcaagagataaaaactgcgtaatgtcacgtaagcagaggaaccgctgccagtattgccgattgctcaagtgtctgcagatggggatgaataggaaggccatacgggaagatgggatgcccgggggccgtaataagagcataggccctgtccaaatttccgaggaagagatcgaaaggattatgtccggacaagagtttgaggaagaggctaatcattggagtaatcacggtgattctgaccatagcagccccggcaatagagcatctgaatcgaatcagccttcaccaggcagcaccttgtcatcccgatcagtggagctcaacggattcatggcatttagagagcagtacatgggcatgtccgtccccccgcactatcaatacatcccccacttgtttagctattcaggccactccccattactccctcagcaggcccgatccctggacccacaaagctattccctcatccaccagctattgtcagctgaagacttggagccgttaggcacgcctatgctgattgaggacggttatgcggtgactcaggcggaactgtttgcgctgctctgtagactggccgatgaactgctcttccgacagattgcttggattaagaaacttcctttcttttgtgagttatctatcaaagactacacctgtctgttgtcctccacttggcaggagttgattctgctttcgagtctcactgtctattcgaagcaaatctttggcgagttggctgatgtgactgctaagtacagccccagcgatgaggaactccatagattttctgacgagggaatggaggtcatcgagcgcttaatctacctctaccacaaatttcaccagctgaaggtcagcaacgaggagtacgcatgtatgaaagccattaacttcctgaaccaggacattcgtggcctaaccagcgcgtcccagctggaacagctgaacaagcggtattggtacatatgtcaggacttcacggagtacaagtacactcaccagcccaatcggtttccggacttaatgatgtgccttcctgaaatccgctacatcgcgggcaaaatggttaatgttcccctcgagcagctgcctttactgtttaaggttgttctgcatagctgcaagaccagtgtgggcaaagaatag

SEQ ID NO: 118051 - DNA, 1898 bp, Artificial Sequence
  derived and/or modified sequence
gtgctgagggggcgcggcgcggaggggcgcggagcggcgcggagccgggcggctcggggcccagagagagccgcggccgggagctcgcgggctcctgacaacctcctcccctcggcggacgacgaccacggcgactagggcgccggtcatggcggagcaacaaacccggcgcggaccctaggcaccaccgcatggagcgggacgaaccgccgcctagcggagggggaggcggcgggggctcggcggggttcctggagcctcccgccgcgctccctccgccgccgcgcaacggtttctgtcaggatgaattggcagagcttgacccaggcactaatgatcgggctgaacaacgaacctgtctcatttgtggggaccgcgctacaggcttgcactatgggatcatctcctgtgagggctgcaaagggtttttcaagcggagcatttgcaacaaacgggtatatcgatgcagtcgtgacaagaactgtgtcatgtctcggaagcagaggaacaggtgccagtactgccgcctgctcaaatgcctccagatggggatgaaccggaaggctatcagagaagatggcatgcctggaggccggaataagagcattgggccagtccagatatcggaagaagaaatcgaaaggatcatgtctgggcaggagtttgaggaagaggccaatcactggagcaaccatggtgatagtgaccacagttcccctgggaacagggcttcggagagcaaccagccctcaccaggctccacactgtcttccaggtctgtggaactgaatggattcatggccttcagggaacagtacatgggaatgtctgtgcctccacattaccaatatataccgcacctttttagctattctggccactcaccacttctgccccaacaagctcgcagcctggatccccagtcatacagtctgattcaccagctgttatcagccgaggacctggaaccattgggcacgcccatgttgattgaagatggatacgctgtgacacaggcagaactatttgccctgctttgccgcctggccgacgagctgctctttaggcagattgcctggatcaagaaactgcctttcttctgcgagctctcaatcaaggattacacgtgcctcttgagctctacgtggcaggagctaatcctgctgtcttccctcaccgtttacagcaagcagatctttggggaactggctgatgtcactgccaagtactcgccctccgatgaagaactacacagatttagtgatgaagggatggaggtgatcgagcggctcatctacctctatcacaagttccatcagctaaaggtcagcaacgaggagtatgcttgcatgaaagcaattaacttcctaaatcaagatatcaggggtctgaccagtgcctcacagctggaacaattgaataaacgatactggtacatttgccaggattttactgaatataaatacacacatcagccgaaccgctttcctgatctcatgatgtgcttacctgagattcgatatattgcaggaaagatggtgaatgtgcccctggagcagctgcccctcctctttaaggtggtgctgcattcctgcaagaccagtgtgggcaaggaatgacctgttccaggcgccctcctcaggccaaccacagcgtcttgggtgggcaggacaggctctggagggaaaagccagagagaccaagatggaggctgtggagcagcatttcccgttgcctccatagcaagaagagtttttgtttgtttgtctgtttttttaacctcatttttctatatatttatttcacgacagagttgaatgtatggccttcaacatgatgcacatgcttttgtgtgaatgcagccaatgcattttcttacagtttacagaatgtgaaga

SEQ ID NO: 118052 - DNA, 1428 bp, Artificial Sequence
  derived and/or modified sequence
atggagagagatgagcccccaccttctgggggcggcggcggcggcggcagcgctggcttcctggagcccccagctgccctgcccccacctccaagaaatggcttctgccaggatgagctggccgagctggaccccggcaccaatgacagagctgagcagaggacctgcctgatctgtggggaccgggccaccggcctgcactacggcatcatcagctgtgagggctgcaagggcttcttcaagaggagcatctgcaacaagagggtgtaccgctgcagccgggacaagaactgtgtgatgagcaggaagcagaggaaccgctgccagtactgccgcctgctgaagtgcctgcagatgggcatgaacaggaaggccatccgggaggatggcatgcctgggggcaggaacaagagcatcggccctgtgcagatcagcgaggaggagattgagcgcatcatgagcggccaggagtttgaggaggaggccaaccactggagcaaccacggggacagcgaccacagcagccctggcaacagagccagcgagagcaaccagcccagccctggcagcaccctgagcagccgctctgtggagctgaatggcttcatggccttccgggagcagtacatgggcatgtctgtgcccccccactaccagtacatcccccacctgttctcctacagcggccacagccccctgctgccccagcaggcccggagcctggacccccagagctacagcctcatccaccagctgctgtctgctgaggacctggagcccctgggcacccccatgctgattgaagatggctatgctgtgacccaggccgagctgtttgccctgctgtgccgcctggctgatgagctgctcttccggcagatcgcctggatcaagaagctgcccttcttctgtgagctgagcatcaaggactacacctgcctgctgagcagcacctggcaggagctgatcctgctgagcagcctgactgtgtacagcaagcagatctttggagagctggctgatgtgacagccaagtacagccccagtgatgaggagctgcaccgcttcagtgatgagggcatggaggtgattgaaagactcatctacctgtaccacaagttccaccagctgaaggtgtccaatgaggagtatgcctgcatgaaggccatcaacttcctgaaccaggacatccggggcctgaccagcgccagccagctggagcagctgaacaagcgctactggtacatctgccaggacttcacagagtacaagtacacccaccagcccaaccgcttcccagacctgatgatgtgcctgcctgagatccgctacatcgccggcaagatggtgaatgtgcccctggagcagctgcccctgctcttcaaggtggtgctgcacagctgcaagacctctgtgggcaaggagtag

SEQ ID NO: 118053 - DNA, 1428 bp, Artificial Sequence
  derived and/or modified sequence
atggagcgggacgagcccccccccagcggcggcggcggcggcggcggctctgctggctttctcgagccccctgccgctcttccaccccccccacggaatgggttctgccaagacgagctggctgagctcgacccaggaacaaatgacagagccgagcaacggacttgtcttatttgcggagatagggcgaccggacttcactacggcatcatttcttgcgaaggttgtaaaggcttctttaagcgtagcatttgcaacaagcgcgtttataggtgttcaagggataaaaactgcgtcatgagtcggaaacagagaaaccgatgtcagtattgcagactgctgaagtgccttcagatgggcatgaacaggaaagctatcagagaggacggtatgccagggggacgcaataagagcattgggcctgtgcaaatttccgaagaggagatcgagcggatcatgtcaggacaggaatttgaagaggaagctaaccattggtcgaaccatggtgattccgaccactccagccccggcaaccgcgcctcagaaagtaaccaaccctcgcccggttcaacattatcatctcggagcgtcgagctgaacgggttcatggcttttcgcgagcagtacatggggatgagcgttcctccccattatcagtacattcctcatctcttctcctactccggccacagccccctgcttcctcagcaagctcgttccttagatccacagtcctatagcctcattcaccagctcctgtctgctgaggaccttgagccattaggaacccctatgctaattgaggatggatatgctgtcacacaggctgaactttttgcactgctctgtaggcttgccgacgaactattgtttagacagatcgcttggatcaagaagttgccctttttctgtgagctgagcattaaggactacacttgcctcctgtccagcacttggcaggagctcatcctgctgtccagtctaaccgtgtatagtaagcagatctttggagaacttgccgatgtgactgccaagtactctccaagcgatgaggagctccatagattctcggacgagggaatggaggttatcgagcgcctcatctatctttaccataagtttcaccaactaaaggtgtctaacgaggaatatgcctgtatgaaggccatcaatttccttaatcaggatatcaggggcctaacttcagcaagtcaactcgaacagctcaataagcgttattggtatatctgtcaggacttcacagagtacaagtatacgcatcagccaaaccgattccctgatcttatgatgtgtctccctgagattaggtacattgctgggaagatggtcaacgttcctcttgaacaactgcccctgctgttcaaggtggtgttacattcctgtaagacatctgtcggcaaggaatag

SEQ ID NO: 118054 - DNA, 1428 bp, Artificial Sequence
  derived and/or modified sequence
atggagcgggacgaacccccaccatccgggggtggagggggtggaggttctgccggatttcttgaacctcctgccgcactccctccgcctccacgaaacggtttttgtcaggatgaacttgccgagcttgacccgggaaccaacgacagagccgaacaaagaacctgtttaatctgcggagatagagccaccggtctccattatgggattatcagctgcgagggctgtaagggcttcttcaagcgaagtatttgcaacaagagagtgtatagatgctctcgggacaaaaattgcgtaatgtccagaaaacagcgcaatcgttgtcagtattgtagactgcttaaatgtctgcaaatgggcatgaaccgcaaggcgatcagagaggatggaatgcctgggggacggaataaaagcataggccctgtacagatctctgaagaagaaatagaacgcatcatgagtggtcaggagttcgaagaagaggccaatcactggtctaatcacggggacagcgatcattcttcccccggaaaccgggcatcggaaagtaaccaaccctctccaggatctaccctgtcttctcgttctgtggaactgaatggcttcatggcctttcgggaacaatatatgggaatgagtgtgcctccacactatcagtacattccccacctttttagctacagcgggcatagcccccttctgcctcagcaggcaagatcccttgacccacagtcttatagtctcattcaccagttgctgagcgctgaagacctggagcctctggggaccccgatgctaattgaggatggctacgcggtaacccaggcggaattgttcgctttactgtgtcgcctcgccgatgaactgctctttaggcagatagcctggatcaaaaaactgccttttttctgtgaactgagcattaaagactatacgtgcttactgagctccacctggcaggaactgatcctcctgtcctcactgaccgtttactccaaacagattttcggagaactcgcagatgtgaccgccaagtactccccaagcgatgaagaactgcaccggttcagcgacgagggaatggaggttatcgagagattgatctatttgtaccacaagttccaccagctcaaggtcagtaatgaggaatacgcttgcatgaaggctattaacttccttaaccaagatatcagaggtctcactagtgccagccagctcgagcagctaaacaagcgctactggtacatctgccaggattttaccgagtacaaatatactcatcagccgaacaggtttccagacctgatgatgtgtctacccgagattcggtacattgccggtaaaatggtcaacgtgcccctggagcaactccctctactgtttaaagtggtgttgcacagctgtaaaacatcggtcggcaaagaatag

SEQ ID NO: 118055 - DNA, 1428 bp, Artificial Sequence
  derived and/or modified sequence
atggagagagacgagcccccccccagcggcggcggcggcggcggcggcagcgccggcttcctggagccccccgccgccctgccccccccccccagaaacggcttctgccaggacgagctggccgagctggaccccggcaccaacgacagagccgagcagagaacctgcctgatctgcggcgacagagccaccggcctgcactacggcatcatcagctgcgagggctgcaagggcttcttcaagagaagcatctgcaacaagagagtgtacagatgcagcagagacaagaactgcgtgatgagcagaaagcagagaaacagatgccagtactgcagactgctgaagtgcctgcagatgggcatgaacagaaaggccatcagagaggacggcatgcccggcggcagaaacaagagcatcggccccgtgcagatcagcgaggaggagatcgagagaatcatgagcggccaggagttcgaggaggaggccaaccactggagcaaccacggcgacagcgaccacagcagccccggcaacagagccagcgagagcaaccagcccagccccggcagcaccctgagcagcagaagcgtggagctgaacggcttcatggccttcagagagcagtacatgggcatgagcgtgcccccccactaccagtacatcccccacctgttcagctacagcggccacagccccctgctgccccagcaggccagaagcctggacccccagagctacagcctgatccaccagctgctgagcgccgaggacctggagcccctgggcacccccatgctgatcgaggacggctacgccgtgacccaggccgagctgttcgccctgctgtgcagactggccgacgagctgctgttcagacagatcgcctggatcaagaagctgcccttcttctgcgagctgagcatcaaggactacacctgcctgctgagcagcacctggcaggagctgatcctgctgagcagcctgaccgtgtacagcaagcagatcttcggcgagctggccgacgtgaccgccaagtacagccccagcgacgaggagctgcacagattcagcgacgagggcatggaggtgatcgagagactgatctacctgtaccacaagttccaccagctgaaggtgagcaacgaggagtacgcctgcatgaaggccatcaacttcctgaaccaggacatcagaggcctgaccagcgccagccagctggagcagctgaacaagagatactggtacatctgccaggacttcaccgagtacaagtacacccaccagcccaacagattccccgacctgatgatgtgcctgcccgagatcagatacatcgccggcaagatggtgaacgtgcccctggagcagctgcccctgctgttcaaggtggtgctgcacagctgcaagaccagcgtgggcaaggagtag

SEQ ID NO: 118056 - protein, 400 aa, Artificial Sequence
  derived and/or modified sequence
MPLSMRYLFIISVSSVIIFIVFSVFNFGGDPSFQRLNISDPLRLTQVCTSFINGKTRFLWKNKLMIHEKSSCKEYLTQSHYITAPLSKEEADFPLAYIMVIHHHFDTFARLFRAIYMPQNIYCVHVDEKATTEFKDAVEQLLSCFPNAFLASKMEPVVYGGISRLQADLNCIRDLSAFEVSWKYVINTCGQDFPLKTNKEIVQYLKGFKGKNITPGVLPPAHAIGRTKYVHQEHLGKELSYVIRTTALKPPPPHNLTIYFGSAYVALSREFANFVLHDPRAVDLLQWSKDTFSPDEHFWVTLNRIPGVPGSMPNASWTGNLRAIKWSDMEDRHGGCHGHYVHGICIYGNGDLKWLVNSPSLFANKFELNTYPLTVECLELRHRERTLNQSETAIQPSWYF

SEQ ID NO: 118057 - DNA, 1203 bp, Artificial Sequence
  derived and/or modified sequence
atgcctctctccatgcgttacttattcatcattagtgtctcgagcgtgattatctttatcgtattctcagtgtttaactttggcggggacccttccttccagcggctaaatatatcggacccactgcggctgacgcaggtgtgtacgtcctttatcaacgggaagacacgatttctttggaagaacaagctgatgattcacgaaaagtcaagttgtaaagagtaccttactcaaagccattatatcactgctcccctgtctaaggaggaggccgacttcccactggcctatattatggtcatccaccaccacttcgacaccttcgcccgcctatttagagcaatctacatgccacagaacatttattgcgttcacgtggatgagaaggcgaccaccgaatttaaggatgctgtggagcagcttcttagttgcttcccgaatgcctttttagctagcaagatggaaccggttgtctatggaggaatttctcgtctgcaggcggaccttaactgtatcagggacctcagcgccttcgaggtgagctggaaatacgtgattaatacatgcggacaggatttccccttgaagactaataaggaaatcgttcagtatctaaagggattcaaagggaaaaacataacacccggggtgcttccaccagcgcatgccattggacgaacgaagtatgtgcaccaggagcatcttggcaaagaactcagctatgtgatccgaacgaccgcactcaagccccctcctccccataatctaacgatttatttcggcagcgcttacgtcgcccttagccgagagtttgctaattttgtgcttcatgaccctcgggccgtggacctgctgcagtggagtaaggataccttttccccggacgagcatttttgggtcactctgaataggatcccaggagtgccaggtagcatgccgaatgccagctggactggtaatcttagagcaattaagtggagcgatatggaggatagacatggggggtgtcatggccactatgtacacggaatatgcatttatggtaacggcgacttaaaatggctggtgaacagcccctcgctgttcgccaacaagttcgagctgaatacctacccgctgacagttgagtgtctggagttgagacatcgggagcgaactctgaatcagagtgagaccgccatccaaccctcatggtacttctag

SEQ ID NO: 118058 - DNA, 4381 bp, Artificial Sequence
  derived and/or modified sequence
actgcgctcattccctgaatggcagtaaccagggggcgggggtggcatgggaaatgaaagaaagagatatgggaaactaaatctgccgggggaaagagagttaccggagttttagcaaaacagctagcagatgcaaacggggaggcagagggaggagggaaggctgggcttcagcaacctgccacggggatttaaacaaaggaggtttgagagaggcgggatctggctgtaatatcggcacagggacagagacagcagctggactctcgggatgaaacggaatcgattcccagcgtctccaacagggcaggagtgagtggagtatgttgcaaaataagaactcagagaaacgagtgagtttggaaaaaagacttacagattttgacggtctcttgacatttcacccttctttgaggcatgcctttatcaatgcgttacctcttcataatttctgtctctagtgtaattatttttatcgtcttctctgtgttcaattttgggggagatccaagcttccaaaggctaaatatctcagaccctttgaggctgactcaagtttgcacatcttttatcaatggaaaaacacgtttcctgtggaaaaacaaactaatgatccatgagaagtcttcttgcaaggaatacttgacccagagccactacatcacagcccctttatctaaggaagaagctgactttcccttggcatatataatggtcatccatcatcactttgacacctttgcaaggctcttcagggctatttacatgccccaaaatatctactgtgttcatgtggatgaaaaagcaacaactgaatttaaagatgcggtagagcaactattaagctgcttcccaaacgcttttctggcttccaagatggaacccgttgtctatggagggatctccaggctccaggctgacctgaactgcatcagagatctttctgccttcgaggtctcatggaagtacgttatcaacacctgtgggcaagacttccccctgaaaaccaacaaggaaatagttcagtatctgaaaggatttaaaggtaaaaatatcaccccaggggtgctgcccccagctcatgcaattggacggactaaatatgtccaccaagagcacctgggcaaagagctttcctatgtgataagaacaacagcgttgaaaccgcctcccccccataatctcacaatttactttggctctgcctatgtggctctatcaagagagtttgccaactttgttctgcatgacccacgggctgttgatttgctccagtggtccaaggacactttcagtcctgatgagcatttctgggtgacactcaataggattccaggtgttcctggctctatgccaaatgcatcctggactggaaacctcagagctataaagtggagtgacatggaagacagacacggaggctgccacggccactatgtacatggtatttgtatctatggaaacggagacttaaagtggctggttaattcaccaagcctgtttgctaacaagtttgagcttaatacctacccccttactgtggaatgcctagaactgaggcatcgcgaaagaaccctcaatcagagtgaaactgcgatacaacccagctggtatttttgagctattcatgagctactcatgactgaagggaaactgcagctgggaagaggagcctgtttttgtgagagacttttgccttcgtaatgttaaccgtttcaggaccacgtttatagcttcaggacctggctacgtaattatacttaaaatatccactggacactgtgaaatacactaacaggatggctgggtagagcaatctgggcactttggccaattttagtcttgctgtttcttgatgctcacctctatattagtttattgttaggatcaatgataaatttaaatgacctcagatctttgcaccagatactcatcatatacaaatgttttagtaaaaaagagaattgtagataatactgtctaggaaaataagaattaggtttctttgaagaaggaatcttttataacaccttaacagtcaccactgtgctcaaccagacagatagtgaaacagctttctgggtaattcaccaatttcctttaaaacataagctacctgaatggagaatacatcttgtttctgagtttcaacactagcatttttggcttactcatggacaaagttctgtatatagtataaagtcattaacaagaaacaggatatgctttaagacagaattcactgtctgttgcttcagtaaaaggacctcggggaataaaacatttctctcttatatgccagaatgtaggctggtccctatgtcatgtcttccattaagaacactaaaaagtccttgcaagaatggagatatgcattcaagagaggtgctatcacatagatctagtctgaagtctggaacactttcctcttctatgacccctctctccccagtattatcttacttgcaaaatggagaccaaattctatcctgtgaggcttttaattgcaccatagtatgctctgagtagctttacactgcctggtactgatagtagtggctcgatttttaagagccttcaattgtagatgaacatctctgttatttatccctcattcatccatccgttcattcattcagccttcaatcaacatctcttgagtgtctattatgtacaggacatgtactgagacaaaaaggaaacataagagctttttcactctaaaaatcttggcaataatgtcaacaccagaaagcctcctctggagaatcttacagagtgattgtagtttaatacaggaacacacagggctgtgtagcatgataccaggcccaggagatcagtaattacaaattaagggttaaatcagagattattcaacagagagggagaaaggaggagacagagggaggacctgttgtgttccagccattctggtattcctttatgtatctaatttcattcaaacctcacaacagtcttgtgaggcccttatataattactcccattttgcagatgaagtaactgaggcttagaaaggttaatagcaccggggaacaatttctctgggtgagaattgggactctgttgctggtcttctcagttcatttcctgaggtggatttactgagagaaggtgaaataaagccatatttagtataccagagaaggtagattttaagaatggtctcagtgttaatactgagaaaaagtcctgtcagttcagaaaaaatgtgaagtctactttagtattcctgtaatactaaaccgttgagtttctaaatatttatttattctaacaaaaagcaattactacaaatggatgacacatttaatgaacacaattttattttttttctgtaactgtgcttgttgaatgtcaatcatatttaaagggaatgactttgaagtaaaaccttttttcttgctactgaaaaaaatggagttgttttgggtggtaaagtgttaaggaatagggacagctggtcacacaaggaactcttgaaggccacatgtgaaaacctgtcacttgcacagaggccagtcccactaaggtgaccagagtgggctccaagcacaaactgccattggctatagatgggactgtgtccccccaaaattcatgtgttggagccttaaccctcaatgtgatggtatttgagatggggcctttggtaagggaagtttagatgaggtcacgagggtaggaccctcatgatgggatgagtccccttacaagacctctggcttgggccgggcgtggtggctcacacctgtaatcccaacactttgggaggccaaggcaggtagatcacttgatgccaggagttccagaccaggctggccgacatggtgaaaccccatctctactaaaaaatataaaaattagccgggctttgtggcatgtgcctgtaatcccagctatttggcaggctgaggcatgagaatcgcttgaacccaggaggtggaggttacagtgagctgagagtgccccactgcactccagcctgggtgacagagcgagactttgtcccaaaacaaaataggtgaggggatagcgaatgcactcagggtcagcagtggagtttaaaaattgtctcttttcaacttatttaaatgacagcacctgagaagaggaaccgttttacactggatgtttctcatgtagaacaagaaatctttctggaattgatgtttacatgtctgttgttggtcatctctcctgtgtcttaaatactttaatgttggaagagcatagtgtttgggctagtgggtttctgacagcccatgggaatgccctgaaactactgtatctgatgtttgttttcgatgaggttccatgttttgttttcttgggaataaattaatatattgttttcca

SEQ ID NO: 118059 - DNA, 1203 bp, Artificial Sequence
  derived and/or modified sequence
atgcccctgtccatgagatacctgttcatcatctctgtgtcctctgtcatcatcttcatcgtgttttctgtgttcaactttggaggagaccccagcttccagaggctgaacatcagtgaccccctgcggctgacccaggtgtgcaccagcttcatcaatggcaagacccgcttcctgtggaagaacaagctgatgattcatgagaagagcagctgcaaggagtacctgacccagagccactacatcacagcccccctgagcaaggaggaggccgacttccccctggcctacatcatggtgatccaccaccactttgacacctttgcccggctcttccgggccatctacatgccccagaacatctactgtgtgcacgtggatgagaaggccaccacagagttcaaggatgctgtggagcagctgctgagctgcttccccaatgccttcctggccagcaagatggagcctgtggtgtatggaggcatcagccggctgcaggccgacctgaactgcatccgggacctgagcgcctttgaggtgtcctggaagtatgtgatcaacacctgtggccaggacttccccctgaagaccaacaaggagatcgtgcagtacctgaagggcttcaagggcaagaacatcaccccaggagtgctgcccccagcccacgccatcggccgcaccaagtatgtgcaccaggagcacctgggcaaggagctgtcctatgtgatccgcaccacagccctgaagcccccaccaccccacaacctgaccatctacttcggcagcgcctacgtggccctgagccgggagtttgccaactttgtgctgcatgaccccagggctgtggacctgctgcagtggagcaaggacaccttctccccagatgagcacttctgggtgaccctgaaccgcatccctggggtgcccggctccatgcccaatgcctcctggacaggcaacctgcgggccatcaagtggagcgacatggaggacagacatggaggctgccacggccactacgtgcacggcatctgcatctatggaaatggagacctgaagtggctggtgaacagccccagcctgtttgccaacaagtttgagctgaacacctaccccctgactgtggagtgcctggagctgcggcaccgggagaggaccctgaaccagagcgagacagccatccagcccagctggtacttctag

SEQ ID NO: 118060 - DNA, 1203 bp, Artificial Sequence
  derived and/or modified sequence
atgcccctgagcatgcggtacctgttcatcatcagcgtgagcagcgtgattatcttcatagtcttcagcgtgttcaactttggaggcgacccgtcattccagcggcttaacattagcgaccctctgaggctgacccaggtttgtactagctttatcaacggaaagacacggttcctttggaaaaataagcttatgattcacgaaaagtcctcttgtaaggagtatctgactcagtcccattacataaccgctccgttgtcaaaggaggaggcagattttcctctagcatacattatggtcattcatcaccacttcgatactttcgctcggctctttcgcgccatatacatgcctcagaatatctattgcgttcatgtggacgaaaaggccacaactgagtttaaggacgccgtagagcagctgctttcatgctttcccaatgcattcctcgcaagtaaaatggagccagtggtgtatgggggcattagccgcctccaggctgacctcaactgtattcgggacttgagcgccttcgaagtcagctggaaatatgtgattaacacttgtggccaagacttcccattgaagactaacaaggaaatcgtccagtatctgaaaggatttaaaggaaagaacattactcccggagttctgccccccgcccacgcaatcggaaggactaagtacgtgcaccaggagcatcttggtaaagagctgagctacgtcatcagaaccactgctctgaagccccccccgccacataacctcacgatatacttcggctctgcgtatgtcgcgctttcgagggagtttgcaaatttcgtgctgcatgaccctagggcggtggatctcctgcagtggtctaaggacacgttttctccagacgagcacttctgggtcacattaaataggattcccggagtacctggaagcatgcccaatgcctcctggaccggcaatctgagagctataaaatggtccgacatggaggaccgtcacgggggatgccatggacactacgtgcatgggatctgcatctacggcaacggggacctgaaatggctagtcaattcccccagtcttttcgctaataagtttgagctgaacacatacccactgactgtggagtgcctcgaactccgccacagggaaaggacgctcaaccaaagcgaaacagcgatccagccgtcctggtatttctag

SEQ ID NO: 118061 - DNA, 1203 bp, Artificial Sequence
  derived and/or modified sequence
atgcctttatctatgcgatatttgttcataatcagtgtgtcatccgtcattatctttatcgtcttctctgtttttaattttgggggagacccgagctttcaacgcttaaatatttctgatccactgaggctgactcaggtttgtacctcattcattaatggcaagacacgtttcctctggaagaataagctaatgatacacgaaaaaagcagctgcaaagagtacctgacccaaagccactacatcacagcgcctctgtccaaggaagaggccgacttccctcttgcctacataatggtgatccatcaccattttgatacattcgccaggttatttcgagccatctacatgccacagaatatatattgcgtgcacgtggacgaaaaagccaccactgagttcaaggacgcagtggaacagctgctgtcctgttttccaaatgccttcctggcctccaagatggagccagtggtttacggcggaatctctcgcttgcaggcagacctgaactgtatccgagatctcagcgcttttgaagtcagctggaagtacgtaattaacacgtgcggacaggatttccctctgaagacaaataaggagattgtgcaatacctaaaaggctttaaaggtaaaaatatcaccccaggcgttctcccgcctgcccacgctataggcagaaccaagtacgtacaccaggagcaccttggcaaggagttaagctacgttatccgcaccaccgctctgaaaccgcctccaccacacaacctcaccatttacttcggatcagcttacgtcgccctgtctcgcgaatttgcaaatttcgtcctgcacgatccccgtgctgtggatttgctgcagtggtctaaggacacctttagcccggatgagcatttttgggtcaccctcaataggataccgggagtcccgggaagcatgccaaacgcgagctggaccggtaacctgcgcgcaattaaatggtcagatatggaagaccgccacggaggctgccacggccactacgtgcatggtatttgtatttatggcaatggcgacttgaaatggcttgtgaattcgccgtccctctttgctaacaagtttgagctgaacacttacccccttacggtggagtgtttggagctgaggcatcgagaacggactctgaaccagagcgaaactgctattcaaccctcttggtacttctag

SEQ ID NO: 118062 - DNA, 1203 bp, Artificial Sequence
  derived and/or modified sequence
atgcccctgagcatgagatacctgttcatcatcagcgtgagcagcgtgatcatcttcatcgtgttcagcgtgttcaacttcggcggcgaccccagcttccagagactgaacatcagcgaccccctgagactgacccaggtgtgcaccagcttcatcaacggcaagaccagattcctgtggaagaacaagctgatgatccacgagaagagcagctgcaaggagtacctgacccagagccactacatcaccgcccccctgagcaaggaggaggccgacttccccctggcctacatcatggtgatccaccaccacttcgacaccttcgccagactgttcagagccatctacatgccccagaacatctactgcgtgcacgtggacgagaaggccaccaccgagttcaaggacgccgtggagcagctgctgagctgcttccccaacgccttcctggccagcaagatggagcccgtggtgtacggcggcatcagcagactgcaggccgacctgaactgcatcagagacctgagcgccttcgaggtgagctggaagtacgtgatcaacacctgcggccaggacttccccctgaagaccaacaaggagatcgtgcagtacctgaagggcttcaagggcaagaacatcacccccggcgtgctgccccccgcccacgccatcggcagaaccaagtacgtgcaccaggagcacctgggcaaggagctgagctacgtgatcagaaccaccgccctgaagcccccccccccccacaacctgaccatctacttcggcagcgcctacgtggccctgagcagagagttcgccaacttcgtgctgcacgaccccagagccgtggacctgctgcagtggagcaaggacaccttcagccccgacgagcacttctgggtgaccctgaacagaatccccggcgtgcccggcagcatgcccaacgccagctggaccggcaacctgagagccatcaagtggagcgacatggaggacagacacggcggctgccacggccactacgtgcacggcatctgcatctacggcaacggcgacctgaagtggctggtgaacagccccagcctgttcgccaacaagttcgagctgaacacctaccccctgaccgtggagtgcctggagctgagacacagagagagaaccctgaaccagagcgagaccgccatccagcccagctggtacttctag

SEQ ID NO: 118063 - protein, 372 aa, Artificial Sequence
  derived and/or modified sequence
MPPPQQGPCGHHLLLLLALLLPSLPLTRAPVPPGPAAALLQALGLRDEPQGAPRLRPVPPVMWRLFRRRDPQETRSGSRRTSPGVTLQPCHVEELGVAGNIVRHIPDRGAPTRASEPASAAGHCPEWTVVFDLSAVEPAERPSRARLELRFAAAAAAAPEGGWELSVAQAGQGAGADPGPVLLRQLVPALGPPVRAELLGAAWARNASWPRSLRLALALRPRAPAACARLAEASLLLVTLDPRLCHPLARPRRDAEPVLGGGPGGACRARRLYVSFREVGWHRWVIAPRGFLANYCQGQCALPVALSGSGGPPALNHAVLRALMHAAAPGAADLPCCVPARLSPISVLFFDNSDNVVLRQYEDMVVDECGCR

SEQ ID NO: 118064 - DNA, 2558 bp, Artificial Sequence
  derived and/or modified sequence
acgcggggcgcgcggctccgtcggctaccgcgggcgggcgcaggcgacgggcacggcgggcgagcgggcggtatggcggcggcggggcccgcggcggggccgacggggcccgagcccatgccgagctacgcgcagctagtgcagcgcggctggggcagcgcgctggcggcggcgcggggctgcacggactgcggctgggggctggcgcgtcgcggcctggctgagcacgcgcacctggcgccgcccgagctgctgctgctggcgctcggcgcgctgggctggaccgccctgcgctccgcggccactgcgcgcctctttcggcccctggcgaagcggtgctgcctccagcccagagatgccgccaagatgcccgagagcgcttggaagtttctcttctacctgggcagctggagctacagtgcctacctgctgtttggcaccgactaccccttcttccatgacccaccatctgtcttctacgactggacgccgggcatggcagtgccacgggacattgcagccgcctacctgctccagggaagcttctatggccactccatctacgctacgctatacatggacacctggcgcaaggactcggtggtcatgctgctccaccacgtggtcactctcatcctcatcgtctcctcctacgccttccggtaccacaatgtgggcatccttgtgctcttcctgcacgatatcagtgacgtgcagcttgagttcaccaagctcaacatttacttcaagtcccgcggcggctcctaccatcggctgcatgccttggcagcagacttgggctgcctcagcttcggcttcagctggttctggttccgcctctactggttcccgctcaaggtcctgtatgccaccagtcactgcagtctgcgcacggtgcctgacatccccttctacttcttcttcaatgcgctcctgctgctgctcacccttatgaacctctactggttcctgtacatcgtggcgtttgcagccaaggtgttgacaggccaggtgcacgagctgaaggacctgcgggagtatgacacagccgaggcccagagcctgaagcccagcaaagccgagaagccactgaggaacggcctggtgaaggacaagcgcttctgaacccctcggccccgcccccgtggacccggccccaccccgaataccccggccacgctccccgtccttggccgcccctccaccccctccaactctgctcctctagggccgccgccacctcccctgggaccccgccccctcatcctgcctccagttcccggccacgccccccaggacccctgcccctccggggacaccggccccgccctcagcccactggtcccgggccgccgcggaccctgcgcactctctggtcatcgcctgggaggaagatgccaccgccgcagcaaggtccctgcggccaccacctcctcctcctcctggccctgctgctgccctcgctgcccctgacccgcgcccccgtgcccccaggcccagccgccgccctgctccaggctctaggactgcgcgatgagccccagggtgcccccaggctccggccggttcccccggtcatgtggcgcctgtttcgacgccgggacccccaggagaccaggtctggctcgcggcggacgtccccaggggtcaccctgcaaccgtgccacgtggaggagctgggggtcgccggaaacatcgtgcgccacatcccggaccgcggtgcgcccacccgggcctcggagcctgcctcggccgcggggcattgccctgagtggacagtcgtcttcgacctgtcggctgtggaacccgctgagcgcccgagccgggcccgcctggagctgcgtttcgcggcggcggcggcggcagccccggagggcggctgggagctgagcgtggcgcaagcgggccagggcgcgggcgcggaccccgggccggtgctgctccgccagttggtgcccgccctggggccgccagtgcgcgcggagctgctgggcgccgcttgggctcgcaacgcctcatggccgcgcagcctccgcctggcgctggcgctacgcccccgggcccctgccgcctgcgcgcgcctggccgaggcctcgctgctgctggtgaccctcgacccgcgcctgtgccaccccctggcccggccgcggcgcgacgccgaacccgtgttgggcggcggccccgggggcgcttgtcgcgcgcggcggctgtacgtgagcttccgcgaggtgggctggcaccgctgggtcatcgcgccgcgcggcttcctggccaactactgccagggtcagtgcgcgctgcccgtcgcgctgtcggggtccggggggccgccggcgctcaaccacgctgtgctgcgcgcgctcatgcacgcggccgccccgggagccgccgacctgccctgctgcgtgcccgcgcgcctgtcgcccatctccgtgctcttctttgacaacagcgacaacgtggtgctgcggcagtatgaggacatggtggtggacgagtgcggctgccgctaacccggggcgggcagggacgcgggcccaacaataaatgccgcgtgg

SEQ ID NO: 118065 - DNA, 1119 bp, Artificial Sequence
  derived and/or modified sequence
atgccgcccccccagcaggggccatgcggccatcacctgttgctgttactcgccctcctgttgcctagcctaccgcttacccgcgctccagtcccacccgggcctgcggccgccctactgcaggccttggggttacgcgatgaaccacagggtgccccgaggctgcgaccagttccccctgtgatgtggaggcttttcagacggagggacccccaagagactcgatctgggtcacggcggacttcacctggggtaacactgcaaccttgccatgtagaagagctgggggtagctggaaatatagtgaggcatatcccggatcgcggtgctcccacgagggctagtgaacccgctagtgccgcaggccactgtcctgaatggaccgttgtctttgacttgtctgctgtcgagcccgcagagagacccagccgtgccaggctagagctccgcttcgcggccgccgctgccgccgcgcctgagggcggatgggaactgagtgtggcgcaagccggacagggcgctggcgccgacccggggccggtcctccttcggcaactggtccccgccctaggccctcctgttcgagccgagctgctcggtgctgcgtgggcaagaaacgcctcttggccacggagtctgcgccttgccctcgcccttagacctcgcgcacctgcagcatgcgccaggttagccgaagcttctctgctcttagtgactcttgatccgagattgtgccatccgttagcccggccccgcagagatgctgaaccagtgttagggggcggtccggggggggcttgtcgagcgagaagattgtatgtgtccttccgtgaagtcggatggcatcggtgggtcatcgcccctagagggttcttggccaattattgccagggccagtgcgcgctccccgtcgccctctccggatcaggaggtcctcccgcccttaaccacgcagtgctgcgggccctaatgcatgccgccgctccaggcgccgctgacctgccatgttgtgtcccagcgcggctcagccctatttctgtcctgttttttgacaactcagacaacgtggttctgaggcagtacgaggatatggtggtcgacgagtgtgggtgcaggtag

SEQ ID NO: 118066 - DNA, 1119 bp, Artificial Sequence
  derived and/or modified sequence
atgcccccaccccagcagggcccctgtggccaccacctgctgctgctgctggccctgctgctgcccagcctgcccctgacccgggcccctgtgcccccaggccctgctgctgccctgctgcaggccctgggcctgagagatgagccccagggcgccccccggctgcggcctgtgccccctgtgatgtggaggctcttcagaagaagagacccccaggagaccaggagcggcagcaggaggaccagccctggggtgaccctgcagccctgccacgtggaggagctgggcgtggccggcaacatcgtgcgccacatcccagacagaggagcccccacccgggccagcgagcccgccagcgctgctggccactgcccagagtggacagtggtgtttgacctgtctgctgtggagcctgctgagcggcccagccgggcccggctggagctgcgctttgctgctgctgctgctgctgcccctgagggcggctgggagctgtctgtggcccaggccggccagggcgctggagctgaccccggccctgtgctgctgcggcagctggtgcctgccctgggcccccctgtgcgggcagagctgctgggcgccgcctgggccagaaatgcctcctggcccaggagcctgcggctggccctggccctgcggccccgggccccagctgcctgtgcccggctggccgaggccagcctgctgctggtgaccctggacccccggctgtgccaccccctggcccggcccaggagagatgctgagcctgtgctgggcggcggccctggaggagcctgccgggcccggcggctgtatgtgtccttccgggaggtgggctggcaccgctgggtgattgccccccggggcttcctggccaactactgccagggccagtgtgccctgcctgtggccctgagcggcagcggcggccccccagccctgaaccacgctgtgctgcgggccctgatgcacgccgccgcccctggagctgctgacctgccctgctgcgtgcctgcccggctgagccccatctctgtgctcttctttgacaacagcgacaacgtggtgctgcggcagtatgaggacatggtggtggatgaatgtggctgcaggtag

SEQ ID NO: 118067 - DNA, 1119 bp, Artificial Sequence
  derived and/or modified sequence
atgccccccccccagcagggcccctgcggccaccacctgctgctgctcctggccctgctgcttccctctctccccctgactcgggcacccgtccctcccgggccggccgctgcattgcttcaggctctcgggctgcgggacgaaccccagggcgcaccccggttgaggccagtgccccccgttatgtggcgcctcttcaggagaagggacccacaggagacacggtctggcagcagaagaactagcccgggggtgaccttgcagccatgccatgtggaagaactgggcgtcgccggcaacatcgtcaggcatattcccgatcgtggggccccaacccgagcgtctgagccagcctctgccgcgggtcactgtcctgaatggacagttgtgttcgaccttagtgctgtggagcccgcggagcggccatcgagagcaagactggagttgcgattcgccgcagcagctgccgctgcacctgagggtggctgggagctctcagtggcccaggccgggcagggcgctggcgccgacccagggccggtgctcttgcgacagctagtaccagccttaggacctccagtgcgtgcggagctgctcggagcagcctgggcaaggaatgcctcttggccacggtcactgcgcctggcccttgcgctccgaccccgcgcacccgctgcgtgtgcaaggctggccgaagcctctctgctattggtcacccttgaccctaggctctgccacccactggccagaccgcgacgcgacgccgaacccgttctcgggggaggaccaggcggggcttgccgtgcccgtagactgtatgtttccttccgggaagtcggctggcaccggtgggtaatcgccccccgtggctttctggctaactactgtcaggggcagtgtgctctgcctgtcgccctgtcaggtagtggcggcccaccggctctgaatcatgctgttctgcgggccctgatgcatgccgcagcaccaggtgccgctgatctgccgtgctgcgtgcccgcgcggctgagtcctatctcagttctgttcttcgataatagtgataacgtcgtacttagacagtacgaggatatggtcgtcgatgaatgcgggtgtcggtag

SEQ ID NO: 118068 - DNA, 1119 bp, Artificial Sequence
  derived and/or modified sequence
atgcctccaccccagcagggcccatgcggccaccacctgctgttactgctggccctacttctgccttcactgcccctcacaagagctccagtgcctcctggtccggctgcagcgctgctgcaggcactcgggctgcgggacgaaccacagggagcacctcggctccgtcctgtgcctccagttatgtggagattgtttcgcagaagagatccccaggagacccgcagtggctcacgacgcacatctcccggagttacccttcaaccctgccacgtggaagagctgggtgtcgccggaaacatcgttcgccatattcctgaccgcggagcgcctaccagggccagtgaacctgcctcagcagccggtcactgcccagagtggaccgtcgtttttgatctgtcggctgtagagcctgcagagagaccatcccgggctcgcctcgaacttcggtttgcagctgctgcggcagccgctcctgaaggcggatgggagttgagtgtggcccaagctggccagggggctggagccgaccccggacctgttctactgcgccaactggtgccggcactcggccctcccgtgcgtgccgagctgctgggggctgcttgggccagaaacgcgtcatggcctcgatcactccggctggctctcgcgctccgcccaagggcaccagctgcctgcgccaggttagccgaagcatccctacttctcgtgacgctcgacccacgcctgtgccacccactagccagaccacgccgagatgccgagcccgtgcttggaggtggccctggaggtgcttgccgggctcgacggctatatgtaagcttccgggaagttggttggcataggtgggttattgctccgaggggtttcctcgccaactactgccagggacagtgtgccttgccagtcgctctgtcaggctcaggcggtcctcctgcacttaatcacgcagtcctccgggctctcatgcatgccgctgcacccggagccgcagaccttccgtgttgcgtgcccgctagactttccccgatttccgtcctgtttttcgacaatagcgataacgtcgttcttcgccagtacgaggatatggttgttgacgagtgcgggtgtagatag

SEQ ID NO: 118069 - DNA, 1119 bp, Artificial Sequence
  derived and/or modified sequence
atgccccccccccagcagggcccctgcggccaccacctgctgctgctgctggccctgctgctgcccagcctgcccctgaccagagcccccgtgccccccggccccgccgccgccctgctgcaggccctgggcctgagagacgagccccagggcgcccccagactgagacccgtgccccccgtgatgtggagactgttcagaagaagagacccccaggagaccagaagcggcagcagaagaaccagccccggcgtgaccctgcagccctgccacgtggaggagctgggcgtggccggcaacatcgtgagacacatccccgacagaggcgcccccaccagagccagcgagcccgccagcgccgccggccactgccccgagtggaccgtggtgttcgacctgagcgccgtggagcccgccgagagacccagcagagccagactggagctgagattcgccgccgccgccgccgccgcccccgagggcggctgggagctgagcgtggcccaggccggccagggcgccggcgccgaccccggccccgtgctgctgagacagctggtgcccgccctgggcccccccgtgagagccgagctgctgggcgccgcctgggccagaaacgccagctggcccagaagcctgagactggccctggccctgagacccagagcccccgccgcctgcgccagactggccgaggccagcctgctgctggtgaccctggaccccagactgtgccaccccctggccagacccagaagagacgccgagcccgtgctgggcggcggccccggcggcgcctgcagagccagaagactgtacgtgagcttcagagaggtgggctggcacagatgggtgatcgcccccagaggcttcctggccaactactgccagggccagtgcgccctgcccgtggccctgagcggcagcggcggcccccccgccctgaaccacgccgtgctgagagccctgatgcacgccgccgcccccggcgccgccgacctgccctgctgcgtgcccgccagactgagccccatcagcgtgctgttcttcgacaacagcgacaacgtggtgctgagacagtacgaggacatggtggtggacgagtgcggctgcagatag

SEQ ID NO: 118070 - protein, 417 aa, Artificial Sequence
  derived and/or modified sequence
MDEEYDVIVLGTGLTECILSGIMSVNGKKVLHMDRNPYYGGESSSITPLEELYKRFQLLEGPPESMGRGRDWNVDLIPKFLMANGQLVKMLLYTEVTRYLDFKVVEGSFVYKGGKIYKVPSTETEALASNLMGMFENDPKTFEGVDPQTTSMRDVYRKFDLGQDVIDFTGHALALYRTDDYLDQPCLETVNRIKLYSESLARYGKSPYLYPLYGLGELPQGFARLSAIYGGTYMLNKPVDDIIMENGKVVGVKSEGEVARCKQLICDPSYIPDRVRKAGQVIRIICILSHPIKNTNDANSCQIIIPQNQVNRKSDIYVCMISYAHNVAAQGKYIAIASTTVETTDPEKEVEPALELLEPIDDGCESQVFCSCSYDATTHFETTCNDIKDIYKRMAGTAFDFENMKRKQNDVFGEAEQ

SEQ ID NO: 118071 - protein, 447 aa, Artificial Sequence [sequence omitted]

SEQ ID NO: 118072 - DNA, 1254 bp, Artificial Sequence
  derived and/or modified sequence
atggatgaggaatatgatgtgattgttcttggaactggcctaaccgaatgtatactgtccggcatcatgtcagtgaatggaaagaaggttttgcatatggaccggaatccctattacggtggcgaatcatccagcatcacaccattggaagaactgtataagcgtttccagcttcttgaaggcccacccgaaagcatgggccgggggagagattggaatgtggacctgatccccaagtttctgatggccaacgggcaactcgtgaaaatgctcctgtatactgaggttaccagatacctggatttcaaagtcgtggaggggtctttcgtgtacaaaggcggtaaaatttacaaagtccccagcaccgagacagaggcattagcctcaaatctgatgggcatgttcgaaaacgatccgaaaacatttgaaggtgtggatccacaaaccacatctatgagagacgtttacaggaagtttgacttaggccaggatgtgatcgatttcacaggtcacgctcttgctctctaccggacagacgactacctagaccagccatgccttgaaactgtgaatagaatcaaactttattccgagtcactggcgcggtatggaaagtctccatatctttatccactgtacggcctcggtgaacttccccagggctttgctcgattgtcggctatctatggtggcacctatatgttgaataagcccgttgacgacatcattatggagaacggcaaggttgtcggagtaaagagcgagggagaggtcgctagatgcaagcagctaatttgtgacccgtcctacattcctgatagggtgcgcaaagccggccaggtcattaggatcatttgtatcttgtcccatccgatcaaaaacaccaacgatgctaactcttgccagattatcataccccaaaatcaagtcaaccgcaagtctgacatatacgtctgtatgatatcatatgcccacaacgttgctgcacaaggaaagtatattgccattgcaagcactacagtggaaaccacagaccctgagaaagaggtggagcccgctttggaactgttggagccaatcgacgatggctgtgaatctcaggtcttctgttcatgttcatacgatgctactacccactttgagactacttgcaatgatattaaagacatctataagcggatggccgggactgcatttgactttgaaaatatgaagcgtaagcagaatgacgtgtttggcgaagcagagcagtag

SEQ ID NO: 118073 - DNA, 1344 bp, Artificial Sequence
  derived and/or modified sequence
atggacgaagaatacgacgtgatcgtgctgggtaccggcctgacggagtgcatcttgtctggaattatgagcgtgaatggcaagaaggttcttcacatggataggaatccatattatggcggggagtcttcttcaatcacaccactggaggaactctataagaggttccaattgttggaagggccccccgaatccatgggcagaggacgcgattggaacgtggatctgattcctaagttcttaatggctaatggacagctggtgaagatgcttctgtacacggaggtgactagatacctggactttaaggtcgtcgaagggagtttcgtgtacaagggcgggaagatttacaaagtcccaagcaccgagacggaagcactggcctctaatctgatggggatgtttgaaaagagaaggtttcgcaagtttttggtgtttgtagctaactttgatgaaaacgatcctaagaccttcgaaggtgtggacccccagacgacatccatgcgggacgtctaccgtaaattcgaccttggacaggatgtgatcgatttcaccgggcatgctctggccctgtataggactgacgactatttagatcagccctgcctagagaccgtaaaccgcatcaaactgtactcggagtccttggcccgatacggcaagagcccttacctttatcctctgtacggattgggagagcttccccagggattcgcaaggctatccgccatttacggcggaacttatatgttgaataagccagtcgacgatatcattatggaaaatggcaaggtggtgggcgtgaagagtgaaggcgaggtggcccgctgcaagcagctgatctgtgacccttcttatataccagatagggtgagaaaggcaggacaagtcatccgcatcatctgcatcctatcacatcctattaagaatactaatgatgcaaacagctgccagattattattccccaaaaccaggtgaatagaaaatctgacatatatgtttgcatgatttcctacgcccacaatgtcgcggcccagggtaaatatattgctattgccagcaccaccgtggagactacagatcccgagaaagaagtcgagcctgctctggagctcctggagcccatcgatcaaaagttcgttgctatttccgatctgtacgagcctatcgacgacggctgtgagtctcaggtgttctgtagctgtagctacgacgccaccacccactttgagacaacttgtaatgacatcaaggatatctataagagaatggctggcaccgcctttgacttcgaaaatatgaaacgcaagcagaacgacgtctttggggaggccgagcagtag

SEQ ID NO: 118074 - DNA, 1495 bp, Artificial Sequence
  derived and/or modified sequence
atctttggtccagtgcggtggcggcggcggcggtggcggcggcgactgctgcggtgaaggaggaggaggagccgagcgggcgctggcaccgaggcctgaccatggacgaggaatacgatgtgatcgtgctggggaccggtctcaccgaatgcatcctgtcgggcatcatgtctgtgaacgggaagaaggtgctgcacatggaccggaacccctactacgggggcgagagctcctccatcacacccctggaggagctgtataagcgttttcagttgctggaggggccccctgagtcgatgggccgaggccgagactggaatgttgacctgattcccaaattcctcatggctaacgggcagctggtaaagatgctactgtatacagaggtgactcgctacctggacttcaaggtggtggagggcagctttgtctacaaggggggcaagatctacaaagtgccgtccactgagactgaggccttggcttccaatctgatgggcatgtttgagaatgaccccaagacctttgagggcgttgacccccagactaccagcatgcgtgacgtctaccggaagtttgatctgggccaggatgtcatcgatttcactggccatgccctggcgctctaccgcactgatgactacctggaccagccctgccttgagaccgtcaaccgcatcaagttgtacagtgagtccctggcccggtatggcaagagcccatatttatacccgctctacggcttgggcgagctgccccagggttttgcaagattgagtgccatctatggggggacatatatgctgaacaaacctgtggatgacatcatcatggagaacggcaaggtggtgggcgtgaagtctgagggagaggtggcccgctgcaagcagctgatctgtgaccccagctacatcccggaccgtgtgcggaaggctggccaggttatccgcatcatctgtatccttagccaccccatcaagaacaccaacgacgccaactcctgccaaataatcatcccccagaaccaggtcaacaggaagtcagacatctacgtgtgcatgatctcctatgcacacaacgtggcggcccagggcaagtacatagctattgccagcactactgtggagaccacggaccctgaaaaggaggtggagccggctctggagctgttggagcccattgatgatggttgtgagagccaggtgttctgttcctgctcctacgatgccaccacacactttgagacaacctgcaacgacatcaaagacatctacaaacgcatggctggcacggcctttgactttgagaacatgaagcgcaaacagaacgacgtctttggagaagctgagcagtgattgtggccgcccccagcccctgctgccccagcctgtgtctgttctcctcgagggctccagcatcctctgcttcccccaccacgttcccatcacccacctcattgatccactgaccaaatccttaaccctagcgatggctt

SEQ ID NO: 118075 - DNA, 2474 bp, Artificial Sequence
  derived and/or modified sequence
ctgggccgcagcaccggccgccggcccgccccgcccgccccgccccgcgcctctctagactctcggcgagcagcgtcgcccgcggagccgcgctggtgctgtggcccgggccctggcagccctcccgggaggcgagccggggaggcggtggcccctgccggttgcggcggggcgcgggaagaggcgggactctttgacgcggcggaggggtcgggcgacggccgacgcgccgccatctttggtccagtgcggtggcggcggcggcggtggcggcggcgactgctgcggtgaaggaggaggaggagccgagcgggcgctggcaccgaggcctgaccatggacgaggaatacgatgtgatcgtgctggggaccggtctcaccgaatgcatcctgtcgggcatcatgtctgtgaacgggaagaaggtgctgcacatggaccggaacccctactacgggggcgagagctcctccatcacacccctggaggagctgtataagcgttttcagttgctggaggggccccctgagtcgatgggccgaggccgagactggaatgttgacctgattcccaaattcctcatggctaacgggcagctggtaaagatgctactgtatacagaggtgactcgctacctggacttcaaggtggtggagggcagctttgtctacaaggggggcaagatctacaaagtgccgtccactgagactgaggccttggcttccaatctgatgggcatgtttgagaaacggcgcttccgcaagttcctggtgtttgtggcaaacttcgatgagaatgaccccaagacctttgagggcgttgacccccagactaccagcatgcgtgacgtctaccggaagtttgatctgggccaggatgtcatcgatttcactggccatgccctggcgctctaccgcactgatgactacctggaccagccctgccttgagaccgtcaaccgcatcaagttgtacagtgagtccctggcccggtatggcaagagcccatatttatacccgctctacggcttgggcgagctgccccagggttttgcaagattgagtgccatctatggggggacatatatgctgaacaaacctgtggatgacatcatcatggagaacggcaaggtggtgggcgtgaagtctgagggagaggtggcccgctgcaagcagctgatctgtgaccccagctacatcccggaccgtgtgcggaaggctggccaggttatccgcatcatctgtatccttagccaccccatcaagaacaccaacgacgccaactcctgccaaataatcatcccccagaaccaggtcaacaggaagtcagacatctacgtgtgcatgatctcctatgcacacaacgtggcggcccagggcaagtacatagctattgccagcactactgtggagaccacggaccctgaaaaggaggtggagccggctctggagctgttggagcccattgaccagaagtttgtggctatcagtgacttgtatgagcccattgatgatggttgtgagagccaggtgttctgttcctgctcctacgatgccaccacacactttgagacaacctgcaacgacatcaaagacatctacaaacgcatggctggcacggcctttgactttgagaacatgaagcgcaaacagaacgacgtctttggagaagctgagcagtgattgtggccgcccccagcccctgctgccccagcctgtgtctgttctcctcgagggctccagcatcctctgcttcccccaccacgttcccatcacccacctcattgatccactgaccaaatccttaaccctagcgatggcttgggagatggggggttggatagcatcctctttcttggcccttccttatcctaggaaaagagggttcctctccttgtgtgtgtctcttccccccacccctaattcttctgctctgtttgggaagacgtggaggaaaaggtgacttctgcccccaccgctcttacccccactgtagtggcctttggagatgcccccacctcccccccaccaactctcgcgtgttggagagaaggggccctcccagcacaaagttgcattcctcccccctaatttattctaatttattaactttgacccaccctttctgagcctgcagccttcccgtgtggcctgagggctgtcgagtgagctgccccagcccctcccagcccttgcccagcctgggggagtggggaaggcttgggcatggccccgttggaggttgatttgctgttttgtttcttgtctttgtgttctgtggtacttgctgagagaaaagaaaagtgagccaagcagaaggaggtgggaaaacggacccaaaccccagtgtgccctgccccatgcctttcctttagtggtgggaaacccttatcttgcaaagtgaatgtgtccccttccccaccctctagtgtatttcacagaaaacaaaacctcccaataaaacggttgaaacctgaa

SEQ ID NO: 118076 - DNA, 1254 bp, Artificial Sequence
  derived and/or modified sequence
atggatgaggagtatgatgtgattgtgctgggcaccggcctgacagagtgcatcctgagcggcatcatgtctgtgaatggcaagaaggtgctgcacatggacaggaacccctactatggaggagagagcagcagcatcacccccctggaggagctgtacaagcgcttccagctgctggagggccccccagagagcatgggccggggccgggactggaatgtggacctgatccccaagttcctgatggccaacggccagctggtgaagatgctgctgtacacagaggtgacccgctacctggacttcaaggtggtggagggcagctttgtgtacaagggcggcaagatctacaaggtgcccagcacagaaacagaggccctggccagcaacctgatgggcatgtttgaaaatgaccccaagacctttgagggcgtggacccccagaccacctccatgagagatgtgtacaggaagtttgacctgggccaggacgtcatcgacttcaccggccacgccctggccctgtacagaacagatgactacctggaccagccctgcctggagaccgtgaaccgcatcaagctgtacagcgagagcctggcccgctatggcaagagcccctacctgtaccccctgtatggcctgggggagctgccccagggctttgcccggctgagcgccatctatggaggcacctacatgctgaacaagcctgtggatgacatcatcatggagaatggcaaggtggtgggcgtgaagtctgagggggaggtggcccgctgcaagcagctgatctgtgaccccagctacatcccagacagagtgaggaaggccggccaggtgatccgcatcatctgcatcctgagccaccccatcaagaacaccaatgatgccaacagctgccagatcatcatcccccagaaccaggtgaacaggaagagtgacatctacgtgtgcatgatctcctatgcccacaacgtggccgcccagggcaagtacatcgccatcgccagcaccaccgtggagaccacagatcctgagaaggaggtggagcccgccctggagctgctggagcccattgatgatggctgtgagagccaggtgttctgcagctgcagctatgatgccaccacccactttgagaccacctgcaatgacatcaaggacatctacaagaggatggccggcacagcctttgattttgagaacatgaagaggaagcagaatgatgtgtttggagaggccgagcagtag

SEQ ID NO: 118077 - DNA, 1344 bp, Artificial Sequence
  derived and/or modified sequence
atggatgaggagtatgatgtgattgtgctgggcaccggcctgacagagtgcatcctgagcggcatcatgtctgtgaatggcaagaaggtgctgcacatggacaggaacccctactatggaggagagagcagcagcatcacccccctggaggagctgtacaagcgcttccagctgctggagggccccccagagagcatgggccggggccgggactggaatgtggacctgatccccaagttcctgatggccaacggccagctggtgaagatgctgctgtacacagaggtgacccgctacctggacttcaaggtggtggagggcagctttgtgtacaagggcggcaagatctacaaggtgcccagcacagaaacagaggccctggccagcaacctgatgggcatgtttgagaagaggcgcttcaggaagttcctggtgtttgtggccaactttgatgaaaatgaccccaagacctttgagggcgtggacccccagaccacctccatgagagatgtgtacaggaagtttgacctgggccaggacgtcatcgacttcaccggccacgccctggccctgtacagaacagatgactacctggaccagccctgcctggagaccgtgaaccgcatcaagctgtacagcgagagcctggcccgctatggcaagagcccctacctgtaccccctgtatggcctgggggagctgccccagggctttgcccggctgagcgccatctatggaggcacctacatgctgaacaagcctgtggatgacatcatcatggagaatggcaaggtggtgggcgtgaagtctgagggggaggtggcccgctgcaagcagctgatctgtgaccccagctacatcccagacagagtgaggaaggccggccaggtgatccgcatcatctgcatcctgagccaccccatcaagaacaccaatgatgccaacagctgccagatcatcatcccccagaaccaggtgaacaggaagagtgacatctacgtgtgcatgatctcctatgcccacaacgtggccgcccagggcaagtacatcgccatcgccagcaccaccgtggagaccacagatcctgagaaggaggtggagcccgccctggagctgctggagcccatcgaccagaagtttgtggccatcagtgacctgtatgagcccattgatgatggctgtgagagccaggtgttctgcagctgcagctatgatgccaccacccactttgagaccacctgcaatgacatcaaggacatctacaagaggatggccggcacagcctttgattttgagaacatgaagaggaagcagaatgatgtgtttggagaggccgagcagtag

SEQ ID NO: 118078 - DNA, 1254 bp, Artificial Sequence
  derived and/or modified sequence
atggacgaggagtacgacgtgatcgtgctgggcaccggcctgaccgaatgtattctgtccggtatcatgtccgtgaacgggaagaaggtgctgcacatggacaggaatccatattatggcggggaatctagcagcattactccacttgaggagctttataagaggtttcagcttcttgagggcccccctgagtctatgggacggggtagggactggaacgtggatctgatccctaagttcctcatggccaatggccagctcgttaaaatgctgctttacaccgaagtcactagatatctggattttaaagtggtcgaggggtcttttgtgtataagggaggcaagatttataaagttccctccacagagaccgaggcacttgcttccaacctcatggggatgttcgagaacgacccgaagacatttgaaggcgttgatccccagaccacttcaatgcgggatgtttatcgaaaatttgaccttggacaggatgtgatagactttacaggccatgcacttgccctgtatagaaccgacgactacttagaccagccatgcctcgaaactgtaaacagaattaagctgtactctgagagccttgcccgatacggaaagagcccttacttgtaccctttgtacggcctcggagagctgccacagggctttgccagattgagtgccatctacgggggaacctatatgctcaataagccagtcgacgacattatcatggagaatggtaaggtggtcggagtcaagtccgaaggtgaggtggcaaggtgtaagcagctcatctgcgaccccagttacattccggaccgagttaggaaagccgggcaggtgatccggatcatttgtattctatctcatccaatcaaaaataccaacgacgctaattcatgtcagataattattccgcagaaccaggtgaacagaaagtccgatatctacgtgtgcatgatctcatacgcgcataatgttgccgctcaggggaagtacatcgctatcgcctcgaccacggtggagacaacagatccagagaaggaggtggagcccgcactagaactgctggagcctatcgatgacggctgtgagagccaagtgttttgttcctgctcatacgatgccaccacacactttgagaccacatgcaacgacataaaggacatctacaagcgcatggccggcacagcgtttgatttcgagaacatgaaacgaaagcaaaatgatgttttcggggaagctgagcagtag

SEQ ID NO: 118079 - DNA, 1344 bp, Artificial Sequence
  derived and/or modified sequence
atggacgaggagtacgacgtgatcgtgctgggcaccggcctgaccgagtgtatccttagtgggataatgagtgtcaatgggaagaaggtcctccacatggaccggaatccttactatggaggggagtccagcagtataactcccttggaagagctgtataagcgcttccagttattggaaggacctccggaaagcatggggagaggtcgtgactggaacgtggatttgataccaaaattcttgatggccaacggacagttagttaagatgctgctatacaccgaagtgaccaggtacctggactttaaggtcgtggagggtagcttcgtctataaggggggcaagatatataaggttccaagcactgaaacagaagcccttgcatcgaatcttatgggaatgtttgagaagcggcgcttcagaaagttcctggtttttgtggccaacttcgacgaaaacgacccaaagactttcgagggtgtggaccctcagaccacatccatgagagatgtctaccgcaagttcgaccttggccaagacgtgatcgacttcactggccacgctttggccctatacaggacggatgattatctggatcagccatgcctcgaaacggtgaatcggattaagctttactcagaatccctggctcgatacggcaagtccccctatctttaccctctgtatggcctcggcgaactgcctcagggatttgcccggctctccgccatttacggcggcacctacatgctcaataagccagtggacgacatcatcatggaaaatggaaaggtggtgggtgtaaaatctgaaggcgaagtagcaaggtgcaagcagctgatctgcgacccttcctatatcccggatcgagtgcggaaggccggtcaggtgattagaatcatctgtatcctgagccatcccatcaagaatactaacgatgccaactcatgccagatcataattcctcagaatcaggtgaatcgtaagagcgatatctacgtctgtatgataagctatgcccacaatgtggctgcccaggggaaatatatagcaatcgcttctacaacagtggaaaccaccgacccggagaaggaggtcgaacccgctcttgaattgcttgagccaattgaccagaagtttgtagctatctcggatctctacgagcccattgacgatggctgtgaatctcaggtgttctgctcgtgcagttacgatgccacaacacattttgaaactacatgtaacgatattaaagatatctataaacgcatggctggtactgccttcgacttcgagaacatgaaacggaagcagaatgatgtgtttggggaagccgaacagtag

SEQ ID NO: 118080 - DNA, 1254 bp, Artificial Sequence
  derived and/or modified sequence
atggacgaggaatacgacgtaatcgtgttgggcaccggcctgactgagtgtattctcagcggaatcatgagcgtgaatgggaaaaaggtacttcatatggaccggaacccttattatggaggtgagagcagcagtatcacacccctagaagagctgtacaaacgtttccaacttctagaaggcccaccagaatccatgggtcgaggcagagattggaacgtggatctcatcccgaagtttctcatggctaatgggcagctcgtgaaaatgctcctgtatacagaggttacacggtatcttgatttcaaggtggtggaggggtccttcgtatacaaaggcggaaagatctataaagtgccgtccactgagacagaagcgctcgctagtaacctgatgggaatgttcgaaaacgatcccaaaacattcgaaggcgtcgatccccagacaacgtctatgagggatgtgtatagaaagttcgacctgggtcaggacgtaatcgacttcaccggacacgctctggcactgtaccggactgacgactaccttgaccagccatgcctggagaccgtgaatcgcatcaaactgtactctgagtctctggcaaggtacggcaaatccccatacctgtacccgctgtacggccttggggagctcccccaggggtttgccagactgtcagctatttatgggggaacttacatgcttaataaacctgtggatgatataattatggagaacggtaaggtcgtgggtgtgaagagcgaaggcgaagtggcaaggtgtaaacagttgatttgcgacccatcttacattcccgaccgggtgagaaaagcaggtcaggtgatcaggatcatctgtatcctgagccaccctatcaaaaataccaatgacgctaattcttgccaaatcatcattcctcaaaatcaggtgaatcgaaaaagtgacatttatgtttgcatgatatcttatgcccacaacgtggcagcgcaggggaagtatatcgcaatcgcatcaacaaccgtggaaaccaccgacccagaaaaggaggtggagcctgctctggaattgcttgagcccatagacgatggttgtgagtcccaggtattttgtagttgcagttacgacgccactacacattttgagaccacatgtaatgatatcaaagacatatataaacggatggcaggaaccgcatttgattttgaaaacatgaagaggaaacagaacgacgtcttcggggaagcggaacaatag

SEQ ID NO: 118081 - DNA, 1344 bp, Artificial Sequence
  derived and/or modified sequence
atggatgaagagtacgacgttatcgtgcttggaactgggctgaccgaatgcattctgtccggaattatgtctgtaaatgggaagaaggtgctgcacatggataggaacccctactatgggggtgaatccagcagcattacccctctagaggagctctacaaaaggttccagttgctcgagggacctccggagagcatggggcgaggtagggattggaacgtagacctcatcccaaaattcctcatggctaatggacagctcgtgaagatgctgctttatactgaggtgacccgttacctcgattttaaagtggtagaaggatcattcgtgtataagggagggaaaatttacaaagtgccaagtacggagactgaagcgctggcttctaatttaatgggcatgtttgagaaacgtagatttcgaaagttccttgtcttcgtggccaatttcgacgagaatgacccgaagaccttcgaaggggtggaccctcaaactacgagcatgcgcgacgtgtataggaaatttgatctggggcaggacgtgatcgactttactggacatgccctggcactgtatcgcaccgacgactatttggaccaaccctgcttggagactgtgaaccggataaagctatactccgaatccctggctaggtacggaaagagcccttacctgtacccattatacggactgggggagctcccacagggctttgctagactttcagctatttacggagggacctatatgctcaacaagcccgtggatgatatcattatggagaacggcaaagtggtgggcgtcaagtccgaaggcgaggtcgctcgatgcaagcaactaatctgcgatccttcatacatacctgacagagtccgcaaggcagggcaggtgattcgtatcatctgcatactgtcacaccctataaaaaacaccaatgatgccaatagttgtcaaatcataattccacagaaccaggtgaatagaaaatccgatatctatgtgtgtatgatcagttacgcccacaacgtggcagcgcaggggaaatatatagcaatcgcttctactactgtggagaccaccgatccagagaaagaagtagagccagctctcgagctgctggaacccattgatcagaaatttgtggctatatctgacctgtatgaaccaattgatgacggatgcgagagtcaagttttttgctcttgcagttatgacgctacaactcacttcgagacaacctgtaacgacattaaggacatctacaaacgtatggcaggtaccgccttcgactttgagaacatgaagcgcaaacaaaatgatgtgtttggcgaagcagagcagtag

SEQ ID NO: 118082 - DNA, 1254 bp, Artificial Sequence
  derived and/or modified sequence
atggacgaggagtacgacgtgatcgtgctgggcaccggcctgaccgagtgcatcctgagcggcatcatgagcgtgaacggcaagaaggtgctgcacatggacagaaacccctactacggcggcgagagcagcagcatcacccccctggaggagctgtacaagagattccagctgctggagggcccccccgagagcatgggcagaggcagagactggaacgtggacctgatccccaagttcctgatggccaacggccagctggtgaagatgctgctgtacaccgaggtgaccagatacctggacttcaaggtggtggagggcagcttcgtgtacaagggcggcaagatctacaaggtgcccagcaccgagaccgaggccctggccagcaacctgatgggcatgttcgagaacgaccccaagaccttcgagggcgtggacccccagaccaccagcatgagagacgtgtacagaaagttcgacctgggccaggacgtgatcgacttcaccggccacgccctggccctgtacagaaccgacgactacctggaccagccctgcctggagaccgtgaacagaatcaagctgtacagcgagagcctggccagatacggcaagagcccctacctgtaccccctgtacggcctgggcgagctgccccagggcttcgccagactgagcgccatctacggcggcacctacatgctgaacaagcccgtggacgacatcatcatggagaacggcaaggtggtgggcgtgaagagcgagggcgaggtggccagatgcaagcagctgatctgcgaccccagctacatccccgacagagtgagaaaggccggccaggtgatcagaatcatctgcatcctgagccaccccatcaagaacaccaacgacgccaacagctgccagatcatcatcccccagaaccaggtgaacagaaagagcgacatctacgtgtgcatgatcagctacgcccacaacgtggccgcccagggcaagtacatcgccatcgccagcaccaccgtggagaccaccgaccccgagaaggaggtggagcccgccctggagctgctggagcccatcgacgacggctgcgagagccaggtgttctgcagctgcagctacgacgccaccacccacttcgagaccacctgcaacgacatcaaggacatctacaagagaatggccggcaccgccttcgacttcgagaacatgaagagaaagcagaacgacgtgttcggcgaggccgagcagtag

SEQ ID NO: 118083 - DNA, 1344 bp, Artificial Sequence
  derived and/or modified sequence
atggacgaggagtacgacgtgatcgtgctgggcaccggcctgaccgagtgcatcctgagcggcatcatgagcgtgaacggcaagaaggtgctgcacatggacagaaacccctactacggcggcgagagcagcagcatcacccccctggaggagctgtacaagagattccagctgctggagggcccccccgagagcatgggcagaggcagagactggaacgtggacctgatccccaagttcctgatggccaacggccagctggtgaagatgctgctgtacaccgaggtgaccagatacctggacttcaaggtggtggagggcagcttcgtgtacaagggcggcaagatctacaaggtgcccagcaccgagaccgaggccctggccagcaacctgatgggcatgttcgagaagagaagattcagaaagttcctggtgttcgtggccaacttcgacgagaacgaccccaagaccttcgagggcgtggacccccagaccaccagcatgagagacgtgtacagaaagttcgacctgggccaggacgtgatcgacttcaccggccacgccctggccctgtacagaaccgacgactacctggaccagccctgcctggagaccgtgaacagaatcaagctgtacagcgagagcctggccagatacggcaagagcccctacctgtaccccctgtacggcctgggcgagctgccccagggcttcgccagactgagcgccatctacggcggcacctacatgctgaacaagcccgtggacgacatcatcatggagaacggcaaggtggtgggcgtgaagagcgagggcgaggtggccagatgcaagcagctgatctgcgaccccagctacatccccgacagagtgagaaaggccggccaggtgatcagaatcatctgcatcctgagccaccccatcaagaacaccaacgacgccaacagctgccagatcatcatcccccagaaccaggtgaacagaaagagcgacatctacgtgtgcatgatcagctacgcccacaacgtggccgcccagggcaagtacatcgccatcgccagcaccaccgtggagaccaccgaccccgagaaggaggtggagcccgccctggagctgctggagcccatcgaccagaagttcgtggccatcagcgacctgtacgagcccatcgacgacggctgcgagagccaggtgttctgcagctgcagctacgacgccaccacccacttcgagaccacctgcaacgacatcaaggacatctacaagagaatggccggcaccgccttcgacttcgagaacatgaagagaaagcagaacgacgtgttcggcgaggccgagcagtag

SEQ ID NO: 118084 - protein, 148 aa, Artificial Sequence
  derived and/or modified sequence
MSLGKRKPSNFYLANFLGKECILSGIMSVNGKKVLHMDRNPYYGGESASITPLEDLYKRFKIPGSPPESMGRGRDWNVDLIPKFLMANGQLVKMLLYTEVTRYLDFKVTEGSFVYKGGKIYKVPSTEAEALASSLMGLFEKRRFRKFL

SEQ ID NO: 118085 - protein, 449 aa, Artificial Sequence [sequence omitted]

SEQ ID NO: 118086 - protein, 208 aa, Artificial Sequence
  derived and/or modified sequence
MRDVYKKFDLGQDVIDFTGHALALYRTDDYLDQPCYETINRIKLYSESLARYGKSPYLYPLYGLGELPQGFARLSAIYGGTYMLNKPIEEIIVQNGKVIGVKSEGEIARCKQLICDPSYVKDRVEKVGQVIRVICILSHPIKNTNDANSCQIIIPQNQVNRKSDLLASVTSWYQKTWEQKARSLFPAHMMPPLILRQRVMTLKTSIRG

SEQ ID NO: 118087 - protein, 445 aa, Artificial Sequence
  derived and/or modified sequence
MNEEYDVIVLGTGLTECILSGIMSVNGKKVLHMDRNPYYGGESASITPLEDLYKRFKIPGSPPESMGRGRDWNVDLIPKFLMANGQLVKMLLYTEVTRYLDFKVTEGSFVYKGGKIYKVPSTEAEALASSLMGLFEKRRFRKFLVYVANFDEKDPRTFEGIDPKKTTMRDVYKKFDLGQDVIDFTGHALALYRTDDYLDQPCYETINRIKLYSESLARYGKSPYLYPLYGLGELPQGFARLSAIYGGTYMLNKPIEEIIVQNGKVIGVKSEGEIARCKQLICDPSYVKDRVEKVGQVIRVICILSHPIKNTNDANSCQIIIPQNQVNRKSDIYVCMISFAHNVAAQGKYIAIVSTTVETKEPEKEIRPALELLEPIEQKFVSISDLLVPKDLGTESQIFISRTYDATTHFETTCDDIKNIYKRMTGSEFDFEEMKRKKNDIYGED

SEQ ID NO: 118088 - protein, 155 aa, Artificial Sequence
  derived and/or modified sequence
MNEEYDVIVLGTGLTLYKRFKIPGSPPESMGRGRDWNVDLIPKFLMANGQLVKMLLYTEVTRYLDFKVTEGSFVYKGGKIYKVPSTEAEALASSLMGLFEKRRFRKFLVYVANFDEKDPRTFEGIDPKKTTMRDVYKKFDLGQDVIDFTGHALAL

SEQ ID NO: 118089 - protein, 203 aa, Artificial Sequence
  derived and/or modified sequence
KKFDLGQDVIDFTGHALALYRTDDYLDQPCYETINRIKLYSESLARYGKSPYLYPLYGLGELPQGFARLSAIYGGTYMLNKPIEEIIVQNGKVIGVKSEGEIARCKQLICDPSYVKDRVEKVGQVIRVICILSHPIKNTNDANSCQIIIPQNQVNRKSDLLASVTSWYQKTWEQKARSLFPAHMMPPLILRQRVMTLKTSIRG

SEQ ID NO: 118090 - protein, 263 aa, Artificial Sequence
  derived and/or modified sequence
MNEEYDVIVLGTGLTECILSGIMSVNGKKVLHMDRNPYYGGESASITPLEDLYKRFKIPGSPPESMGRGRDWNVDLIPKFLMANEVTRYLDFKVTEGSFVYKGGKIYKVPSTEAEALASSLMGLFEKRRFRKFLVYVANFDEKDPRTFEGIDPKKTTMRDVYKKFDLGQDVIDFTGHALALYRTDDYLDQPCYETINRIKLYSESLARYGKSPYLYPLYGLGELPQGFARLSAIYGGTYMLNKPIEEIIVQNGKVIGVKSEGE

SEQ ID NO: 118091 - DNA, 447 bp, Artificial Sequence
  derived and/or modified sequence
atgtcccttggcaagaggaaacccagcaatttctaccttgcaaacttcctggggaaggagtgcattctttctggtataatgagcgttaatggcaaaaaagtgcttcatatggatcgcaatccttattacggcggcgagagcgcatcaattaccccattggaggacctgtacaagaggtttaaaatccccggctcaccccccgagtccatgggtcgaggcagggattggaatgtggacctgattccaaagttcttgatggcaaatggccagctggtaaaaatgctgctatatactgaggttactcgatacttagactttaaggtgaccgaggggtcctttgtttataaggggggtaaaatttataaagttccctctactgaggcagaggcgttggcttcttctttaatgggcctgtttgagaaacggaggtttagaaaattcctatag

SEQ ID NO: 118092 - DNA, 1350 bp, Artificial Sequence
  derived and/or modified sequence
atgtccttaggaaagagaaaaccaagcaacttctatctggccaatttcttgggaaaggaatgtattctgagtggcattatgtccgttaatggaaagaaagtgctccatatggatcggaacccttattatggaggggagagcgcatccatcactccactggaagacctctataaaaggtttaagattcccggctcacctcccgaatcaatgggcagaggccgggattggaacgtggatcttatccccaaatttctgatggcgaatggccaactggtcaaaatgctcctctacaccgaggtgacacgctacctggattttaaagttaccgaaggatcgtttgtatataaagggggtaaaatatacaaagtacccagcactgaagctgaagctctggcgtcctccttaatggggcttttcgagaagcgcaggtttcggaagtttcttgtatatgttgccaatttcgatgaaaaagaccctcggacattcgaggggattgaccctaaaaagactaccatgcgggatgtgtacaaaaagtttgacctcggccaggacgttatcgatttcacggggcatgcccttgctctctacagaacagacgattatttagatcagccttgttacgaaaccatcaatcgcatcaaactgtatagcgagtcacttgcgaggtacgggaaaagcccgtatctctatccattatacggcctcggggagctcccccagggcttcgcccgcctcagtgcgatctatgggggcacctatatgctcaataaacccatagaggaaatcatcgtccaaaacggcaaggtcattggcgttaaaagcgagggcgaaattgctagatgcaagcagctgatttgcgacccctcttacgtgaaagatcgggttgaaaaggttggtcaagttattagagtaatatgtattctgagtcaccctatcaagaatactaacgacgccaactcatgccaaattattattccccagaatcaggtgaatcgcaagtcggatatctatgtttgcatgatcagttttgcacataacgtggcagctcagggtaaatacattgctatcgtcagtaccacagttgagacaaaggagccagagaaggaaattcgacctgcactggagctgctcgagcccatcgagcagaaattcgtgagcataagcgatctactggttcctaaggatctaggcacagaatcacagatttttattagccgcacctacgatgccacaacacatttcgaaacaacctgtgacgatatcaagaacatttacaagcgtatgacgggcagcgaattcgatttcgaagagatgaaacgcaaaaagaacgatatttacggagaggattag

SEQ ID NO: 118093 - DNA, 1338 bp, Artificial Sequence
  derived and/or modified sequence
atgaacgaggagtatgatgtgatcgtgttaggcaccggactgacagagtgtatcctctcaggtatcatgtccgtgaacggcaagaaggtactccacatggatcgcaatccatactacgggggcgagtctgccagtattacccctctggaggacctgtataagcgatttaaaatcccaggctcaccccccgagagcatggggaggggacgggattggaacgtggatcttatccccaaattcctcatggccaatggccagcttgtgaaaatgctgctctataccgaggtgactaggtacctcgattttaaagtgacggagggatcgtttgtctataagggtggcaagatctataaggtccccagtacagaagccgaagcgctcgccagttcccttatgggactctttgagaagcggcgcttccggaagttccttgtgtacgtggctaatttcgatgaaaaggacccccgcacttttgaagggatcgaccctaagaagaccaccatgagggatgtgtacaagaaatttgatctaggccaggacgtcatcgatttcacaggacacgcgttggccctttaccgaactgacgattacttagaccagccatgttacgaaacaatcaatcggattaaactgtactccgagagtctggccaggtacggcaaatctccgtacctgtatccactgtatggactgggtgaactgccacagggatttgccaggctttccgcgatttacggcggtacatacatgctcaataaaccaatagaagagatcattgtacagaatggaaaggttatcggagttaagtccgagggcgaaatagcccgctgcaaacagttaatttgcgacccctcatatgttaaagaccgggtggaaaaggtagggcaggtcatccgcgttatctgcatcctcagccaccccatcaagaacacaaacgatgccaactcttgtcagattataatcccacagaaccaagtgaatcgtaagagtgatatatacgtctgcatgatctcttttgcgcataacgttgccgcccagggtaaatacattgccatcgtgagtacgacagtggaaactaaagaacccgagaaggagatacgcccagcactggaactgctcgaacctatcgagcagaagttcgtctcaattagtgatctcctcgttccaaaggacttaggtaccgaaagccagatttttatatcaaggacctatgatgccacgactcacttcgagacaacgtgcgacgatataaagaatatatataaaagaatgactgggtctgagttcgacttcgaggagatgaagaggaagaaaaacgacatttatggtgaagactag

SEQ ID NO: 118094 - DNA, 468 bp, Artificial Sequence
  derived and/or modified sequence
atgaacgaagaatacgacgtcatcgtcttgggcaccggcttgaccctctacaagcgctttaaaatccccggcagtccacccgaatctatgggaagggggcgggactggaatgtcgatttgattcctaagtttcttatggcaaatgggcagctggtcaaaatgcttctgtacacggaagtgactcgctacttggacttcaaggtaacagaaggctcctttgtatacaaaggggggaagatttataaagtaccctccaccgaggccgaagccctcgccagctccttgatggggctgttcgaaaaaaggaggttcaggaagtttctagtgtatgtagctaactttgacgagaaagacccaaggacatttgaaggcatcgacccaaagaaaaccactatgagagatgtgtataaaaaatttgatctcggacaggacgtgatagactttaccggccatgctttggccctgtag

SEQ ID NO: 118095 - DNA, 792 bp, Artificial Sequence
  derived and/or modified sequence
atgaatgaggagtacgacgtgattgtgctgggcactggactcacagagtgcattctgtcaggcattatgagtgtcaacgggaaaaaagtactgcacatggacaggaatccatactacggtggggaaagtgctagcattacacctttggaggacctgtacaaaagattcaaaatccccgggtctccacccgaaagcatgggaaggggccgtgattggaacgttgacctcatcccaaaatttctgatggccaatgaggtcaccaggtacctcgactttaaagtcaccgaggggtcttttgtgtacaagggtggaaagatctataaggtgccatctaccgaagccgaagcactcgcgagttcgttaatggggctgttcgagaagaggagatttagaaagttcctggtgtatgttgcaaacttcgacgaaaaagacccccggacatttgaaggcattgatccgaagaaaacaactatgcgggatgtgtacaagaagtttgacctcggccaggatgtgattgactttacaggccacgcacttgcactttatcggacggatgattacctcgatcaaccttgctatgagacgattaatagaatcaaactatactcagagtctctggcacgctatggaaagtccccatacctgtatcctctgtacggtctcggcgagcttccgcaaggatttgcgaggctgagcgcaatttatggtggaacgtacatgttaaataaaccgatcgaggagattatcgtccagaacggaaaagtcatcggagttaaatcggagggtgagtag

SEQ ID NO: 118096 - DNA, 584 bp, Artificial Sequence
  derived and/or modified sequence
gaagcccccggaagcctccccagaagctgttgccggtgctatgcgacctgtacagcctgcagaaccaaagatccatggtccaatataacatatcttcttcaagtatttatggggtaacatcccaaaataacacttttagatgtctctaggcaagagaaaaccttcgaacttttatttggctaattttttaggaaaggaatgtatcctgtcaggtataatgtcagtgaatggcaagaaagttcttcatatggatcgaaacccttactacggaggagagagtgcatctataacaccattggaagatttatacaaaagatttaaaataccaggatcaccacccgagtcaatggggagaggaagagactggaatgttgacttgattcccaagttccttatggctaatggtcagctggttaagatgctgctttatacagaggtaactcgctatctggattttaaagtgactgaagggagctttgtctataagggtggaaaaatctacaaggttccttccactgaagcagaagccctggcatctagcctaatgggattgtttgaaaaacgtcgcttcaggaaattcctag

SEQ ID NO: 118097 - DNA, 1680 bp, Artificial Sequence
  derived and/or modified sequence
ttcttctcttcccgtctgaggtggcggtcggtctcgccttgtcgccagctccattttcctctctttctcttcccctttccttcgcgcccaagagcgcctcccagcctcgtagggtggtcacggagcccctgcgccttttccttgctcgggtcctgcgtccgcgcctgccccgccatgaatgaggagtacgacgtgatcgtgctgggcaccggcctgacggtaacatcccaaaataacacttttagatgtctctaggcaagagaaaaccttcgaacttttatttggctaattttttaggaaaggaatgtatcctgtcaggtataatgtcagtgaatggcaagaaagttcttcatatggatcgaaacccttactacggaggagagagtgcatctataacaccattggaagatttatacaaaagatttaaaataccaggatcaccacccgagtcaatggggagaggaagagactggaatgttgacttgattcccaagttccttatggctaatggtcagctggttaagatgctgctttatacagaggtaactcgctatctggattttaaagtgactgaagggagctttgtctataagggtggaaaaatctacaaggttccttccactgaagcagaagccctggcatctagcctaatgggattgtttgaaaaacgtcgcttcaggaaattcctagtgtatgttgccaacttcgatgaaaaagatccaagaacttttgaaggcattgatcctaagaagaccacaatgcgagatgtgtataagaaatttgatttgggtcaagacgttatagattttactggtcatgctcttgcactttacagaactgatgattacttagatcaaccgtgttatgaaaccattaatagaattaaactttacagtgaatctttggcaagatatggcaaaagcccatacctttatccactctatggccttggagaactgccccaaggatttgcaaggctaagtgctatttatggaggtacctatatgctgaataaacccattgaagaaatcattgtacagaatggaaaagtaattggtgtaaaatctgaaggagaaattgctcgctgtaagcagctcatctgtgaccccagctacgtaaaagatcgggtagaaaaagtgggccaggtgatcagagttatttgcatcctcagccaccccatcaagaacaccaatgatgccaactcctgccagatcattattccacagaaccaagtcaatcgaaagtcagatatctacgtctgcatgatctcctttgcgcacaatgtagcagcacaagggaagtacattgctatagttagtacaactgtggaaaccaaggagcctgagaaggaaatcagaccagctttggagctcttggaaccaattgaacagaaatttgttagcatcagtgacctcctggtaccaaaagacttgggaacagaaagccagatctttatttcccgcacatatgatgccaccactcattttgagacaacgtgtgatgacattaaaaacatctataagaggatgacaggatcagagtttgactttgaggaaatgaagcgcaagaagaatgacatctatggggaagactaacagcagtacatgttattatgtaattaggacacatttaaaatttggcaaataatgcatataatgaaatcaatattgtaaggcctgc

SEQ ID NO: 118098 - DNA, 2266 bp, Artificial Sequence
  derived and/or modified sequence
agagtgccgggagcgcctgattggcggccctcccggcgcctgcaggccccgccccggctgcggaggctcagtcacagccctcccctcctcgctccctcccctcctctccccgcccagttcttctcttcccgtctgaggtggcggtcggtctcgccttgtcgccagctccattttcctctctttctcttcccctttccttcgcgcccaagagcgcctcccagcctcgtagggtggtcacggagcccctgcgccttttccttgctcgggtcctgcgtccgcgcctgccccgccatgaatgaggagtacgacgtgatcgtgctgggcaccggcctgacggaatgtatcctgtcaggtataatgtcagtgaatggcaagaaagttcttcatatggatcgaaacccttactacggaggagagagtgcatctataacaccattggaagatttatacaaaagatttaaaataccaggatcaccacccgagtcaatggggagaggaagagactggaatgttgacttgattcccaagttccttatggctaatggtcagctggttaagatgctgctttatacagaggtaactcgctatctggattttaaagtgactgaagggagctttgtctataagggtggaaaaatctacaaggttccttccactgaagcagaagccctggcatctagcctaatgggattgtttgaaaaacgtcgcttcaggaaattcctagtgtatgttgccaacttcgatgaaaaagatccaagaacttttgaaggcattgatcctaagaagaccacaatgcgagatgtgtataagaaatttgatttgggtcaagacgttatagattttactggtcatgctcttgcactttacagaactgatgattacttagatcaaccgtgttatgaaaccattaatagaattaaactttacagtgaatctttggcaagatatggcaaaagcccatacctttatccactctatggccttggagaactgccccaaggatttgcaaggctaagtgctatttatggaggtacctatatgctgaataaacccattgaagaaatcattgtacagaatggaaaagtaattggtgtaaaatctgaaggagaaattgctcgctgtaagcagctcatctgtgaccccagctacgtaaaagatcgggtagaaaaagtgggccaggtgatcagagttatttgcatcctcagccaccccatcaagaacaccaatgatgccaactcctgccagatcattattccacagaaccaagtcaatcgaaagtcagatttgttagcatcagtgacctcctggtaccaaaagacttgggaacagaaagccagatctttatttcccgcacatatgatgccaccactcattttgagacaacgtgtgatgacattaaaaacatctataagaggatgacaggatcagagtttgactttgaggaaatgaagcgcaagaagaatgacatctatggggaagactaacagcagtacatgttattatgtaattaggacacatttaaaatttggcaaataatgcatataatgaaatcaatattgtaaggcctgcttttgtaatgaaaatggagagaatgaagagcgctgtgccagtaaatactccccttcacctttctaattattaacttgttttcatggagtggctattcagcattggcagttaccacattctgttcaatttaaccaaactggctttttttttttctagtgaagttaaacaaacattgggataccgacacagacaacttgagacagtttttttaatcttttaatcagtgtagctatgtgctgctgctgctcaagagctggatccatacaggttgtgtgtcatctgtcctcttgaggttcaggagattctaaattgaatattccacggtttgggacagcatccggaagttttccctatgactttatattttgtattatgtcaaatgttatggcagggcccaaatagcatagccacaagtttggtttatgtgggcataaaattctaaccaaaccccagacatagggagtcatttggagaaagcctgtatgtggtgttttaacctaataaagttgatgagagagaaggggagaggaagcgaacataaagcgggtcaagtgtagtgcatcttttgtatctcaggcgtggcttcttcagtggaccaagctgcaatgcagtattgacttgacagagcctctacttctgtctcaaaatggctccaaatgatttctgtactgcaaaataaagccaaattctggaaact

SEQ ID NO: 118099 - DNA, 2412 bp, Artificial Sequence
  derived and/or modified sequence
agagtgccgggagcgcctgattggcggccctcccggcgcctgcaggccccgccccggctgcggaggctcagtcacagccctcccctcctcgctccctcccctcctctccccgcccagttcttctcttcccgtctgaggtggcggtcggtctcgccttgtcgccagctccattttcctctctttctcttcccctttccttcgcgcccaagagcgcctcccagcctcgtagggtggtcacggagcccctgcgccttttccttgctcgggtcctgcgtccgcgcctgccccgccatgaatgaggagtacgacgtgatcgtgctgggcaccggcctgacggaatgtatcctgtcaggtataatgtcagtgaatggcaagaaagttcttcatatggatcgaaacccttactacggaggagagagtgcatctataacaccattggaagatttatacaaaagatttaaaataccaggatcaccacccgagtcaatggggagaggaagagactggaatgttgacttgattcccaagttccttatggctaatggtcagctggttaagatgctgctttatacagaggtaactcgctatctggattttaaagtgactgaagggagctttgtctataagggtggaaaaatctacaaggttccttccactgaagcagaagccctggcatctagcctaatgggattgtttgaaaaacgtcgcttcaggaaattcctagtgtatgttgccaacttcgatgaaaaagatccaagaacttttgaaggcattgatcctaagaagaccacaatgcgagatgtgtataagaaatttgatttgggtcaagacgttatagattttactggtcatgctcttgcactttacagaactgatgattacttagatcaaccgtgttatgaaaccattaatagaattaaactttacagtgaatctttggcaagatatggcaaaagcccatacctttatccactctatggccttggagaactgccccaaggatttgcaaggctaagtgctatttatggaggtacctatatgctgaataaacccattgaagaaatcattgtacagaatggaaaagtaattggtgtaaaatctgaaggagaaattgctcgctgtaagcagctcatctgtgaccccagctacgtaaaagatcgggtagaaaaagtgggccaggtgatcagagttatttgcatcctcagccaccccatcaagaacaccaatgatgccaactcctgccagatcattattccacagaaccaagtcaatcgaaagtcagatatctacgtctgcatgatctcctttgcgcacaatgtagcagcacaagggaagtacattgctatagttagtacaactgtggaaaccaaggagcctgagaaggaaatcagaccagctttggagctcttggaaccaattgaacagaaatttgttagcatcagtgacctcctggtaccaaaagacttgggaacagaaagccagatctttatttcccgcacatatgatgccaccactcattttgagacaacgtgtgatgacattaaaaacatctataagaggatgacaggatcagagtttgactttgaggaaatgaagcgcaagaagaatgacatctatggggaagactaacagcagtacatgttattatgtaattaggacacatttaaaatttggcaaataatgcatataatgaaatcaatattgtaaggcctgcttttgtaatgaaaatggagagaatgaagagcgctgtgccagtaaatactccccttcacctttctaattattaacttgttttcatggagtggctattcagcattggcagttaccacattctgttcaatttaaccaaactggctttttttttttctagtgaagttaaacaaacattgggataccgacacagacaacttgagacagtttttttaatcttttaatcagtgtagctatgtgctgctgctgctcaagagctggatccatacaggttgtgtgtcatctgtcctcttgaggttcaggagattctaaattgaatattccacggtttgggacagcatccggaagttttccctatgactttatattttgtattatgtcaaatgttatggcagggcccaaatagcatagccacaagtttggtttatgtgggcataaaattctaaccaaaccccagacatagggagtcatttggagaaagcctgtatgtggtgttttaacctaataaagttgatgagagagaaggggagaggaagcgaacataaagcgggtcaagtgtagtgcatcttttgtatctcaggcgtggcttcttcagtggaccaagctgcaatgcagtattgacttgacagagcctctacttctgtctcaaaatggctccaaatgatttctgtactgcaaaataaagccaaattctggaaacta

SEQ ID NO: 118100 - DNA, 636 bp, Artificial Sequence
  derived and/or modified sequence
ttctcttcccgtctgaggtggcggtcggtctcgccttgtcgccagctccattttcctctctttctcttcccctttccttcgcgcccaagagcgcctcccagcctcgtagggtggtcacggagcccctgcgccttttccttgctcgggtcctgcgtccgcgcctgccccgccatgaatgaggagtacgacgtgatcgtgctgggcaccggcctgacgttatacaaaagatttaaaataccaggatcaccacccgagtcaatggggagaggaagagactggaatgttgacttgattcccaagttccttatggctaatggtcagctggttaagatgctgctttatacagaggtaactcgctatctggattttaaagtgactgaagggagctttgtctataagggtggaaaaatctacaaggttccttccactgaagcagaagccctggcatctagcctaatgggattgtttgaaaaacgtcgcttcaggaaattcctagtgtatgttgccaacttcgatgaaaaagatccaagaacttttgaaggcattgatcctaagaagaccacaatgcgagatgtgtataagaaatttgatttgggtcaagacgttatagattttactggtcatgctcttgcactt

SEQ ID NO: 118101 - DNA, 918 bp, Artificial Sequence
  derived and/or modified sequence
cagctccattttcctctctttctcttcccctttccttcgcgcccaagagcgcctcccagcctcgtagggtggtcacggagcccctgcgccttttccttgctcgggtcctgcgtccgcgcctgccccgccatgaatgaggagtacgacgtgatcgtgctgggcaccggcctgacggaatgtatcctgtcaggtataatgtcagtgaatggcaagaaagttcttcatatggatcgaaacccttactacggaggagagagtgcatctataacaccattggaagatttatacaaaagatttaaaataccaggatcaccacccgagtcaatggggagaggaagagactggaatgttgacttgattcccaagttccttatggctaatgaggtaactcgctatctggattttaaagtgactgaagggagctttgtctataagggtggaaaaatctacaaggttccttccactgaagcagaagccctggcatctagcctaatgggattgtttgaaaaacgtcgcttcaggaaattcctagtgtatgttgccaacttcgatgaaaaagatccaagaacttttgaaggcattgatcctaagaagaccacaatgcgagatgtgtataagaaatttgatttgggtcaagacgttatagattttactggtcatgctcttgcactttacagaactgatgattacttagatcaaccgtgttatgaaaccattaatagaattaaactttacagtgaatctttggcaagatatggcaaaagcccatacctttatccactctatggccttggagaactgccccaaggatttgcaaggctaagtgctatttatggaggtacctatatgctgaataaacccattgaagaaatcattgtacagaatggaaaagtaattggtgtaaaatctgaaggagaa

SEQ ID NO: 118102 - DNA, 447 bp, Artificial Sequence
  derived and/or modified sequence
atgagcctgggcaagaggaagcccagcaacttctacctggccaacttcctgggcaaggagtgcatcctgagcggcatcatgtctgtgaatggcaagaaggtgctgcacatggacaggaacccctactatggaggagagagcgccagcatcacccccctggaggacctgtacaagcgcttcaagatccctggcagccccccagagagcatgggccggggccgggactggaatgtggacctgatccccaagttcctgatggccaacggccagctggtgaagatgctgctgtacacagaggtgacccgctacctggacttcaaggtgacagagggcagctttgtgtacaagggcggcaagatctacaaggtgcccagcacagaggccgaggccctggccagcagcctgatgggcctgtttgagaagaggcgcttcaggaagttcctgtag

SEQ ID NO: 118103 - DNA, 1350 bp, Artificial Sequence
  derived and/or modified sequence
atgagcctgggcaagaggaagcccagcaacttctacctggccaacttcctgggcaaggagtgcatcctgagcggcatcatgtctgtgaatggcaagaaggtgctgcacatggacaggaacccctactatggaggagagagcgccagcatcacccccctggaggacctgtacaagcgcttcaagatccctggcagccccccagagagcatgggccggggccgggactggaatgtggacctgatccccaagttcctgatggccaacggccagctggtgaagatgctgctgtacacagaggtgacccgctacctggacttcaaggtgacagagggcagctttgtgtacaagggcggcaagatctacaaggtgcccagcacagaggccgaggccctggccagcagcctgatgggcctgtttgagaagaggcgcttcaggaagttcctggtgtatgtggccaactttgatgagaaggaccccaggacctttgagggcatcgaccccaagaagaccaccatgagagatgtgtacaagaagtttgacctgggccaggacgtcatcgacttcaccggccacgccctggccctgtacagaacagatgactacctggaccagccctgctatgagaccatcaaccgcatcaagctgtacagcgagagcctggcccgctatggcaagagcccctacctgtaccccctgtatggcctgggggagctgccccagggctttgcccggctgagcgccatctatggaggcacctacatgctgaacaagcccatcgaggagatcatcgtgcagaatggcaaggtgattggagtgaagtctgagggggagatcgcccgctgcaagcagctgatctgtgaccccagctatgtgaaggacagagtggagaaggtgggccaggtgatccgggtcatctgcatcctgagccaccccatcaagaacaccaatgatgccaacagctgccagatcatcatcccccagaaccaggtgaacaggaagagtgacatctacgtgtgcatgatcagctttgcccacaacgtggccgcccagggcaagtacatcgccatcgtgtccaccaccgtggagaccaaggagcctgagaaggagatccggcctgccctggagctgctggagcccatcgagcagaagtttgtgtccatcagtgacctgctggtgcccaaggacctgggcacagagagccagatcttcatcagcaggacctatgatgccaccacccactttgagaccacctgtgatgacatcaagaacatctacaagaggatgactggaagtgaatttgattttgaggagatgaagaggaagaagaatgacatctacggggaggactag

SEQ ID NO: 118104 - DNA, 1338 bp, Artificial Sequence
  derived and/or modified sequence
atgaatgaggagtatgatgtgattgtgctgggcaccggcctgacagagtgcatcctgagcggcatcatgtctgtgaatggcaagaaggtgctgcacatggacaggaacccctactatggaggagagagcgccagcatcacccccctggaggacctgtacaagcgcttcaagatccctggcagccccccagagagcatgggccggggccgggactggaatgtggacctgatccccaagttcctgatggccaacggccagctggtgaagatgctgctgtacacagaggtgacccgctacctggacttcaaggtgacagagggcagctttgtgtacaagggcggcaagatctacaaggtgcccagcacagaggccgaggccctggccagcagcctgatgggcctgtttgagaagaggcgcttcaggaagttcctggtgtatgtggccaactttgatgagaaggaccccaggacctttgagggcatcgaccccaagaagaccaccatgagagatgtgtacaagaagtttgacctgggccaggacgtcatcgacttcaccggccacgccctggccctgtacagaacagatgactacctggaccagccctgctatgagaccatcaaccgcatcaagctgtacagcgagagcctggcccgctatggcaagagcccctacctgtaccccctgtatggcctgggggagctgccccagggctttgcccggctgagcgccatctatggaggcacctacatgctgaacaagcccatcgaggagatcatcgtgcagaatggcaaggtgattggagtgaagtctgagggggagatcgcccgctgcaagcagctgatctgtgaccccagctatgtgaaggacagagtggagaaggtgggccaggtgatccgggtcatctgcatcctgagccaccccatcaagaacaccaatgatgccaacagctgccagatcatcatcccccagaaccaggtgaacaggaagagtgacatctacgtgtgcatgatcagctttgcccacaacgtggccgcccagggcaagtacatcgccatcgtgtccaccaccgtggagaccaaggagcctgagaaggagatccggcctgccctggagctgctggagcccatcgagcagaagtttgtgtccatcagtgacctgctggtgcccaaggacctgggcacagagagccagatcttcatcagcaggacctatgatgccaccacccactttgagaccacctgtgatgacatcaagaacatctacaagaggatgactggaagtgaatttgattttgaggagatgaagaggaagaagaatgacatctacggggaggactag

SEQ ID NO: 118105 - DNA, 468 bp, Artificial Sequence
  derived and/or modified sequence
atgaatgaggagtatgatgtgattgtgctgggcaccggcctgaccctgtacaagcgcttcaagatccctggcagccccccagagagcatgggccggggccgggactggaatgtggacctgatccccaagttcctgatggccaacggccagctggtgaagatgctgctgtacacagaggtgacccgctacctggacttcaaggtgacagagggcagctttgtgtacaagggcggcaagatctacaaggtgcccagcacagaggccgaggccctggccagcagcctgatgggcctgtttgagaagaggcgcttcaggaagttcctggtgtatgtggccaactttgatgagaaggaccccaggacctttgagggcatcgaccccaagaagaccaccatgagagatgtgtacaagaagtttgacctgggccaggacgtcatcgacttcaccggccacgccctggccctgtag

SEQ ID NO: 118106 - DNA, 792 bp, Artificial Sequence
  derived and/or modified sequence
atgaatgaggagtatgatgtgattgtgctgggcaccggcctgacagagtgcatcctgagcggcatcatgtctgtgaatggcaagaaggtgctgcacatggacaggaacccctactatggaggagagagcgccagcatcacccccctggaggacctgtacaagcgcttcaagatccctggcagccccccagagagcatgggccggggccgggactggaatgtggacctgatccccaagttcctgatggccaatgaggtgacccgctacctggacttcaaggtgacagagggcagctttgtgtacaagggcggcaagatctacaaggtgcccagcacagaggccgaggccctggccagcagcctgatgggcctgtttgagaagaggcgcttcaggaagttcctggtgtatgtggccaactttgatgagaaggaccccaggacctttgagggcatcgaccccaagaagaccaccatgagagatgtgtacaagaagtttgacctgggccaggacgtcatcgacttcaccggccacgccctggccctgtacagaacagatgactacctggaccagccctgctatgagaccatcaaccgcatcaagctgtacagcgagagcctggcccgctatggcaagagcccctacctgtaccccctgtatggcctgggggagctgccccagggctttgcccggctgagcgccatctatggaggcacctacatgctgaacaagcccatcgaggagatcatcgtgcagaatggcaaggtgattggagtgaagtctgagggggagtag

SEQ ID NO: 118107 - DNA, 447 bp, Artificial Sequence
  derived and/or modified sequence
atgagcctgggcaagcggaagcccagcaacttctacctggccaactttctgggaaaggagtgcatacttagcggcattatgagcgtcaacggaaagaaggtgctccatatggatcgcaacccatattatggcggcgaaagcgccagtataaccccactggaagatctttataagcgctttaaaatccccggatctccgcctgaatccatgggccggggccgggattggaatgtcgacctgatccccaagttcctcatggctaatgggcagctggtcaagatgcttttgtatactgaagtcacccgatacctcgacttcaaagttacagaaggcagctttgtctacaaaggggggaagatctataaggtgccgagtactgaagccgaggccctggcctcgtccctcatgggcctcttcgaaaagcgaaggttcaggaaatttctatag

SEQ ID NO: 118108 - DNA, 1350 bp, Artificial Sequence
  derived and/or modified sequence
atgagcctgggcaagcggaagcccagcaacttctacctggccaactttttggggaaggaatgtattctctccggcataatgagcgtaaatggcaagaaggtgctgcacatggacagaaacccctattacggaggagaatctgcctccattactccactcgaagacctgtacaagcgattcaagatccctggaagtccccccgaatcgatgggacgcggacgggactggaacgtcgacctaatcccgaaattccttatggccaatggacagctcgtgaaaatgctgctgtacacagaagtgacccgatatcttgactttaaagtcactgagggcagcttcgtatacaaaggtggcaaaatttataaggttcctagcacagaggcggaagcactggcttcgtctctgatgggccttttcgagaagcggagattccgcaaattcctcgtctacgtagccaacttcgacgaaaaggaccccaggaccttcgaagggattgatcccaagaaaaccactatgcgcgacgtgtacaagaaattcgatctgggtcaggacgtcattgactttaccggacacgcgttggctttgtaccggacagatgattatctggaccagccttgctacgaaaccattaaccgcataaaactgtacagcgagtctctggctcgctacgggaagagcccctatttatatcctctgtatgggctgggtgagctgccccagggctttgcgcggttgagcgccatttacggcgggacttacatgttgaataaaccaatcgaagagatcatagttcagaacggtaaggtgattggtgttaagagtgaaggggaaatcgctaggtgtaaacagctaatttgcgatccgtcctacgtcaaagatcgtgtcgaaaaggtcggacaagtcattcgtgtgatctgtatcttgtcccacccaataaaaaacacaaacgacgcgaactcgtgccagattattattccccagaaccaagtgaaccgcaagtccgacatctatgtgtgcatgataagcttcgcacacaacgtggctgcccaggggaaatacattgcgatcgtgtctacaaccgttgaaacaaaagagccagaaaaagagattagaccggctctggagctcctcgagcccattgagcagaaattcgtaagtatttcagatctactggtgcccaaggacctggggactgagtcccagatcttcatcagccggacctatgacgcgacaactcacttcgaaaccacctgtgacgatattaaaaacatttataaacgaatgacaggtagtgaatttgacttcgaagaaatgaaacgaaaaaaaaacgacatctacggtgaggactag

SEQ ID NO: 118109 - DNA, 1338 bp, Artificial Sequence
  derived and/or modified sequence
atgaacgaggagtacgacgtgatcgtgctgggcaccggcctgaccgagtgtattttatctggcatcatgagtgttaacggcaaaaaggtgttacatatggacagaaacccttactacggaggagaatccgcctcaatcactcccctggaggacctgtataagcgcttcaagatcccggggtctccacctgagagtatggggcgcgggcgcgattggaacgtagatttaatacccaagtttctcatggccaacggacagcttgtgaagatgctgctctatactgaggttacacggtatctggactttaaggtgacagagggatcttttgtctacaagggcggcaaaatttacaaggtgccgtccactgaggcagaagcactggcatccagtttaatggggctgttcgagaagcgcaggttccgaaagttcttggtgtatgtggcaaatttcgatgagaaggacccacgcacatttgagggaattgaccctaaaaagaccaccatgcgggacgtatataaaaaatttgacctggggcaggacgttattgatttcacgggacatgcccttgctctataccgcactgacgactatctggatcagccgtgttatgaaactataaatcggattaaactgtacagcgaatccttggcacgctacggcaaatccccatatctgtatcccctgtacgggttgggggaactgcctcaagggttcgcccggctctccgctatatacggcggtacttatatgctgaataagcccatagaggaaattatcgtacagaatggaaaagtgataggagtaaaatccgagggggagatagcccggtgcaagcagctaatctgtgacccctcgtatgtgaaagatagggtggaaaaggttggacaagttattcgggttatttgcattctgagccaccctatcaagaacacgaacgatgcaaactcttgtcagatcattattccccaaaatcaggtcaatagaaagtcggacatttacgtctgtatgatatccttcgcccacaatgtggccgctcaggggaaatacatagctattgttagcacaaccgttgagaccaaagagcctgaaaaagagatccgtcctgcacttgaattactggaacccatagagcaaaagttcgtctctatttcagatctcctggtacccaaagatctcggaaccgagtcccagatcttcatttctcgaacgtatgacgccacgacacattttgagactacttgcgatgacattaagaacatttacaaacgtatgactggaagcgagtttgattttgaagaaatgaagcggaaaaaaaacgacatctacggggaggactag

SEQ ID NO: 118110 - DNA, 468 bp, Artificial Sequence
  derived and/or modified sequence
atgaacgaggagtacgacgtgatcgtgctgggcaccggcctgaccctgtataagaggttcaaaataccgggatccccgccagaaagtatgggacgggggagagattggaacgtagacctgatccctaaattcctgatggcaaatgggcagctggtgaagatgctgctgtacacggaggtcacacgctacctggacttcaaagtcacagaagggtcctttgtttataagggtggaaagatctacaaagtgccctccaccgaagcggaagctctggccagctcactcatgggcttgtttgaaaaacgcaggttccggaaattcctcgtatacgttgcaaacttcgacgagaaggaccctcggacctttgaaggcatcgatccaaagaagacgactatgagagatgtctataagaaatttgatctgggccaggatgtgattgatttcaccggtcatgcgctcgctctctag

SEQ ID NO: 118111 - DNA, 792 bp, Artificial Sequence
  derived and/or modified sequence
atgaacgaggagtacgacgtgatcgtgctgggcaccggcctgaccgagtgtatcctgtcagggatcatgagcgttaacgggaagaaggttctgcatatggataggaacccatactacggaggagagtcggcatccatcaccccccttgaggatctctataagagattcaagatcccaggtagtccgcccgagtctatggggcggggaagggattggaacgtggacctgattccgaagttcctgatggcaaatgaggtgactcggtacctcgactttaaggttaccgaaggcagtttcgtatataagggaggcaagatttataaagttccatctacagaggctgaagctcttgcgagctcactgatggggctgttcgagaagcggaggtttcgtaaatttctggtatatgttgctaatttcgatgaaaaagatccgaggacattcgaggggatcgacccaaaaaagaccactatgcgggacgtctacaagaaattcgacctgggacaggatgtgatagatttcacgggtcacgccctggcattgtaccggacagacgattacctggaccagccttgttacgaaacaattaataggataaagttatattccgagagcctggctcgctatgggaagtcgccttacctctatccattgtacgggctcggcgaactccctcaaggattcgcgagactgagcgccatttatggaggtacctacatgcttaataagccaatcgaagagatcatcgtgcagaatggaaaagtaatcggagtgaagtccgaaggggaatag

SEQ ID NO: 118112 - DNA, 447 bp, Artificial Sequence
  derived and/or modified sequence
atgagtttgggaaagcggaaacctagcaatttctacttggccaacttcctgggcaaggagtgcatactgagcgggataatgagtgttaatggcaaaaaggtgctgcacatggatcgaaacccatattatggaggggagtctgccagcatcacccctctggaagacctctataaacgctttaagatcccagggagcccaccggaaagcatggggagagggagagattggaacgtggacttaatccctaagtttctaatggctaacggccagctcgtgaagatgctgctctataccgaggtaacgaggtatctcgatttcaaggtgactgagggctctttcgtctacaaaggtggcaaaatatacaaggtaccgtcaaccgaggctgaggctttggccagctcacttatgggcctctttgaaaaaagacgattccgcaagtttctgtag

SEQ ID NO: 118113 - DNA, 1350 bp, Artificial Sequence
  derived and/or modified sequence
atgtcgttaggcaagcgcaagccatccaacttttatctcgcaaactttctgggtaaagagtgcatactttccggtatcatgagcgtgaatgggaagaaggtgcttcacatggatcgaaatccttactatggcggagagtcggcaagtatcaccccactggaggatttgtataagcgatttaaaatccccggatcgccacctgagagtatgggacgcggaagggactggaacgtggatctgatccctaagtttctgatggccaatgggcagttggtgaagatgctcttgtacaccgaggtgacgaggtatctcgatttcaaggtgaccgaggggagcttcgtgtataagggagggaagatatacaaggttcccagtactgaggcagaagctttggcctcaagcctgatgggactgttcgaaaagagacgattccgcaagtttctggtgtacgttgctaatttcgacgaaaaggatccacgtacatttgagggtatcgatcccaaaaagacaaccatgcgggacgtgtacaaaaagtttgacttagggcaggatgtgatcgactttacaggccacgccttggccctctatcggacggacgactacctggaccagccctgttacgaaaccatcaatcgaatcaaactgtacagcgagtcactggccaggtatggcaaatcgccgtatctctatcccttatatggcctcggcgagctgcctcagggattcgcaaggctgagcgcaatctacggcggaacatatatgttgaacaagccaatagaggagatcatcgttcagaatggcaaggttatcggcgtgaaatccgaaggcgaaatcgctaggtgcaagcagcttatctgcgatccttcctatgtaaaggaccgcgtggaaaaagtggggcaggtgatcagagtcatttgtatcctttcgcaccccattaaaaacaccaacgatgccaattcctgccagatcataattccacagaaccaggtaaatcgaaaatcagacatatacgtttgcatgatttcgtttgctcacaacgtggctgcgcaggggaagtatattgcaatcgtctctactactgttgaaaccaaggaaccggaaaaggaaatacgtcctgcactcgaactgctggagccgatcgaacagaagttcgtctccatcagcgatttactcgtacccaaagatctcggaacagaaagccaaatttttatatctagaacgtatgatgctacaacccactttgaaactacgtgcgacgatattaagaatatctataagcgcatgaccggctccgagttcgacttcgaggagatgaaacggaaaaaaaatgacatttacggcgaggactag

SEQ ID NO: 118114 - DNA, 1338 bp, Artificial Sequence
  derived and/or modified sequence
atgaacgaggaatacgacgtgattgtgttaggcacggggctgaccgagtgcatattaagcggcatcatgtccgtgaatggaaaaaaagtgctccacatggatcgcaacccatactacggaggcgaatccgccagcattactcccctcgaggatctctataaaaggttcaaaattccaggatcacccccagaatctatggggcgaggcagagactggaatgttgatctgattcctaaatttctcatggctaatggtcagctggtaaagatgcttctgtatactgaggtgactaggtatctcgacttcaaagtgacggagggttctttcgtgtacaaaggcggaaaaatttacaaagtgccatctaccgaggccgaggcccttgcctcctccctgatggggctgttcgagaagaggcgtttccggaagtttttggtgtacgttgcgaatttcgatgagaaagatcccaggacctttgaggggatcgaccccaaaaagaccacaatgcgcgacgtgtacaagaagttcgatctcggccaggatgtaattgacttcaccggccatgctctggcactgtataggacagacgattacctggaccagccctgctatgaaaccattaaccggatcaaattatacagcgaaagtttagcacgctatggaaaatccccctatctctaccccttgtacggtcttggggaactccctcaaggctttgcacggttgagcgcgatttacgggggaacatacatgctcaataagcccattgaagaaattatagttcagaatggtaaggtgattggcgtgaagtctgaaggggagatcgctcgctgtaagcagctgatttgtgatccgtcatatgtgaaggacagagtggagaaggtgggccaagtgatccgggtcatatgcattttgtcacatcctatcaaaaacactaacgatgcgaacagctgccagatcattattccacagaaccaggtgaatcggaagtccgacatctatgtctgcatgatatctttcgcccacaacgtggctgctcaggggaagtacattgccatcgtgtccacaaccgtggaaactaaggagcccgagaaggaaatccgccctgctctggagttgcttgaaccaattgaacaaaaattcgtgtcaataagtgacctattagtgcccaaggatctgggaactgagtcccagatttttatctcccgtacatacgacgcgaccactcatttcgaaaccacctgcgacgacattaaaaatatttacaagcgtatgacaggatccgagttcgattttgaggagatgaagcgcaaaaagaatgacatttacggtgaagactag

SEQ ID NO: 118115 - DNA, 468 bp, Artificial Sequence
  derived and/or modified sequence
atgaacgaggagtacgatgtgattgtgctggggaccggtcttacactgtataagcgcttcaagatccctgggtctcccccagagtctatgggccgaggcagagattggaatgtggacctcattcccaagttcctcatggcaaacgggcaattggtaaagatgttactatacacagaggtgactagataccttgactttaaggtgacagagggatcattcgtgtataagggcggaaagatatacaaagtgccatcaactgaagccgaggctcttgcgtcatctctcatgggtttgtttgaaaaacggaggttcagaaaattcctagtttacgtcgcaaactttgatgaaaaggatccaagaactttcgagggaatcgaccctaaaaaaaccaccatgcgggatgtgtacaaaaagttcgacctaggccaagatgtcattgattttaccggacacgctctcgccctgtag

SEQ ID NO: 118116 - DNA, 792 bp, Artificial Sequence
  derived and/or modified sequence
atgaatgaggaatatgatgtgatcgtcttaggcactggcctaacagaatgcatcttgtccggaattatgtcagtcaacggcaaaaaggtgttgcacatggatagaaacccgtattatggcggtgaatcagcctctatcactcccctggaggatctgtacaaaaggtttaaaattcctggctcacccccagaatcaatgggcagaggacgagactggaacgtagatctgatacccaaattcctcatggccaatgaggtcaccagatatctggatttcaaagtaacggaggggtcttttgtgtacaagggtggtaaaatctataaggttccaagcactgaagccgaagccttagcctcgagcctgatgggcctgttcgagaagaggcgttttaggaagttcctcgtctacgtagcaaactttgatgaaaaagaccctaggactttcgagggcatcgaccctaaaaaaaccaccatgcgcgacgtgtacaagaagttcgacttaggccaggacgttattgacttcacaggtcatgctcttgctctgtatcgtaccgacgactatctggatcagccgtgctatgagacaatcaacagaatcaagctttactccgagtcccttgctagatatggcaagagtccctacctgtacccactatacggcctgggtgagttaccacagggtttcgcacgattaagcgctatctatggagggacgtacatgctgaataagcccatcgaggaaatcattgtgcaaaacgggaaggttatcggggtaaaaagtgagggtgagtag

SEQ ID NO: 118117 - DNA, 447 bp, Artificial Sequence
  derived and/or modified sequence
atgagcctgggcaagagaaagcccagcaacttctacctggccaacttcctgggcaaggagtgcatcctgagcggcatcatgagcgtgaacggcaagaaggtgctgcacatggacagaaacccctactacggcggcgagagcgccagcatcacccccctggaggacctgtacaagagattcaagatccccggcagcccccccgagagcatgggcagaggcagagactggaacgtggacctgatccccaagttcctgatggccaacggccagctggtgaagatgctgctgtacaccgaggtgaccagatacctggacttcaaggtgaccgagggcagcttcgtgtacaagggcggcaagatctacaaggtgcccagcaccgaggccgaggccctggccagcagcctgatgggcctgttcgagaagagaagattcagaaagttcctgtag

SEQ ID NO: 118118 - DNA, 1350 bp, Artificial Sequence
  derived and/or modified sequence
atgagcctgggcaagagaaagcccagcaacttctacctggccaacttcctgggcaaggagtgcatcctgagcggcatcatgagcgtgaacggcaagaaggtgctgcacatggacagaaacccctactacggcggcgagagcgccagcatcacccccctggaggacctgtacaagagattcaagatccccggcagcccccccgagagcatgggcagaggcagagactggaacgtggacctgatccccaagttcctgatggccaacggccagctggtgaagatgctgctgtacaccgaggtgaccagatacctggacttcaaggtgaccgagggcagcttcgtgtacaagggcggcaagatctacaaggtgcccagcaccgaggccgaggccctggccagcagcctgatgggcctgttcgagaagagaagattcagaaagttcctggtgtacgtggccaacttcgacgagaaggaccccagaaccttcgagggcatcgaccccaagaagaccaccatgagagacgtgtacaagaagttcgacctgggccaggacgtgatcgacttcaccggccacgccctggccctgtacagaaccgacgactacctggaccagccctgctacgagaccatcaacagaatcaagctgtacagcgagagcctggccagatacggcaagagcccctacctgtaccccctgtacggcctgggcgagctgccccagggcttcgccagactgagcgccatctacggcggcacctacatgctgaacaagcccatcgaggagatcatcgtgcagaacggcaaggtgatcggcgtgaagagcgagggcgagatcgccagatgcaagcagctgatctgcgaccccagctacgtgaaggacagagtggagaaggtgggccaggtgatcagagtgatctgcatcctgagccaccccatcaagaacaccaacgacgccaacagctgccagatcatcatcccccagaaccaggtgaacagaaagagcgacatctacgtgtgcatgatcagcttcgcccacaacgtggccgcccagggcaagtacatcgccatcgtgagcaccaccgtggagaccaaggagcccgagaaggagatcagacccgccctggagctgctggagcccatcgagcagaagttcgtgagcatcagcgacctgctggtgcccaaggacctgggcaccgagagccagatcttcatcagcagaacctacgacgccaccacccacttcgagaccacctgcgacgacatcaagaacatctacaagagaatgaccggcagcgagttcgacttcgaggagatgaagagaaagaagaacgacatctacggcgaggactag

SEQ ID NO: 118119 - DNA, 1338 bp, Artificial Sequence
  derived and/or modified sequence
atgaacgaggagtacgacgtgatcgtgctgggcaccggcctgaccgagtgcatcctgagcggcatcatgagcgtgaacggcaagaaggtgctgcacatggacagaaacccctactacggcggcgagagcgccagcatcacccccctggaggacctgtacaagagattcaagatccccggcagcccccccgagagcatgggcagaggcagagactggaacgtggacctgatccccaagttcctgatggccaacggccagctggtgaagatgctgctgtacaccgaggtgaccagatacctggacttcaaggtgaccgagggcagcttcgtgtacaagggcggcaagatctacaaggtgcccagcaccgaggccgaggccctggccagcagcctgatgggcctgttcgagaagagaagattcagaaagttcctggtgtacgtggccaacttcgacgagaaggaccccagaaccttcgagggcatcgaccccaagaagaccaccatgagagacgtgtacaagaagttcgacctgggccaggacgtgatcgacttcaccggccacgccctggccctgtacagaaccgacgactacctggaccagccctgctacgagaccatcaacagaatcaagctgtacagcgagagcctggccagatacggcaagagcccctacctgtaccccctgtacggcctgggcgagctgccccagggcttcgccagactgagcgccatctacggcggcacctacatgctgaacaagcccatcgaggagatcatcgtgcagaacggcaaggtgatcggcgtgaagagcgagggcgagatcgccagatgcaagcagctgatctgcgaccccagctacgtgaaggacagagtggagaaggtgggccaggtgatcagagtgatctgcatcctgagccaccccatcaagaacaccaacgacgccaacagctgccagatcatcatcccccagaaccaggtgaacagaaagagcgacatctacgtgtgcatgatcagcttcgcccacaacgtggccgcccagggcaagtacatcgccatcgtgagcaccaccgtggagaccaaggagcccgagaaggagatcagacccgccctggagctgctggagcccatcgagcagaagttcgtgagcatcagcgacctgctggtgcccaaggacctgggcaccgagagccagatcttcatcagcagaacctacgacgccaccacccacttcgagaccacctgcgacgacatcaagaacatctacaagagaatgaccggcagcgagttcgacttcgaggagatgaagagaaagaagaacgacatctacggcgaggactag

SEQ ID NO: 118120 - DNA, 468 bp, Artificial Sequence
  derived and/or modified sequence
atgaacgaggagtacgacgtgatcgtgctgggcaccggcctgaccctgtacaagagattcaagatccccggcagcccccccgagagcatgggcagaggcagagactggaacgtggacctgatccccaagttcctgatggccaacggccagctggtgaagatgctgctgtacaccgaggtgaccagatacctggacttcaaggtgaccgagggcagcttcgtgtacaagggcggcaagatctacaaggtgcccagcaccgaggccgaggccctggccagcagcctgatgggcctgttcgagaagagaagattcagaaagttcctggtgtacgtggccaacttcgacgagaaggaccccagaaccttcgagggcatcgaccccaagaagaccaccatgagagacgtgtacaagaagttcgacctgggccaggacgtgatcgacttcaccggccacgccctggccctgtag

SEQ ID NO: 118121 - DNA, 792 bp, Artificial Sequence
  derived and/or modified sequence
atgaacgaggagtacgacgtgatcgtgctgggcaccggcctgaccgagtgcatcctgagcggcatcatgagcgtgaacggcaagaaggtgctgcacatggacagaaacccctactacggcggcgagagcgccagcatcacccccctggaggacctgtacaagagattcaagatccccggcagcccccccgagagcatgggcagaggcagagactggaacgtggacctgatccccaagttcctgatggccaacgaggtgaccagatacctggacttcaaggtgaccgagggcagcttcgtgtacaagggcggcaagatctacaaggtgcccagcaccgaggccgaggccctggccagcagcctgatgggcctgttcgagaagagaagattcagaaagttcctggtgtacgtggccaacttcgacgagaaggaccccagaaccttcgagggcatcgaccccaagaagaccaccatgagagacgtgtacaagaagttcgacctgggccaggacgtgatcgacttcaccggccacgccctggccctgtacagaaccgacgactacctggaccagccctgctacgagaccatcaacagaatcaagctgtacagcgagagcctggccagatacggcaagagcccctacctgtaccccctgtacggcctgggcgagctgccccagggcttcgccagactgagcgccatctacggcggcacctacatgctgaacaagcccatcgaggagatcatcgtgcagaacggcaaggtgatcggcgtgaagagcgagggcgagtag

SEQ ID NO: 118122 - protein, 400 aa, Artificial Sequence
  derived and/or modified sequence
MVRPLNPRPLPPVVLMLLLLLPPSPLPLAAGDPLPTESRLMNSCLQARRKCQADPTCSAAYHHLDSCTSSISTPLPSEEPSVPADCLEAAQQLRNSSLIGCMCHRRMKNQVACLDIYWTVHRARSLGNYELDVSPYEDTVTSKPWKMNLSKLNMLKPDSDLCLKFAMLCTLNDKCDRLRKAYGEACSGPHCQRHVCLRQLLTFFEKAAEPHAQGLLLCPCAPNDRGCGERRRNTIAPNCALPPVAPNCLELRRLCFSDPLCRSRLVDFQTHCHPMDILGTCATEQSRCLRAYLGLIGTAMTPNFVSNVNTSVALSCTCRGSGNLQEECEMLEGFFSHNPCLTEAIAAKMRFHSQLFSQDWPHPTFAVMAHQNENPAVRPQPWVPSLFSCTLPLILLLSLW

SEQ ID NO: 118123 - protein, 369 aa, Artificial Sequence
  derived and/or modified sequence
MVRPLNPRPLPPVVLMLLLLLPPSPLPLAAGDPLPTESRLMNSCLQARRKCQADPTCSAAYHHLDSCTSSISTPLPSEEPSVPADCLEAAQQLRNSSLIGCMCHRRMKNQVACLDIYWTVHRARSLDSDLCLKFAMLCTLNDKCDRLRKAYGEACSGPHCQRHVCLRQLLTFFEKAAEPHAQGLLLCPCAPNDRGCGERRRNTIAPNCALPPVAPNCLELRRLCFSDPLCRSRLVDFQTHCHPMDILGTCATEQSRCLRAYLGLIGTAMTPNFVSNVNTSVALSCTCRGSGNLQEECEMLEGFFSHNPCLTEAIAAKMRFHSQLFSQDWPHPTFAVMAHQNENPAVRPQPWVPSLFSCTLPLILLLSLW

SEQ ID NO: 118124 - DNA, 1203 bp, Artificial Sequence
  derived and/or modified sequence
atggtgcggcctctgaatcctcgccctcttccacctgtcgttcttatgctgctacttctacttcctccatcacccctgccactggcggccggggaccccttacccacagagtcaaggctgatgaactcctgcctgcaagcaagacggaagtgccaggccgatccaacctgctccgccgcctatcaccacttagattcttgcacaagcagtatcagtacccctctaccatctgaagaaccatcagttcctgccgattgtctggaggccgcccaacagctcaggaactcgagccttattggatgtatgtgtcatcgccggatgaagaaccaggtcgcatgcctggacatctactggaccgtgcatagagcccgttccttgggcaactacgagcttgatgtgtctccctacgaggacactgtgacctccaaaccctggaagatgaatctgtctaagcttaatatgttgaagcctgactcagacttgtgcctgaaattcgccatgctgtgtacgctgaacgataagtgcgataggctgagaaaggcctatggcgaagcatgttctgggcctcactgtcagcgacacgtctgcctgagacagcttctgacctttttcgagaaggcagctgaaccccacgcacagggtcttctgctatgcccatgcgcgcccaacgacagaggctgcggcgaacggcggagaaacaccatagcccctaactgtgccctgcctcctgtggcaccgaattgcctcgagctgcggcgcctgtgtttctctgatccgttatgtagaagccggctcgtcgattttcagacccactgccaccccatggatatcctgggaacatgtgctaccgaacagagcagatgcttgcgagcttatctaggcttgatcggcactgccatgacccctaactttgtgtctaatgttaacacctcggtggccttaagttgtacctgccggggtagcggcaatttacaggaagagtgcgagatgctggagggattcttttcacacaacccctgtttaaccgaggcgatcgcagccaagatgcgattccacagtcagcttttttcgcaggattggccccaccctacatttgccgtgatggcacaccagaatgaaaatccagctgtccgcccacaaccatgggtccccagccttttcagctgtaccctgccgctcattctgttactctccctctggtag

SEQ ID NO: 118125 - DNA, 1110 bp, Artificial Sequence
  derived and/or modified sequence
atggtgcggccactgaacccccgtccgctgcctcccgtagtacttatgctgcttctcttgctccccccttctccgctgccactggccgctggtgatcctcttccaaccgaatcccgactaatgaactcatgtctccaggccagacggaagtgtcaggctgacccgacatgttctgctgcctatcaccacttggattcctgcacttccagcatctccacaccgctaccgtccgaggaaccgagtgtacccgctgattgtctggaagcagcacagcaactgcgcaattcaagtcttattgggtgcatgtgtcatcgcagaatgaagaatcaggtagcgtgcctggatatctactggacagtgcatcgtgccaggagcttggactcagatctctgcctaaagttcgcaatgttgtgcaccctgaatgacaagtgtgacagactgagaaaagcctacggcgaagcttgtagtggccctcactgccagcggcatgtttgccttcgacaattgcttacctttttcgagaaggccgcggaacctcacgcccaggggctactgctgtgcccgtgcgcccccaatgaccgcggctgcggggagaggcgccgaaacacaattgctccaaactgtgccctacccccagttgcccccaattgcctcgaattaaggagactgtgcttctcagacccactttgcagaagccgtcttgtcgattttcagactcattgtcaccctatggatatcctagggacatgcgctacggagcagtctagatgtctgagagcgtacttgggattaattggaactgccatgacaccaaatttcgttagcaacgtcaacacttcagtggctctttcttgtacctgtaggggttccggtaatctgcaggaggaatgcgagatgctggaaggtttttttagccataatccctgccttaccgaggccatcgctgccaaaatgcggttccacagccaactgttttcgcaggactggccacatccaacattcgctgtcatggcccaccagaatgaaaatccggccgtcaggccccagccatgggttccgtccctattttcatgcactctgccattgatcctgctgttgtctctctggtag

SEQ ID NO: 118126 - DNA, 2039 bp, Artificial Sequence
  derived and/or modified sequence
gcggctcccggggcgccggccctcccccgcccccacccccgcggtccctcggaccagcgctggaggcgcgtggtgtggacgcgcgcttcggagttggagggcggcgcccaggaccctggtgggagagtgtgtgcgtcgcgctggagggcgggaggcgggggcgggaggtgccggtcgagggagccccgctctcagagctccaggggaggagcgaggggagcgcggagcccggcgcctacagctcgccatggtgcgccccctgaacccgcgaccgctgccgcccgtagtcctgatgttgctgctgctgctgccgccgtcgccgctgcctctcgcagccggagacccccttcccacagaaagccgactcatgaacagctgtctccaggccaggaggaagtgccaggctgatcccacctgcagtgctgcctaccaccacctggattcctgcacctctagcataagcaccccactgccctcagaggagccttcggtccctgctgactgcctggaggcagcacagcaactcaggaacagctctctgataggctgcatgtgccaccggcgcatgaagaaccaggttgcctgcttggacatctattggaccgttcaccgtgcccgcagccttggtaactatgagctggatgtctccccctatgaagacacagtgaccagcaaaccctggaaaatgaatctcagcaaactgaacatgctcaaaccagactcagacctctgcctcaagtttgccatgctgtgtactctcaatgacaagtgtgaccggctgcgcaaggcctacggggaggcgtgctccgggccccactgccagcgccacgtctgcctcaggcagctgctcactttcttcgagaaggccgccgagccccacgcgcagggcctgctactgtgcccatgtgcccccaacgaccggggctgcggggagcgccggcgcaacaccatcgcccccaactgcgcgctgccgcctgtggcccccaactgcctggagctgcggcgcctctgcttctccgacccgctttgcagatcacgcctggtggatttccagacccactgccatcccatggacatcctaggaacttgtgcaacagagcagtccagatgtctacgagcatacctggggctgattgggactgccatgacccccaactttgtcagcaatgtcaacaccagtgttgccttaagctgcacctgccgaggcagtggcaacctgcaggaggagtgtgaaatgctggaagggttcttctcccacaacccctgcctcacggaggccattgcagctaagatgcgttttcacagccaactcttctcccaggactggccacaccctacctttgctgtgatggcacaccagaatgaaaaccctgctgtgaggccacagccctgggtgccctctcttttctcctgcacgcttcccttgattctgctcctgagcctatggtagctggacttccccagggccctcttcccctccaccacacccaggtggacttgcagcccacaaggggtgaggaaaggacagcagcaggaaggaggtgcagtgcgcagatgagggcacaggagaagctaagggttatgacctccagatccttactggtccagtcctcattccctccaccccatctccacttctgattcatgctgcccctccttggtggccacaatttagccatgtcatctggtggtgaccagctccaccaagcccctttctgagcccttcctcttgactaccaggatcaccagaatctaataagttagccattctctattgcattccagattagggttagggtagggaggactgggtgttctgaggcagcctagaaagtcattctcctttgtgaagaaggctcctgccccctcgtctcctcctctgagtggaggatggaaaactactgcctgcactgccctgtccccggatcctgccgaacatctgggcatcaggagctggagcctgtgggccttgctttattcctattattgtcctaaagtctctctgggctcttggatcatgattaaacctttgacttaag

SEQ ID NO: 118127 - DNA, 1837 bp, Artificial Sequence
  derived and/or modified sequence
cccaggaccctggtgggagagtgtgtgcgtcgcgctggagggcgggaggcgggggcgggaggtgccggtcgagggagccccgctctcagagctccaggggaggagcgaggggagcgcggagcccggcgcctacagctcgccatggtgcgccccctgaacccgcgaccgctgccgcccgtagtcctgatgttgctgctgctgctgccgccgtcgccgctgcctctcgcagccggagacccccttcccacagaaagccgactcatgaacagctgtctccaggccaggaggaagtgccaggctgatcccacctgcagtgctgcctaccaccacctggattcctgcacctctagcataagcaccccactgccctcagaggagccttcggtccctgctgactgcctggaggcagcacagcaactcaggaacagctctctgataggctgcatgtgccaccggcgcatgaagaaccaggttgcctgcttggacatctattggaccgttcaccgtgcccgcagccttgactcagacctctgcctcaagtttgccatgctgtgtactctcaatgacaagtgtgaccggctgcgcaaggcctacggggaggcgtgctccgggccccactgccagcgccacgtctgcctcaggcagctgctcactttcttcgagaaggccgccgagccccacgcgcagggcctgctactgtgcccatgtgcccccaacgaccggggctgcggggagcgccggcgcaacaccatcgcccccaactgcgcgctgccgcctgtggcccccaactgcctggagctgcggcgcctctgcttctccgacccgctttgcagatcacgcctggtggatttccagacccactgccatcccatggacatcctaggaacttgtgcaacagagcagtccagatgtctacgagcatacctggggctgattgggactgccatgacccccaactttgtcagcaatgtcaacaccagtgttgccttaagctgcacctgccgaggcagtggcaacctgcaggaggagtgtgaaatgctggaagggttcttctcccacaacccctgcctcacggaggccattgcagctaagatgcgttttcacagccaactcttctcccaggactggccacaccctacctttgctgtgatggcacaccagaatgaaaaccctgctgtgaggccacagccctgggtgccctctcttttctcctgcacgcttcccttgattctgctcctgagcctatggtagctggacttccccagggccctcttcccctccaccacacccaggtggacttgcagcccacaaggggtgaggaaaggacagcagcaggaaggaggtgcagtgcgcagatgagggcacaggagaagctaagggttatgacctccagatccttactggtccagtcctcattccctccaccccatctccacttctgattcatgctgcccctccttggtggccacaatttagccatgtcatctggtggtgaccagctccaccaagcccctttctgagcccttcctcttgactaccaggatcaccagaatctaataagttagccattctctattgcattccagattagggttagggtagggaggactgggtgttctgaggcagcctagaaagtcattctcctttgtgaagaaggctcctgccccctcgtctcctcctctgagtggaggatggaaaactactgcctgcactgccctgtccccggatcctgccgaacatctgggcatcaggagctggagcctgtgggccttgctttattcctattattgtcctaaagtctctctgggctcttggatcatgattaaacctttgactt

SEQ ID NO: 118128 - DNA, 1203 bp, Artificial Sequence
  derived and/or modified sequence
atggtgcggcccctgaacccccggcccctgccccctgtggtgctgatgctgctgctgctgctgccccccagccccctgcccctggccgccggggaccccctgcccacagagagccggctgatgaacagctgcctgcaggcccggaggaagtgccaggccgaccccacctgcagcgctgcctaccaccacctggacagctgcaccagcagcatcagcacccccctgcccagcgaggagcccagcgtgcctgctgactgcctggaggccgcccagcagctgaggaacagcagcctgattggctgcatgtgccacaggaggatgaagaaccaggtggcctgcctggacatctactggacagtgcaccgggcccggagcctgggcaactatgagctggatgtgagcccctatgaagatactgtgaccagcaagccctggaagatgaacctgagcaagctgaacatgctgaagccagacagcgacctgtgcctgaagtttgccatgctgtgcaccctgaatgacaagtgtgaccggctgaggaaggcctacggggaggcctgcagcggcccccactgccagagacatgtgtgcctgcggcagctgctgaccttctttgagaaggctgctgagccccacgcccagggcctgctgctgtgcccctgtgccccaaatgaccggggctgtggggagaggagaagaaacaccatcgcccccaactgtgccctgccccctgtggcccccaactgcctggagctgcggcggctgtgcttcagtgaccccctgtgccgcagccggctggtggacttccagacccactgccaccccatggacatcctgggcacctgtgccacagagcagagccgctgcctgcgggcctacctgggcctcatcggcacagccatgacccccaactttgtgtccaatgtgaacacctctgtggccctgagctgcacctgccggggcagcggcaacctgcaggaggagtgtgagatgctggagggcttcttcagccacaacccctgcctgacagaggccatcgccgccaagatgaggttccacagccagctgttcagccaggactggccccaccccacctttgctgtgatggcccaccagaatgaaaatcctgctgtgcggccccagccctgggtgcccagcctcttcagctgcaccctgcccctcatcctgctgctgagcctgtggtag

SEQ ID NO: 118129 - DNA, 1110 bp, Artificial Sequence
  derived and/or modified sequence
atggtgcggcccctgaacccccggcccctgccccctgtggtgctgatgctgctgctgctgctgccccccagccccctgcccctggccgccggggaccccctgcccacagagagccggctgatgaacagctgcctgcaggcccggaggaagtgccaggccgaccccacctgcagcgctgcctaccaccacctggacagctgcaccagcagcatcagcacccccctgcccagcgaggagcccagcgtgcctgctgactgcctggaggccgcccagcagctgaggaacagcagcctgattggctgcatgtgccacaggaggatgaagaaccaggtggcctgcctggacatctactggacagtgcaccgggcccggagcctggacagcgacctgtgcctgaagtttgccatgctgtgcaccctgaatgacaagtgtgaccggctgaggaaggcctatggagaggcctgcagcggcccccactgccagagacatgtgtgcctgcggcagctgctgaccttctttgagaaggctgctgagccccacgcccagggcctgctgctgtgcccctgtgccccaaatgaccggggctgtggggagaggagaagaaacaccatcgcccccaactgtgccctgccccctgtggcccccaactgcctggagctgcggcggctgtgcttcagtgaccccctgtgccgcagccggctggtggacttccagacccactgccaccccatggacatcctgggcacctgtgccacagagcagagccgctgcctgcgggcctacctgggcctgattggaacagccatgacccccaactttgtgtccaatgtgaacacctctgtggccctgagctgcacctgccggggcagcggcaacctgcaggaggagtgtgagatgctggagggcttcttcagccacaacccctgcctgacagaggccatcgccgccaagatgaggttccacagccagctgttcagccaggactggccccaccccacctttgctgtgatggcccaccagaatgaaaatcctgctgtgcggccccagccctgggtgcccagcctcttcagctgcaccctgcccctcatcctgctgctgagcctgtggtag

SEQ ID NO: 118130 - DNA, 1203 bp, Artificial Sequence
  derived and/or modified sequence
atggtgcggcccctgaacccccggcccctgccccccgtggtgctgatgttgttactactcttgccccccagcccattgcctctggccgcaggcgatccgctcccaactgaatctagattaatgaactcgtgcctgcaggctcgccggaagtgtcaggcagatcccacttgcagcgcagcttaccatcacctggactcatgtacctcttcgatctccactcctctgcccagcgaagagccttcggtcccagccgattgccttgaggcggcacaacagctcagaaactcctccctcatcggctgtatgtgccaccgcaggatgaaaaaccaagttgcatgtctggacatttactggacagttcatagggcacgatctctgggtaactatgagctggacgtgagtccctatgaggacacagtgacctcaaaaccttggaaaatgaacctttccaagttgaatatgctgaagccagatagcgacttgtgtctgaaatttgccatgctgtgtacgctcaatgataaatgtgatagactccgcaaggcgtacggggaggcctgtagtggtccccattgtcagcgacatgtttgcctcaggcagctactgacctttttcgagaaggctgctgagccacacgcccagggactgctgctgtgtccatgtgccccaaatgacaggggctgcggcgaaagacgcaggaatacaattgccccgaactgtgcgctacctccagtagcccccaactgtctcgagctgcggagactctgcttcagcgatcctttatgcaggtctagacttgttgatttccagacccattgtcatccaatggatattctgggcacatgtgcaactgagcaatctaggtgcctgcgagcttacctgggacttattgggacagcgatgacgcctaatttcgtgagcaacgtgaataccagcgtggccctgagctgcacatgtagaggttctggaaaccttcaagaggaatgcgagatgttggagggcttcttctcgcataacccctgtctgactgaagctattgcggccaagatgaggttccattcacaactgtttagtcaggactggccccatcccaccttcgctgtcatggcccaccagaatgaaaaccccgcggtaaggcctcagccctgggtacccagtctgttttcctgtacattgccattaatactgctgctatccttatggtag

SEQ ID NO: 118131 - DNA, 1110 bp, Artificial Sequence
  derived and/or modified sequence
atggtgcggcccctgaacccccggcccctgccccccgtggtgctgatgctcttactgcttttacccccctccccactccccttagcggccggcgatccactgccgactgagtccagactcatgaattcttgcctacaggcacgaaggaagtgccaggcagaccccacttgcagcgccgcttaccatcatctggactcatgcacctcctctataagtacacccctgccctctgaggaaccaagcgtgcctgccgattgtctggaggctgcccagcagcttcgcaattcctctctgatcggatgcatgtgtcataggaggatgaaaaaccaggtggcatgcctcgacatctactggacagttcatagagccaggagcctcgattctgacctgtgcctaaaattcgctatgctatgcacactgaatgacaaatgcgacagattacgtaaggcatacggcgaagcctgctccgggcctcattgtcagcgccatgtctgtctgcggcagctgctgacatttttcgaaaaggcagccgaaccccacgcacaaggcttattgctgtgtccatgcgcccccaacgatcgtgggtgcggcgaacggcgtcggaacactattgcccccaattgcgccctcccacccgtggcccccaattgtttggagcttcgaagactgtgcttctcagacccgctatgccgatctaggctcgtagatttccagacccactgccacccgatggatatccttggaacctgtgccaccgagcaatctcgctgtttacgcgcctatctcggcttgattgggactgccatgactccaaacttcgtcagcaatgttaacacatctgtggcactgtcatgcacctgcagaggcagtggaaaccttcaggaagaatgcgagatgctggaagggttctttagccacaatccttgcttgacggaagctattgcggctaagatgagattccacagccagttgttctcacaagattggccgcaccctacctttgcagtaatggctcaccagaacgaaaatcccgcagtgcggccacaaccatgggttccttccctattctcctgcacattacccctgattctcctgctgtccttgtggtag

SEQ ID NO: 118132 - DNA, 1203 bp, Artificial Sequence
  derived and/or modified sequence
atggtgcggcctttgaatcccaggccattgcctcccgtagttctcatgctgctgttactgttgcctccctcccccttgccactggctgccggagatcccctgcctaccgagtcccgactcatgaactcctgcctacaggcccgtcgaaaatgtcaagccgatccaacctgctctgcagcctatcaccatttagactcttgtacctcctcaatttcaactccattaccctcagaggaaccatccgtgccagctgactgtctcgaggctgcccagcagcttcgtaattcgtctctgattggctgcatgtgccatagacgcatgaagaatcaagtcgcttgtctggacatctactggaccgttcatcgagcgagaagcctgggtaattacgaattagatgttagcccctatgaagacaccgtgacctctaagccatggaagatgaatctgagcaaactgaacatgctgaaacccgattccgatctttgtctgaaatttgcaatgctgtgtacactgaacgataagtgcgatcggctgcgcaaagcctacggagaggcttgttctggtccacactgccagcgccatgtgtgcctgcgccagctacttactttttttgaaaaggctgccgaaccgcacgctcagggactccttttgtgtccctgtgcgccaaacgaccggggatgtggggagcggcgaaggaatacaattgcacctaattgcgccctaccccctgtggccccaaattgcttggagctgcggaggctctgtttttctgatcccctgtgccgcagtaggctggtggattttcagacacattgtcacccaatggacattctgggaacgtgtgcaactgaacagtccaggtgtctgcgagcctatctgggactgatcggaactgcgatgacccctaactttgtgagtaatgtgaacacaagcgtggccctgtcatgcacgtgtcggggatccggcaacctgcaggaagagtgtgagatgctcgagggctttttcagccacaatccctgcctgaccgaagctattgcagccaaaatgaggtttcactcacagttgttttctcaggattggcctcatcctacgttcgccgtgatggcgcaccaaaacgaaaaccctgccgtgaggccgcagccgtgggttcccagtctattcagttgtaccctgcctctgatcctgttgttgagtttgtggtag

SEQ ID NO: 118133 - DNA, 1110 bp, Artificial Sequence
  derived and/or modified sequence
atggtacgtcctcttaacccgaggcccctgcctcccgtggtgttaatgctcctgctgctccttcccccttcacccctgccgcttgcggctggtgaccctctgccaaccgagtcacggctgatgaacagttgtctgcaggcgagacgcaagtgccaggcggatcctacctgcagcgccgcttaccaccatttagattcatgtacctcctcaataagtacccccctccctagcgaagagccttccgttcctgcagactgcctcgaagcagcccagcagttgagaaactcatccctgatcgggtgcatgtgtcaccggaggatgaaaaaccaagtcgcttgtcttgacatatattggactgtccatcgagctcggtcattggacagtgacctctgcctcaagttcgccatgctctgcaccctcaacgacaaatgtgacagactgcgcaaagcttacggagaagcttgcagcggaccacattgccagcgacacgtgtgtctgaggcaactgctaaccttttttgagaaggccgctgagccacacgcccagggtcttttgctgtgcccatgcgcacccaacgatcgcggatgtggcgagagacggaggaatacaattgctcccaattgtgctctaccccctgtcgcgccaaactgcttggaactaagacggttatgcttctcggaccccctgtgcaggtctaggctcgtggatttccaaactcactgtcaccccatggacattctgggtacttgtgcaaccgagcaatcccgctgcttgcgggcttatctcggtctgattggtaccgctatgactcctaattttgtctccaatgtcaacacttcagttgctctgagttgcacttgtaggggctccgggaatttacaagaagagtgcgaaatgctggaaggctttttcagtcacaacccgtgtctaaccgaagctatagccgctaagatgcgattccatagtcaactgttttcccaggactggcctcatcctacctttgcagtgatggcccatcagaacgaaaatcccgctgtgaggccgcagccttgggtgccttcactgttctcgtgtactctgcctcttattctcctcttgagtctgtggtag

SEQ ID NO: 118134 - DNA, 1203 bp, Artificial Sequence
  derived and/or modified sequence
atggtgagacccctgaaccccagacccctgccccccgtggtgctgatgctgctgctgctgctgccccccagccccctgcccctggccgccggcgaccccctgcccaccgagagcagactgatgaacagctgcctgcaggccagaagaaagtgccaggccgaccccacctgcagcgccgcctaccaccacctggacagctgcaccagcagcatcagcacccccctgcccagcgaggagcccagcgtgcccgccgactgcctggaggccgcccagcagctgagaaacagcagcctgatcggctgcatgtgccacagaagaatgaagaaccaggtggcctgcctggacatctactggaccgtgcacagagccagaagcctgggcaactacgagctggacgtgagcccctacgaggacaccgtgaccagcaagccctggaagatgaacctgagcaagctgaacatgctgaagcccgacagcgacctgtgcctgaagttcgccatgctgtgcaccctgaacgacaagtgcgacagactgagaaaggcctacggcgaggcctgcagcggcccccactgccagagacacgtgtgcctgagacagctgctgaccttcttcgagaaggccgccgagccccacgcccagggcctgctgctgtgcccctgcgcccccaacgacagaggctgcggcgagagaagaagaaacaccatcgcccccaactgcgccctgccccccgtggcccccaactgcctggagctgagaagactgtgcttcagcgaccccctgtgcagaagcagactggtggacttccagacccactgccaccccatggacatcctgggcacctgcgccaccgagcagagcagatgcctgagagcctacctgggcctgatcggcaccgccatgacccccaacttcgtgagcaacgtgaacaccagcgtggccctgagctgcacctgcagaggcagcggcaacctgcaggaggagtgcgagatgctggagggcttcttcagccacaacccctgcctgaccgaggccatcgccgccaagatgagattccacagccagctgttcagccaggactggccccaccccaccttcgccgtgatggcccaccagaacgagaaccccgccgtgagaccccagccctgggtgcccagcctgttcagctgcaccctgcccctgatcctgctgctgagcctgtggtag

SEQ ID NO: 118135 - DNA, 1110 bp, Artificial Sequence
  derived and/or modified sequence
atggtgagacccctgaaccccagacccctgccccccgtggtgctgatgctgctgctgctgctgccccccagccccctgcccctggccgccggcgaccccctgcccaccgagagcagactgatgaacagctgcctgcaggccagaagaaagtgccaggccgaccccacctgcagcgccgcctaccaccacctggacagctgcaccagcagcatcagcacccccctgcccagcgaggagcccagcgtgcccgccgactgcctggaggccgcccagcagctgagaaacagcagcctgatcggctgcatgtgccacagaagaatgaagaaccaggtggcctgcctggacatctactggaccgtgcacagagccagaagcctggacagcgacctgtgcctgaagttcgccatgctgtgcaccctgaacgacaagtgcgacagactgagaaaggcctacggcgaggcctgcagcggcccccactgccagagacacgtgtgcctgagacagctgctgaccttcttcgagaaggccgccgagccccacgcccagggcctgctgctgtgcccctgcgcccccaacgacagaggctgcggcgagagaagaagaaacaccatcgcccccaactgcgccctgccccccgtggcccccaactgcctggagctgagaagactgtgcttcagcgaccccctgtgcagaagcagactggtggacttccagacccactgccaccccatggacatcctgggcacctgcgccaccgagcagagcagatgcctgagagcctacctgggcctgatcggcaccgccatgacccccaacttcgtgagcaacgtgaacaccagcgtggccctgagctgcacctgcagaggcagcggcaacctgcaggaggagtgcgagatgctggagggcttcttcagccacaacccctgcctgaccgaggccatcgccgccaagatgagattccacagccagctgttcagccaggactggccccaccccaccttcgccgtgatggcccaccagaacgagaaccccgccgtgagaccccagccctgggtgcccagcctgttcagctgcaccctgcccctgatcctgctgctgagcctgtggtag

SEQ ID NO: 118136 - protein, 398 aa, Artificial Sequence
  derived and/or modified sequence
MRLREPLLSGSAAMPGASLQRACRLLVAVCALHLGVTLVYYLAGRDLSRLPQLVGVSTPLQGGSNSAAAIGQSSGELRTGGARPPPPLGASSQPRPGGDSSPVVDSGPGPASNLTSVPVPHTTALSLPACPEESPLLVGPMLIEFNMPVDLELVAKQNPNVKMGGRYAPRDCVSPHKVAIIIPFRNRQEHLKYWLYYLHPVLQRQQLDYGIYVINQAGDTIFNRAKLLNVGFQEALKDYDYTCFVFSDVDLIPMNDHNAYRCFSQPRHISVAMDKFGFSLPYVQYFGGVSALSKQQFLTINGFPNNYWGWGGEDDDIFNRLVFRGMSISRPNAVVGRCRMIRHSRDKKNEPNPQRFDRIAHTKETMLSDGLNSLTYQVLDVQRYPLYTQITVDIGTPS

SEQ ID NO: 118137 - protein, 355 aa, Artificial Sequence
  derived and/or modified sequence
MRLREPLLSGSAAMPGASLQRACRLLVAVCALHLGVTLVYYLAGRDLSRLPQLVGVSTPVVDSGPGPASNLTSVPVPHTTALSLPACPEESPLLVGPMLIEFNMPVDLELVAKQNPNVKMGGRYAPRDCVSPHKVAIIIPFRNRQEHLKYWLYYLHPVLQRQQLDYGIYVINQAGDTIFNRAKLLNVGFQEALKDYDYTCFVFSDVDLIPMNDHNAYRCFSQPRHISVAMDKFGFSLPYVQYFGGVSALSKQQFLTINGFPNNYWGWGGEDDDIFNRLVFRGMSISRPNAVVGRCRMIRHSRDKKNEPNPQRFDRIAHTKETMLSDGLNSLTYQVLDVQRYPLYTQITVDIGTPS

SEQ ID NO: 118138 - protein, 145 aa, Artificial Sequence
  derived and/or modified sequence
MNDHNAYRCFSQPRHISVAMDKFGFSLPYVQYFGGVSALSKQQFLTINGFPNNYWGWGGEDDDIFNRLVFRGMSISRPNAVVGRCRMIRHSRDKKNEPNPQRFDRIAHTKETMLSDGLNSLTYQVLDVQRYPLYTQITVDIGTPS

SEQ ID NO: 118139 - DNA, 1197 bp, Artificial Sequence
  derived and/or modified sequence
atgagactgagagagcccctgctgagcggcagcgccgccatgcccggcgccagcctgcagagagcctgcagactgctggtggccgtgtgcgccctgcacctgggcgtgaccctggtgtactacctggccggcagagacctgagcagactgccccagctggtgggcgtgagcacccccctgcagggcggcagcaacagcgccgccgccatcggccagagcagcggcgagctgagaaccggcggcgccagaccccccccccccctgggcgccagcagccagcccagacccggcggcgacagcagccccgtggtggacagcggccccggccccgccagcaacctgaccagcgtgcccgtgccccacaccaccgccctgagcctgcccgcctgccccgaggagagccccctgctggtgggccccatgctgatcgagttcaacatgcccgtggacctggagctggtggccaagcagaaccccaacgtgaagatgggcggcagatacgcccccagagactgcgtgagcccccacaaggtggccatcatcatccccttcagaaacagacaggagcacctgaagtactggctgtactacctgcaccccgtgctgcagagacagcagctggactacggcatctacgtgatcaaccaggccggcgacaccatcttcaacagagccaagctgctgaacgtgggcttccaggaggccctgaaggactacgactacacctgcttcgtgttcagcgacgtggacctgatccccatgaacgaccacaacgcctacagatgcttcagccagcccagacacatcagcgtggccatggacaagttcggcttcagcctgccctacgtgcagtacttcggcggcgtgagcgccctgagcaagcagcagttcctgaccatcaacggcttccccaacaactactggggctggggcggcgaggacgacgacatcttcaacagactggtgttcagaggcatgagcatcagcagacccaacgccgtggtgggcagatgcagaatgatcagacacagcagagacaagaagaacgagcccaacccccagagattcgacagaatcgcccacaccaaggagaccatgctgagcgacggcctgaacagcctgacctaccaggtgctggacgtgcagagataccccctgtacacccagatcaccgtggacatcggcacccccagctag

SEQ ID NO: 118140 - DNA, 1068 bp, Artificial Sequence
  derived and/or modified sequence
atgagactgagagagcccctgctgagcggcagcgccgccatgcccggcgccagcctgcagagagcctgcagactgctggtggccgtgtgcgccctgcacctgggcgtgaccctggtgtactacctggccggcagagacctgagcagactgccccagctggtgggcgtgagcacccccgtggtggacagcggccccggccccgccagcaacctgaccagcgtgcccgtgccccacaccaccgccctgagcctgcccgcctgccccgaggagagccccctgctggtgggccccatgctgatcgagttcaacatgcccgtggacctggagctggtggccaagcagaaccccaacgtgaagatgggcggcagatacgcccccagagactgcgtgagcccccacaaggtggccatcatcatccccttcagaaacagacaggagcacctgaagtactggctgtactacctgcaccccgtgctgcagagacagcagctggactacggcatctacgtgatcaaccaggccggcgacaccatcttcaacagagccaagctgctgaacgtgggcttccaggaggccctgaaggactacgactacacctgcttcgtgttcagcgacgtggacctgatccccatgaacgaccacaacgcctacagatgcttcagccagcccagacacatcagcgtggccatggacaagttcggcttcagcctgccctacgtgcagtacttcggcggcgtgagcgccctgagcaagcagcagttcctgaccatcaacggcttccccaacaactactggggctggggcggcgaggacgacgacatcttcaacagactggtgttcagaggcatgagcatcagcagacccaacgccgtggtgggcagatgcagaatgatcagacacagcagagacaagaagaacgagcccaacccccagagattcgacagaatcgcccacaccaaggagaccatgctgagcgacggcctgaacagcctgacctaccaggtgctggacgtgcagagataccccctgtacacccagatcaccgtggacatcggcacccccagctag

SEQ ID NO: 118141 - DNA, 438 bp, Artificial Sequence
  derived and/or modified sequence
atgaacgaccacaacgcctacagatgcttcagccagcccagacacatcagcgtggccatggacaagttcggcttcagcctgccctacgtgcagtacttcggcggcgtgagcgccctgagcaagcagcagttcctgaccatcaacggcttccccaacaactactggggctggggcggcgaggacgacgacatcttcaacagactggtgttcagaggcatgagcatcagcagacccaacgccgtggtgggcagatgcagaatgatcagacacagcagagacaagaagaacgagcccaacccccagagattcgacagaatcgcccacaccaaggagaccatgctgagcgacggcctgaacagcctgacctaccaggtgctggacgtgcagagataccccctgtacacccagatcaccgtggacatcggcacccccagctag

SEQ ID NO: 118142 - DNA, 1197 bp, Artificial Sequence
  derived and/or modified sequence
atgcgactgcgagagccactgctgagtgggagcgctgcaatgccaggtgccagcctacagcgcgcttgtcgacttctggtagctgtctgcgctcttcatttaggggtaaccctggtttattacttagccggccgggatctgtcaagactaccacagttggtgggggtatccacaccccttcaggggggcagcaacagcgccgcagcgatcggccagtcctccggcgagttgcggacaggcggggcccgaccgcctccccccttgggagcttctagccaaccaaggccaggaggagactcaagcccagttgtggatagtggccccgggcccgcctccaatctgacttccgtgcccgtgccccacactactgctctatctctaccagcatgccctgaagaatctccgctccttgttggaccgatgttaatagagttcaacatgccagtcgatctggagcttgtggccaagcaaaaccctaacgtcaagatggggggacggtacgctccccgagattgtgtttcaccacacaaagtcgcaattattataccattccgaaacagacaggaacatctcaagtactggctgtattacttacacccagtgcttcaacgtcagcagctggattacggaatctacgttatcaaccaagctggtgataccatcttcaacagagccaaactgctgaatgtaggatttcaggaagccttaaaggattacgactatacatgtttcgtcttctctgatgtagaccttatccccatgaatgatcacaatgcctacagatgtttctcacagccccgacatataagcgtggctatggataagtttgggttctctttgccatatgttcagtactttggcggcgtttcagctctgagtaaacagcagttcctaactatcaatggcttccccaacaattactggggttggggcggagaggacgacgatatttttaatcgactcgtgttcaggggcatgagtatctctcggccaaacgctgtcgtcgggcgttgcaggatgatcaggcactctcgcgataaaaaaaatgagcctaaccctcagagatttgatcgcatcgcgcacaccaaagaaaccatgctgtcagacggactgaacagcctcacgtaccaggtcctcgacgttcaacggtaccccctctacacacagatcactgtcgacatcggcactccctcgtag

SEQ ID NO: 118143 - DNA, 1068 bp, Artificial Sequence
  derived and/or modified sequence
atgcgcctgagggaaccgctgctgagtggaagtgcagccatgcccggagcgtctttgcaaagagcctgcagactccttgttgcggtttgtgcattgcatttgggggtaactctcgtgtactacctcgctgggagggacctgtcccgcctgccacagctggtcggggtgagcactccggtggtggatagcggaccaggcccggcctccaatctcacctcagtgccggttccacataccaccgccctgtctctgcccgcctgcccagaggagtcccctctcctagtgggccccatgctgatcgaattcaacatgcccgtggacctcgagcttgtggctaaacagaatcccaacgtgaaaatgggcggacgctatgcccctagagattgcgtgtcaccacataaagtagcgatcataattccttttcggaaccggcaggagcatttgaagtactggttgtattacttacatcctgtgctgcagagacagcagctcgactatgggatttacgtgatcaaccaggcaggcgatacaatatttaacagagcaaaactgctgaacgtggggtttcaggaagccctgaaagattacgactacacctgcttcgtcttttctgacgtggatcttataccaatgaatgatcataatgcttatcgctgtttctcacagcctaggcacatcagtgtagctatggataagttcggattcagtctgccgtatgtacaatacttcggaggggtgagcgctctgtcgaagcaacagttcttgacaatcaacgggttccccaacaattactggggatggggaggagaggacgacgacatcttcaatcggctggtttttcgtgggatgtccatctcacgaccaaacgccgtggtgggtaggtgtagaatgattcgccatagtcgcgacaagaagaatgaaccaaacccccagcggtttgatcgcattgcccacaccaaggagaccatgctgtcagacgggctcaactccctgacatatcaagttctggatgtgcagcgatacccactgtacactcagattaccgtagacataggtactccctcatag

SEQ ID NO: 118144 - DNA, 438 bp, Artificial Sequence
  derived and/or modified sequence
atgaatgatcataatgcatacagatgctttagccagccccggcacatcagcgtggcaatggataagttcggcttctccctgccttacgtacaatacttcggcggagtgtctgcgctgtccaaacaacaattcttgacaatcaacggattccctaacaattactggggctgggggggcgaggatgatgatattttcaatagacttgtattcagaggaatgagtatctcacgccccaacgccgttgtgggcaggtgtcggatgatccgacactcccgagacaagaaaaatgagcccaatccgcagcgttttgatagaatcgctcacactaaggaaacaatgctgagtgatggtctgaacagtctgacctaccaggtgctggatgtacaacggtaccctttatatacacagatcaccgtggacattgggacaccgtcctag

SEQ ID NO: 118145 - DNA, 1197 bp, Artificial Sequence
  derived and/or modified sequence
atgaggctgcgggagcccctgctgagcggcagcgctgccatgcctggggccagcctgcagagggcctgccgcctgctggtggccgtgtgtgccctgcacctgggcgtgaccctggtgtactacctggccggccgggacctgagccggctgccccagctggtgggcgtgtccacccccctgcagggcggcagcaacagcgctgctgccatcggccagagcagcggggagctgaggactggaggagcccggcccccaccacccctgggcgccagcagccagcccaggcctggaggagacagcagccctgtggtggacagcggccctggccctgccagcaacctgacctctgtgcctgtgccccacaccacagccctgagcctgcctgcctgcccagaggagagccccctgctggtgggccccatgctgattgagttcaacatgcctgtggacctggagctggtggccaagcagaaccccaacgtgaagatgggcggccgctatgccccccgggactgtgtgagcccccacaaggtggccatcatcatccccttcaggaaccggcaggagcacctgaagtactggctgtactacctgcaccctgtgctgcagaggcagcagctggactatggcatctacgtgatcaaccaggccggggacaccatcttcaacagagccaagctgctgaatgtgggcttccaggaggccctgaaggactatgactacacctgctttgtgttcagtgatgtggacctgatccccatgaatgaccacaatgcctaccgctgcttcagccagcccaggcacatctctgtggccatggacaagtttggcttcagcctgccctacgtgcagtactttggaggagtgtctgccctgagcaagcagcagttcctgaccatcaatggcttccccaacaactactggggctggggcggagaagatgatgacatcttcaaccggctggtgttccggggcatgagcatcagccggcccaatgctgtggtgggccgctgcaggatgatccgccacagccgggacaagaagaatgagcccaacccccagagatttgacagaattgcccacaccaaggagaccatgctgagtgatggcctgaacagcctgacctaccaggtgctggatgtgcagcgctaccccctgtacacccagatcaccgtggacatcggcacccccagctag

SEQ ID NO: 118146 - DNA, 1068 bp, Artificial Sequence
  derived and/or modified sequence
atgaggctgcgggagcccctgctgagcggcagcgctgccatgcctggggccagcctgcagagggcctgccgcctgctggtggccgtgtgtgccctgcacctgggcgtgaccctggtgtactacctggccggccgggacctgagccggctgccccagctggtgggcgtgtccacccctgtggtggacagcggccctggccctgccagcaacctgacctctgtgcctgtgccccacaccacagccctgagcctgcctgcctgcccagaggagagccccctgctggtgggccccatgctgattgagttcaacatgcctgtggacctggagctggtggccaagcagaaccccaacgtgaagatgggcggccgctatgccccccgggactgtgtgagcccccacaaggtggccatcatcatccccttcaggaaccggcaggagcacctgaagtactggctgtactacctgcaccctgtgctgcagaggcagcagctggactatggcatctacgtgatcaaccaggccggggacaccatcttcaacagagccaagctgctgaatgtgggcttccaggaggccctgaaggactatgactacacctgctttgtgttcagtgatgtggacctgatccccatgaatgaccacaatgcctaccgctgcttcagccagcccaggcacatctctgtggccatggacaagtttggcttcagcctgccctacgtgcagtactttggaggagtgtctgccctgagcaagcagcagttcctgaccatcaatggcttccccaacaactactggggctggggcggggaggatgatgacatcttcaaccggctggtgttccggggcatgagcatcagccggcccaatgctgtggtgggccgctgcaggatgatccgccacagccgggacaagaagaatgagcccaacccccagagatttgaccgcatcgcccacaccaaggagaccatgctgagtgatggcctgaacagcctgacctaccaggtgctggatgtgcagcgctaccccctgtacacccagatcaccgtggacatcggcacccccagctag

SEQ ID NO: 118147 - DNA, 438 bp, Artificial Sequence
  derived and/or modified sequence
atgaatgaccacaatgcctaccgctgcttcagccagcccaggcacatctctgtggccatggacaagtttggcttcagcctgccctacgtgcagtactttggaggagtgtctgccctgagcaagcagcagttcctgaccatcaatggcttccccaacaactactggggctggggcggggaggatgatgacatcttcaaccggctggtgttccggggcatgagcatcagccggcccaatgctgtggtgggccgctgcaggatgatccgccacagccgggacaagaagaatgagcccaacccccagagatttgaccgcatcgcccacaccaaggagaccatgctgagtgatggcctgaacagcctgacctaccaggtgctggatgtgcagcgctaccccctgtacacccagatcaccgtggacatcggcacccccagctag

SEQ ID NO: 118148 - DNA, 1197 bp, Artificial Sequence
  derived and/or modified sequence
atgcggctgcgggagcccctgctgagcggcagcgccgccatgcccggggcctcgctgcaacgagcctgccgactgctcgtcgccgtttgcgccctgcacctcggcgtcaccctggtatattatcttgcagggcgggatcttagtagactgccccagctcgtaggggtgagcactccattgcaggggggctcgaattctgccgccgctatcggccaatcatcaggcgaacttagaaccggcggcgcgcgccctccaccacccctcggcgcttctagccaacccagaccgggaggagattcctcccccgtcgttgactctggcccagggccagccagcaaccttacctccgtgcccgttccacacaccaccgccctctcacttccagcatgtcctgaagagagccctctcctcgtgggcccaatgctgatcgagttcaatatgccagtcgatctagagttggtcgccaagcaaaatccgaacgtgaagatgggtggacgatatgccccacgagactgtgtgtccccgcacaaggtggcgatcattatccccttcagaaatcggcaggaacatctgaaatactggctgtattatctccaccccgtgctgcagcgtcaacagcttgactacggtatatatgtgattaaccaggcgggcgatactatttttaatcgggccaaactgctaaacgtgggctttcaagaggccttaaaggactatgattacacatgttttgtcttttccgacgttgacttgattccaatgaatgaccacaatgcctatcgctgcttctcacagcccagacacatcagtgtggcaatggacaagtttggattcagtctaccttatgtccaatatttcgggggagtttccgcactgagcaagcagcagttcctgacaatcaacgggttccccaacaattactggggatggggaggtgaggatgacgacatcttcaacaggctggtctttaggggtatgagtatctctcggcctaatgcggtggtggggaggtgtagaatgatccggcactctagagataaaaaaaacgagcccaatccgcaacgctttgatcgaatagcgcatactaaagaaaccatgctgagtgatggtctcaactctttgacataccaggtgcttgatgtgcaaagataccctctgtatactcagattaccgtcgacatcgggacgccgagctag

SEQ ID NO: 118149 - DNA, 1068 bp, Artificial Sequence
  derived and/or modified sequence
atgcggctgcgggagcccctgctgagcggcagcgccgccatgcccggtgcatccttacaacgcgcctgcagactactggtcgctgtgtgcgcattacacctcggggtgacgttggtatattacctggccggccgggaccttagtcgcctccctcagctcgtgggggtgtccacacctgttgtggacagcggaccagggcccgcttctaatctcacttccgtacccgtacctcacacaaccgccctgtcgctgcccgcgtgtcccgaagaatcccctctgctggtggggcctatgttgatcgagtttaacatgcccgtggatttggaacttgtggccaagcagaatcccaacgtaaaaatgggcgggagatacgccccacgggattgtgtatcccctcacaaggtcgcaataatcattcccttccgtaaccggcaggagcacttaaagtattggctgtactacctgcatcccgtgctccagaggcagcagctggactatggcatatacgtgattaatcaggcgggtgacacaatttttaaccgggccaaactcctcaacgtgggtttccaggaggccttgaaagactatgattatacttgcttcgtgttcagcgacgtggacctgattccgatgaacgatcataacgcataccggtgctttagtcaaccacggcatatttccgtggctatggacaaattcggattctccctcccttacgtccaatatttcggaggagtgagcgcgctctccaaacagcagttcctaacaattaacgggtttcctaataactattggggatgggggggtgaggacgacgatatatttaatcgacttgtcttccggggtatgtccataagccgacccaacgctgttgtgggccgctgtcggatgattaggcacagtagagataaaaaaaacgagcccaacccccagcgttttgaccgcattgcacatacgaaggagactatgttaagtgacggtctgaattcactgacctaccaagttttggatgtgcagagatacccactttacactcagatcactgttgatataggcactccctcttag

SEQ ID NO: 118150 - DNA, 438 bp, Artificial Sequence
  derived and/or modified sequence
atgaacgaccacaacgcctaccggtgcttcagccagccccggcacatttccgtcgccatggataaatttggcttttcccttccctacgttcagtactttggcggcgtatctgccctgagcaagcagcaatttttgaccattaacggctttcctaacaattattgggggtggggaggcgaggatgacgatatatttaatagactcgtgttccgcggaatgtctatttcaaggcctaatgcagtggtcggtcgctgcagaatgatccggcatagccgagacaagaagaacgagcctaatccacagagattcgatcgtatagcccatacaaaggagacaatgctatcagatggccttaactcgctaacataccaagtgctggatgtgcaaaggtacccactgtacacacaaatcacagttgatattggaaccccttcatag

SEQ ID NO: 118151 - DNA, 1197 bp, Artificial Sequence
  derived and/or modified sequence
atgcgactgcgagaacccctgctgtccggctctgctgccatgccaggcgcttctctccaacgggcatgcaggctgctggtggccgtctgcgcgctccacctgggagtgacacttgtgtattacctcgccggtcgcgatctttcgagattgcctcaactggtaggcgttagcacacccctgcaagggggaagcaacagcgccgcagccattggacagtccagtggggaattgcgcacaggaggagcccgtccgcctccccctttgggcgcttcctcacagccacgccctggcggagactccagccctgtggtcgattcagggcctggaccagcctccaatctaacaagcgtgccagtccctcacactaccgcactttctcttcccgcatgtcctgaggagagtcctctcctcgtgggcccaatgcttatcgagtttaatatgccagtggacctggaactggtggcaaagcagaaccctaatgtgaagatgggtggacggtacgcgcctagagattgcgtatccccacacaaggtggctattatcattccctttcggaaccggcaggagcacctgaagtactggttgtattatctgcatccggttttgcagagacagcaactggattatggaatctatgtcatcaatcaagcaggcgataccatattcaatcgcgcaaagctcctcaatgttggattccaggaagcgcttaaggactacgattacacgtgctttgttttttctgatgtggatctgatcccaatgaacgaccataacgcctacaggtgttttagccagcctagacacatctcggtcgccatggataaattcgggttttccctcccatacgtccagtactttgggggagtatccgcccttagtaagcagcagtttctgaccatcaacggcttccctaacaattattggggctggggcggtgaagatgacgatatctttaatcggctggtcttcagaggtatgtccatatcccgccctaatgctgtcgtaggacgatgcagaatgataaggcacagtcgagataaaaagaatgagcccaacccgcaacggttcgaccgaattgctcacacgaaggagacgatgctcagcgacgggctgaacagcctgacatatcaggtattagatgtccagcggtatccgctctacacacagatcaccgttgacattggtacgccatcgtag

SEQ ID NO: 118152 - DNA, 1068 bp, Artificial Sequence
  derived and/or modified sequence
atgcgcctccgcgagccattactgagtggctcagcggcaatgcccggagcaagtttacagcgcgcttgtcgtcttcttgtcgccgtttgtgcgctccatcttggggtgactttggtctactacctggcaggcagggacttaagtaggcttccacagctggtgggcgtatcaacacctgtcgtggatagtggtccaggcccagcaagcaacttgacaagcgtccctgttccgcatacaacggccttgtcactgcccgcttgtcctgaggagtctcccctactcgtgggacccatgcttatcgagtttaacatgccggttgacttggaacttgtggctaaacagaatccaaatgtgaaaatggggggaagatatgctccacgtgactgtgtgagcccacataaagtcgccattatcataccgtttaggaaccgccaagagcatttaaaatactggctctactatctacaccccgtgctccagcggcagcaacttgactacgggatttacgtgatcaaccaagccggagatacaattttcaacagagccaagctgttgaacgtaggcttccaagaggctttaaaggactacgattatacatgttttgttttctcggacgtcgacctaattccaatgaatgatcacaacgcttataggtgcttctcgcagcctagacacattagcgtggccatggacaaattcggctttagcctcccatacgtccagtattttggcggtgtgtctgcgttaagcaagcaacagttcctcacaataaacggtttcccaaataactactggggatggggaggggaggatgacgacattttcaatcggcttgtcttccgaggcatgagtatttcacgccctaacgcggtagtggggcgatgccggatgatcagacactcccgtgacaaaaaaaacgaacccaacccccagcgattcgaccgcattgcccatacgaaggaaactatgttgagcgacggcctgaactccctcacctatcaagtcctggacgtgcagcgctatcccctgtacactcagatcacagtggatatcggcaccccgtcgtag

SEQ ID NO: 118153 - DNA, 438 bp, Artificial Sequence
  derived and/or modified sequence
atgaacgatcacaacgcttacaggtgtttcagccagccgaggcacatttccgtggccatggataaatttgggttttcactaccatacgtgcagtacttcggtggtgtgtctgccctttccaagcagcagttcctgaccatcaacgggttcccaaataactactggggttggggcggagaggatgatgacatttttaatcgcttggtgtttagggggatgtccatctccaggcccaatgccgtcgtcggcaggtgtcgaatgattagacacagccgggacaagaagaatgagccaaaccctcagcgattcgatcgaattgcccacacaaaagagactatgttaagtgacggtctgaactccctcacctaccaagttctcgacgtgcaacggtatcccctatacacgcaaatcaccgttgatattggaactccatcatag

SEQ ID NO: 118154 - DNA, 4201 bp, Artificial Sequence
  derived and/or modified sequence
gcctcgggcggcttctcgccgctcccaggtctggctggctggaggagtctcagctctcagccgctcgcccgcccccgctccgggccctcccctagtcgccgctgtggggcagcgcctggcgggcggcccgcgggcgggtcgcctcccctcctgtagcccacacccttcttaaagcggcggcgggaagatgaggcttcgggagccgctcctgagcggcagcgccgcgatgccaggcgcgtccctacagcgggcctgccgcctgctcgtggccgtctgcgctctgcaccttggcgtcaccctcgtttactacctggctggccgcgacctgagccgcctgccccaactggtcggagtctccacaccgctgcagggcggctcgaacagtgccgccgccatcgggcagtcctccggggagctccggaccggaggggcccggccgccgcctcctctaggcgcctcctcccagccgcgcccgggtggcgactccagcccagtcgtggattctggccctggccccgctagcaacttgacctcggtcccagtgccccacaccaccgcactgtcgctgcccgcctgccctgaggagtccccgctgcttgtgggccccatgctgattgagtttaacatgcctgtggacctggagctcgtggcaaagcagaacccaaatgtgaagatgggcggccgctatgcccccagggactgcgtctctcctcacaaggtggccatcatcattccattccgcaaccggcaggagcacctcaagtactggctatattatttgcacccagtcctgcagcgccagcagctggactatggcatctatgttatcaaccaggcgggagacactatattcaatcgtgctaagctcctcaatgttggctttcaagaagccttgaaggactatgactacacctgctttgtgtttagtgacgtggacctcattccaatgaatgaccataatgcgtacaggtgtttttcacagccacggcacatttccgttgcaatggataagtttggattcagcctaccttatgttcagtattttggaggtgtctctgctctaagtaaacaacagtttctaaccatcaatggatttcctaataattattggggctggggaggagaagatgatgacatttttaacagattagtttttagaggcatgtctatatctcgcccaaatgctgtggtcgggaggtgtcgcatgatccgccactcaagagacaagaaaaatgaacccaatcctcagaggtttgaccgaattgcacacacaaaggagacaatgctctctgatggtttgaactcactcacctaccaggtgctggatgtacagagatacccattgtatacccaaatcacagtggacatcgggacaccgagctagcgttttggtacacggataagagacctgaaattagccagggacctctgctgtgtgtctctgccaatctgctgggctggtccctctcatttttaccagtctgagtgacaggtccccttcgctcatcattcagatggctttccagatgaccaggacgagtgggatattttgcccccaacttggctcggcatgtgaattcttagctctgcaaggtgtttatgcctttgcgggtttcttgatgtgttcgcagtgtcaccccagagtcagaactgtacacatcccaaaatttggtggccgtggaacacattcccggtgatagaattgctaaattgtcgtgaaataggttagaatttttctttaaattatggttttcttattcgtgaaaattcggagagtgctgctaaaattggattggtgtgatctttttggtagttgtaatttaacagaaaaacacaaaatttcaaccattcttaatgttacgtcctccccccacccccttctttcagtggtatgcaaccactgcaatcactgtgcatatgtcttttcttagcaaaaggattttaaaacttgagccctggaccttttgtcctatgtgtgtggattccagggcaactctagcatcagagcaaaagccttgggtttctcgcattcagtggcctatctccagattgtctgatttctgaatgtaaagttgttgtgtttttttttaaatagtagtttgtagtattttaaagaaagaacagatcgagttctaattatgatctagcttgattttgtgttgatccaaatttgcatagctgtttaatgttaagtcatgacaatttatttttcttggcatgctatgtaaacttgaatttcctatgtatttttattgtggtgttttaaatatggggaggggtattgagcattttttagggagaaaaataaatatatgctgtagtggccacaaataggcctatgatttagctggcaggccaggttttctcaagagcaaaatcaccctctggccccttggcaggtaaggcctcccggtcagcattatcctgccagacctcggggaggatacctgggagacagaagcctctgcacctactgtgcagaactctccacttccccaaccctccccaggtgggcagggcggagggagcctcagcctccttagactgacccctcaggcccctaggctggggggttgtaaataacagcagtcaggttgtttaccagccctttgcacctccccaggcagagggagcctctgttctggtgggggccacctccctcagaggctctgctagccacactccgtggcccaccctttgttaccagttcttcctccttcctcttttcccctgcctttctcattccttccttcgtctccctttttgttcctttgcctcttgcctgtcccctaaaacttgactgtggcactcagggtcaaacagactatccattccccagcatgaatgtgccttttaattagtgatctagaaagaagttcagccgaacccacaccccaactccctcccaagaacttcggtgcctaaagcctcctgttccacctcaggttttcacaggtgctcccaccccagttgaggctcccacccacagggctgtctgtcacaaacccacctctgttgggagctattgagccacctgggatgagatgacacaaggcactcctaccactgagcgcctttgccaggtccagcctgggctcaggttccaagactcagctgcctaatcccagggttgagccttgtgctcgtggcggaccccaaaccactgccctcctgggtaccagccctcagtgtggaggctgagctggtgcctggccccagtcttatctgtgcctttactgctttgcgcatctcagatgctaacttggttctttttccagaagcctttgtattggttaaaaattattttccattgcagaagcagctggactatgcaaaaagtatttctctgtcagttccccactctataccaaggatattattaaaactagaaatgactgcattgagagggagttgtgggaaataagaagaatgaaagcctctctttctgtccgcagatcctgacttttccaaagtgccttaaaagaaatcagacaaatgccctgagtggtaacttctgtgttattttactcttaaaaccaaactctaccttttcttgttgttttttttttttttttttttttttttttggttaccttctcattcatgtcaagtatgtggttcattcttagaaccaagggaaatactgctccccccatttgctgacgtagtgctctcatgggctcacctgggcccaaggcacagccagggcacagttaggcctggatgtttgcctggtccgtgagatgccgcgggtcctgtttccttactggggatttcagggctgggggttcagggagcatttccttttcctgggagttatgaccgcgaagttgtcatgtgccgtgcccttttctgtttctgtgtatcctattgctggtgactctgtgtgaactggcctttgggaaagatcagagagggcagaggtggcacaggacagtaaaggagatgctgtgctggccttcagcctggacagggtctctgctgactgccaggggcgggggctctgcatagccaggatgacggctttcatgtcccagagacctgttgtgctgtgtattttgatttcctgtgtatgcaaatgtgtgtatttaccattgtgtagggggctgtgtctgatcttggtgttcaaaacagaactgtatttttgcctttaaaattaaataatataacgtgaataaatgaccctatctttgtaactgca

SEQ ID NO: 118155 - DNA, 1633 bp, Artificial Sequence
  derived and/or modified sequence
aaagcggcggcgggaagatgaggcttcgggagccgctcctgagcggcagcgccgcgatgccaggcgcgtccctacagcgggcctgccgcctgctcgtggccgtctgcgctctgcaccttggcgtcaccctcgtttactacctggctggccgcgacctgagccgcctgccccaactggtcggagtctccaccccagtcgtggattctggccctggccccgctagcaacttgacctcggtcccagtgccccacaccaccgcactgtcgctgcccgcctgccctgaggagtccccgctgcttgtgggccccatgctgattgagtttaacatgcctgtggacctggagctcgtggcaaagcagaacccaaatgtgaagatgggcggccgctatgcccccagggactgcgtctctcctcacaaggtggccatcatcattccattccgcaaccggcaggagcacctcaagtactggctatattatttgcacccagtcctgcagcgccagcagctggactatggcatctatgttatcaaccaggcgggagacactatattcaatcgtgctaagctcctcaatgttggctttcaagaagccttgaaggactatgactacacctgctttgtgtttagtgacgtggacctcattccaatgaatgaccataatgcgtacaggtgtttttcacagccacggcacatttccgttgcaatggataagtttggattcagcctaccttatgttcagtattttggaggtgtctctgctctaagtaaacaacagtttctaaccatcaatggatttcctaataattattggggctggggaggagaagatgatgacatttttaacagattagtttttagaggcatgtctatatctcgcccaaatgctgtggtcgggaggtgtcgcatgatccgccactcaagagacaagaaaaatgaacccaatcctcagaggtttgaccgaattgcacacacaaaggagacaatgctctctgatggtttgaactcactcacctaccaggtgctggatgtacagagatacccattgtatacccaaatcacagtggacatcgggacaccgagctagcgttttggtacacggataagagacctgaaattagccagggacctctgctgtgtgtctctgccaatctgctgggctggtccctctcatttttaccagtctgagtgacaggtccccttcgctcatcattcagatggctttccagatgaccaggacgagtgggatattttgcccccaacttggctcggcatgtgaattcttagctctgcaaggtgtttatgcctttgcgggtttcttgatgtgttcgcagtgtcaccccagagtcagaactgtacacatcccaaaatttggtggccgtggaacacattcccggtgatagaattgctaaattgtcgtgaaataggttagaatttttctttaaattatggttttcttattcgtgaaaattcggagagtgctgctaaaattggattggtgtgatctttttggtagttgtaatttaacagaaaaacacaaaatttcaaccattcttaatgttacgtcctccccccacccccttctttcagtggtatgcaaccactgcaatcactgtgcatatgtcttttcttagc

SEQ ID NO: 118156 - DNA, 799 bp, Artificial Sequence
  derived and/or modified sequence
agcaaagcaagtggaaggaggagttcctctctgatctgcttcttattctccacctaccttctcttctgtactttccgcctcctagagagagagagagagagaggaatgccgacctaactaccgctgccactgctgctgccaccaccgctgccaccaccaccctggcgggagacactatattcaatcgtgctaagctcctcaatgttggctttcaagaagccttgaaggactatgactacacctgctttgtgtttagtgacgtggacctcattccaatgaatgaccataatgcgtacaggtgtttttcacagccacggcacatttccgttgcaatggataagtttggattcagcctaccttatgttcagtattttggaggtgtctctgctctaagtaaacaacagtttctaaccatcaatggatttcctaataattattggggctggggaggagaagatgatgacatttttaacagattagtttttagaggcatgtctatatctcgcccaaatgctgtggtcgggaggtgtcgcatgatccgccactcaagagacaagaaaaatgaacccaatcctcagaggtttgaccgaattgcacacacaaaggagacaatgctctctgatggtttgaactcactcacctaccaggtgctggatgtacagagatacccattgtatacccaaatcacagtggacatcgggacaccgagctagcgttttggtacacggataagagacctgaaattagccagggacctctgctgtgtgtctctgccaatctgctgggctggtccctctca

SEQ ID NO: 118157 - protein, 637 aa, Artificial Sequence
  derived and/or modified sequence
MGLLSQGSPLSWEETKRHADHVRRHGILQFLHIYHAVKDRHKDVLKWGDEVEYMLVSFDHENKKVRLVLSGEKVLETLQEKGERTNPNHPTLWRPEYGSYMIEGTPGQPYGGTMSEFNTVEANMRKRRKEATSILEENQALCTITSFPRLGCPGFTLPEVKPNPVEGGASKSLFFPDEAINKHPRFSTLTRNIRHRRGEKVVINVPIFKDKNTPSPFIETFTEDDEASRASKPDHIYMDAMGFGMGNCCLQVTFQACSISEARYLYDQLATICPIVMALSAASPFYRGYVSDIDCRWGVISASVDDRTREERGLEPLKNNNYRISKSRYDSIDSYLSKCGEKYNDIDLTIDKEIYEQLLQEGIDHLLAQHVAHLFIRDPLTLFEEKIHLDDANESDHFENIQSTNWQTMRFKPPPPNSDIGWRVEFRPMEVQLTDFENSAYVVFVVLLTRVILSYKLDFLIPLSKVDENMKVAQKRDAVLQGMFYFRKDICKGGNAVVDGCGKAQNSTELAAEEYTLMSIDTIINGKEGVFPGLIPILNSYLENMEVDVDTRCSILNYLKLIKKRASGELMTVARWMREFIANHPDYKQDSVITDEMNYSLILKCNQIANELCECPELLGSAFRKVKYSGSKTDSSN

SEQ ID NO: 118158 - DNA, 1914 bp, Artificial Sequence
  derived and/or modified sequence
atgggcttactctcccaggggagccccctctcatgggaagaaaccaaaaggcatgcggaccatgtgcggagacatgggatcctacaatttcttcacatttaccacgccgtgaaggaccggcacaaagacgtcctcaaatggggtgacgaggtggagtatatgttagtgtcctttgaccatgagaataagaaggtacgactcgtgctgtctggcgaaaaggttttagagaccctgcaagagaaaggagaaaggaccaatcctaatcatcccactttgtggaggccagaatatggcagctacatgatcgagggcactcctgggcaaccgtatggaggaactatgagtgaattcaatacagtggaggccaacatgcgaaaacgaaggaaggaagccacttcgatcctcgaagagaaccaggccctctgcaccattacttcctttccaagactaggatgcccaggtttcaccctgccggaggtgaagccaaatccagtggaagggggcgcaagcaagtccctgttctttccggacgaggccattaacaaacatccgcggttctctaccctgaccaggaacattcggcatagacgcggagagaaggtcgtcatcaacgtccctatttttaaggacaagaacactccttcccctttcattgaaactttcaccgaggacgacgaagcctcccgggccagcaagcctgatcacatttacatggatgcaatgggcttcggaatggggaattgttgtctacaggttacatttcaggcctgctctatttccgaagccagatacctatatgatcagctggccactatttgtcctattgtcatggcgctttctgcggcttctcctttttatcgaggatacgtgtccgatatcgattgcaggtggggggtgatttcagcatcagttgacgaccgaacaagagaggagagaggtttggagccgctgaagaacaacaattaccgcattagcaaaagtcgatacgactccattgattcttatctgtccaaatgcggagagaagtacaacgatattgaccttacgatagataaggagatctacgaacagttacttcaagaggggattgaccatctgctcgcccaacatgtagcccatctgtttattagagaccccctaacattgtttgaagagaagatccatctcgacgacgccaacgagtccgatcatttcgaaaacatccaaagcaccaattggcagacaatgagatttaagccccccccacccaacagcgatattggttggcgtgtggaatttcgcccaatggaggtgcaacttacagattttgaaaacagcgcatacgtcgtctttgtggtgttgctcacccgcgtgatcctgtcctataaacttgactttttaatcccattatcgaaggtggatgagaatatgaaggtggcccagaagcgggacgccgttctacagggtatgttttatttcaggaaagatatctgtaagggcggtaacgccgttgtcgacgggtgcggtaaggctcagaacagtacagaactggccgccgaggagtacactctaatgagcatcgataccatcatcaacggaaaggaaggggtgttcccaggcctgattccaatactcaactcctatctcgagaatatggaagtggatgtggacactagatgttcaatcctgaactatctgaagctaatcaaaaagcgcgcttcaggagaactgatgacagttgcccggtggatgagggagtttattgccaatcacccagactacaaacaagactccgtcattactgacgagatgaactatagcttgatcctgaaatgcaaccagatcgcaaacgaactttgtgagtgcccagaactacttggttccgcttttcgaaaagtgaagtactcgggttctaaaactgatagtagcaactag

SEQ ID NO: 118159 - DNA, 3813 bp, Artificial Sequence
  derived and/or modified sequence
ataaaacctggagcgcaggatcgcgcccaggagcggcgagctagcggacgcaaagactgggcatgctccgcggcggcgcaggttttggtcacaagtaggaagaagccagtgcaccagaccggcaaagagaagcgggagccgccgcggcagcgcggccgtggggtccgccgccgccgcatcggagcgggaggaggagcagcggggagggcgaggccgccgggccgagagccgtcccgcctgctctcggtcttctgccttcgcctccgcgcggtgcgtcggacccagggtctgtcacctgggcgccaggggccgccgccggggagccggagcgggcaggaccctccctccgccgactgcggcccgagagcgcccccgcggggtggagcggcagccgccttctgcgggcggctgagtgtccgtctcgcgcccggagcgggcgaccgccgtcagcccggaggaggaggaggaggaggagggggcggccatggggctgctgtcccagggctcgccgctgagctgggaggaaaccaagcgccatgccgaccacgtgcggcggcacgggatcctccagttcctgcacatctaccacgccgtcaaggaccggcacaaggacgttctcaagtggggcgatgaggtggaatacatgttggtatcttttgatcatgaaaataaaaaagtccggttggtcctgtctggggagaaagttcttgaaactctgcaagagaagggggaaaggacaaacccaaaccatcctaccctttggagaccagagtatgggagttacatgattgaagggacaccaggacagccctacggaggaacaatgtccgagttcaatacagttgaggccaacatgcgaaaacgccggaaggaggctacttctatattagaagaaaatcaggctctttgcacaataacttcatttcccagattaggctgtcctgggttcacactgcccgaggtcaaacccaacccagtggaaggaggagcttccaagtccctcttctttccagatgaagcaataaacaagcaccctcgcttcagtaccttaacaagaaatatccgacataggagaggagaaaaggttgtcatcaatgtaccaatatttaaggacaagaatacaccatctccatttatagaaacatttactgaggatgatgaagcttcaagggcttctaagccggatcatatttacatggatgccatgggatttggaatgggcaattgctgtctccaggtgacattccaagcctgcagtatatctgaggccagatacctttatgatcagttggctactatctgtccaattgttatggctttgagtgctgcatctcccttttaccgaggctatgtgtcagacattgattgtcgctggggagtgatttctgcatctgtagatgatagaactcgggaggagcgaggactggagccattgaagaacaataactataggatcagtaaatcccgatatgactcaatagacagctatttatctaagtgtggtgagaaatataatgacatcgacttgacgatagataaagagatctacgaacagctgttgcaggaaggcattgatcatctcctggcccagcatgttgctcatctctttattagagacccactgacactgtttgaagagaaaatacacctggatgatgctaatgagtctgaccattttgagaatattcagtccacaaattggcagacaatgagatttaagccccctcctccaaactcagacattggatggagagtagaatttcgacccatggaggtgcaattaacagactttgagaactctgcctatgtggtgtttgtggtactgctcaccagagtgatcctttcctacaaattggattttctcattccactgtcaaaggttgatgagaacatgaaggtagcacagaaaagagatgctgtcttgcagggaatgttttatttcaggaaagatatttgcaaaggtggcaatgcagtggtggatggttgtggcaaggcccagaacagcacggagctcgctgcagaggagtacaccctcatgagcatagacaccatcatcaatgggaaggaaggtgtgtttcctggactgatcccaattctgaactcttaccttgaaaacatggaagtggatgtggacaccagatgtagtattctgaactacctaaagctaattaagaagagagcatctggagaactaatgacagttgccagatggatgagggagtttatcgcaaaccatcctgactacaagcaagacagtgtcataactgatgaaatgaattatagccttattttgaagtgtaaccaaattgcaaatgaattatgtgaatgcccagagttacttggatcagcatttaggaaagtaaaatatagtggaagtaaaactgactcatccaactagacattctacagaaagaaaaatgcattattgacgaactggctacagtaccatgcctctcagccagcccgtgtgtataatatgaagaccaaatgatagaactgtactgttttctgggccagtgagccagaaattgattaaggctttctttggtaggtaaatctagagtttatacagtgtacatgtacatagtaaagtatttttgattaacaatgtattttaataacatatctaaagtcatcatgaactggcttgtacatttttaaattcttactctggagcaacctactgtctaagcagttttgtaaatgtactggtaattgtacaatacttgcattccagagttaaaatgtttactgtaaatttttgttcttttaaagactacctgggacctgatttattgaaatttttctctttaaaaacattttctctcgttaattttcctttgtcatttcctttgttgtctacattaaatcacttgaatccattgaaagtgcttcaagggtaatcttgggtttctagcaccttatctatgatgtttcttttgcaattggaataatcacttggtcaccttgccccaagctttcccctctgaataaatacccattgaactctgatggctgttatcaaaggaacttttctttgtttaaatttgctgatgcaggaattaagtttaaacacaactctatagaaagaaaggagattattacccagaattcacatgtagtgattattaaggacaatttttttttttaactaaaaaagttggcggcaggggtggggggtggcaatcatttttcttcctatacatacaaaggatattgtcaaaaatggcgttcttctcttgtggcctgttattctgattgctgctgtatacagttttgtcactctttagtttttagttaagcatactgatagactttcctctaaaagccattcactccagattttacctggggaatattctacatactgcttactttctctataaaactcatcaataaatcatgaaaggcactgagttttgtaaatcaggaccctaaatgtttaattgtaaataagtttcagataattattatagctttgcgttgaagtttgttgttttttttctcaactagttaagtcaactgcttctgaaataactctgtattgtagattatgcagatctttacaggcataaatatttaaactgtaatatgctaacttgaagagattgcaataaagctgcttcagctaaccctgtttatgtttaaatactagggtttgttctatattttatacatgcattttggatgattaaagaatgcctggttttcgtttgcaatttgcttgtgtaaatcaggttgtaaaaaggcagataaattgaaatgtttgtggtatgaggaaataaaagaatggaattagctttcattcagaaa

SEQ ID NO: 118160 - DNA, 1914 bp, Artificial Sequence
  derived and/or modified sequence
atgggcctgctgagccagggcagccccctgtcctgggaggagaccaagagacatgctgaccacgtgagaagacatggcatcctgcagttcctgcacatctaccacgctgtgaaggacagacacaaggatgtgctgaagtggggagatgaggtggagtacatgctggtgtcctttgaccacgagaacaagaaggtgcggctggtgctgagcggggagaaggtgctggagaccctgcaggagaagggggagaggaccaaccccaaccaccccaccctgtggaggccagaatatggcagctacatgattgagggcaccccaggccagccctacggcggcaccatgtctgagttcaacacagtggaggccaacatgaggaagaggaggaaggaggccaccagcatcctggaggagaaccaggccctgtgcaccatcaccagcttcccccggctgggctgccccggcttcaccctgcctgaggtgaagcccaaccctgtggagggcggggccagcaagagcctcttcttcccagatgaggccatcaacaagcacccccgcttcagcaccctgaccaggaacatccgccaccggcggggggagaaggtggtgatcaacgtgcccatcttcaaggacaagaacacccccagccccttcatcgagaccttcacagaagatgatgaggccagccgggccagcaagccagaccacatctacatggatgccatgggcttcggcatgggcaactgctgcctgcaggtgaccttccaggcctgcagcatcagcgaggcccgctacctgtatgaccagctggccaccatctgccccatcgtgatggccctgtctgctgccagccccttctaccggggctacgtgtctgacatcgactgccgctggggcgtcatcagcgcctctgtggatgacaggacccgggaggagcggggcctggagcccctgaagaacaacaactaccgcatcagcaagagccgctatgacagcattgacagctacctgagcaaatgtggggagaagtacaatgacatcgacctgaccatcgacaaggagatctatgagcagctgctgcaggagggcatcgaccacctgctggcccagcacgtggcccacctgttcatccgggaccccctgaccctgtttgaggagaagatccacctggatgatgccaatgaaagtgaccactttgagaacatccagagcaccaactggcagaccatgaggttcaagcccccaccacccaacagcgacatcggctggagggtggagttccggcccatggaggtgcagctgacagactttgaaaattctgcctacgtggtgtttgtggtgctgctgaccagggtcatcctgagctacaagctggacttcctgatccccctgagcaaggtggatgagaacatgaaggtggcccagaagagagatgctgtgctgcagggcatgttctacttcaggaaggacatctgcaagggcggcaatgctgtggtggatggctgcggcaaggcccagaacagcacagagctggccgctgaggagtacaccctgatgagcattgacaccatcatcaatggcaaggagggcgtcttccctggcctcatccccatcctgaacagctacctggagaacatggaggtggatgtggacacccgctgcagcatcctgaactacctgaagctgatcaagaagagggccagcggggagctgatgacagtggcccgctggatgagggagttcatcgccaaccacccagactacaagcaggacagcgtcatcacagatgagatgaactacagcctcatcctgaagtgcaaccagatcgccaatgagctgtgtgagtgcccagagctgctgggcagcgccttcaggaaggtgaagtacagcggcagcaagacagacagcagcaactag

SEQ ID NO: 118161 - DNA, 1914 bp, Artificial Sequence
  derived and/or modified sequence
atgggcctgctgagccagggcagccccctgagctgggaggagaccaagaggcacgcagaccatgtgaggcggcacggtatattgcagttcctgcacatctatcatgctgtcaaagatagacataaggacgtgctgaaatggggcgatgaagttgaatatatgctagtgtctttcgaccacgaaaataaaaaggtgcgactagtcctgagcggcgaaaaagtgctggagacactccaagaaaagggcgagaggaccaatcctaaccaccccaccctgtggcgtcccgagtatgggtcctatatgattgagggaacaccggggcagccctacggggggacaatgtctgagttcaacacggtggaggctaatatgcggaaacggcgcaaggaggctacctctattctggaggagaaccaggccctgtgcacaattacatcttttcctagactgggctgccctggattcactctgccggaagtgaaaccaaacccagtggagggcggagccagcaagtctctgttctttccggacgaggccatcaataaacaccctagattctctactttgacacgcaacataaggcataggcggggcgagaaagtcgtgataaacgtgcctatcttcaaggacaaaaacacaccctctccattcatcgagacattcacagaagatgacgaggctagtagggctagtaaaccagatcacatctacatggacgctatgggattcggcatgggaaactgctgcttgcaggttacctttcaagcttgtagcatcagtgaagccagatatttgtacgaccagcttgccaccatctgccccattgttatggctctgagcgccgcatctccattctataggggctatgtgagcgatatcgactgccgttggggagtgatcagtgcttccgtcgatgatagaactagggaggaaaggggtctggagcctctgaagaacaataactaccgcatcagcaaatcgcggtacgactccattgactcctacttatcaaagtgcggagagaaatacaatgatatcgacttgacaatcgacaaggagatatatgaacagctgctgcaggagggcatagatcacctgctggcccagcacgtggcccatctttttataagagaccccctgactttatttgaggagaagattcatttggacgatgccaatgaaagcgatcactttgaaaacatccagtccacaaattggcaaacgatgaggtttaagcctccaccccccaacagcgacatcggatggcgcgtagagtttaggcctatggaggttcagctgacagatttcgagaattcagcttacgtcgtgttcgttgtgctcctcacgcgtgtaattctgtcttacaagctggactttcttattccgctgagcaaggtggacgaaaacatgaaagtggcccaaaagcgagatgccgtgctacaaggtatgttctactttagaaaggatatttgcaagggcggcaatgctgtggttgacggctgcggtaaggcgcagaactctaccgagttggcagcagaagagtacaccctgatgtcaattgacacgattattaatggaaaagaaggggtgtttcctggcctgatcccaatcctgaattcataccttgaaaacatggaagtagatgtcgacacacggtgtagcatcttgaactacctgaaactcataaaaaaacgcgcttccggcgaacttatgactgtggcaaggtggatgcgggagtttatcgctaaccatcccgactacaagcaggactccgtgattacagatgagatgaattattcactgatcttgaaatgtaaccagattgctaacgagctgtgtgaatgtccggaattgcttgggagcgccttcaggaaggtgaaatatagcggatcaaagacggactcctcgaactag

SEQ ID NO: 118162 - DNA, 1914 bp, Artificial Sequence
  derived and/or modified sequence
atgggactgctaagccaaggtagtccccttagctgggaagaaacaaagcgtcacgcagatcatgttagacgacatgggatactgcagttcttgcatatttatcacgcagtgaaagatcggcacaaggatgtgttaaaatggggagacgaagtggagtacatgctggtcagctttgatcacgagaataaaaaagttcgcctcgtgctgtcaggggagaaagtcctggaaacgcttcaagaaaaaggagaaagaaccaatcctaaccatcccacattatggcgccctgagtacggaagctatatgattgagggcaccccgggacaaccttacggcggtacgatgtctgaattcaacacagtggaagccaatatgcgtaagcgcagaaaagaagcaacaagcatcctggaggaaaaccaggcactgtgcaccattaccagctttccacgcctgggctgtccaggcttcacattgcccgaggtaaaacccaatcctgtggaaggcggagccagtaaaagcctgttcttccctgacgaggctatcaataaacatccgcgatttagcaccctgacacgaaatatccgacacaggagaggcgagaaagtcgtgattaacgttccgatcttcaaagataagaatacacccagtcccttcattgagacgtttaccgaagacgacgaagccagtcgtgcctcaaagcccgatcatatttatatggatgctatgggatttggtatggggaattgctgcctgcaggtgacctttcaggcttgttccattagcgaagccagatacctgtacgaccagctggccaccatctgcccaattgtgatggcactcagcgctgccagtcctttttacagaggctacgtctcagacatagactgtaggtggggagtcatttcggcatctgttgacgaccgaaccagggaggagaggggcctggagcctctgaagaacaacaactaccggatatccaaatcacgatacgatagcatcgactcttatcttagcaaatgtggtgagaaatataacgatatcgatctgactatcgataaagaaatctacgagcagttgctgcaggagggaattgatcacttactggcccaacacgtggcccacttgtttattcgcgaccctctgactctgtttgaggagaagatccacctggacgacgccaatgagtcagaccattttgagaatatacaaagcacaaattggcaaacaatgcgctttaagcccccaccacctaatagcgacattgggtggcgagtggaatttagacctatggaggttcagctgaccgattttgagaacagcgcttacgtggtgtttgtcgtacttctgacgagggttattctgtcctacaagctcgactttctgataccactgagcaaagtcgatgaaaatatgaaggtcgcccaaaaacgggatgccgtgctgcagggtatgttctatttcaggaaagacatttgcaaaggcggaaacgcggtggtcgatggttgtggaaaggcccagaactccaccgaattagccgcagaagagtatactctgatgtctattgacacaattataaacgggaaggaaggcgtgttccctggcttgatacccatcctgaacagctatctcgagaacatggaagtggatgtagacacgagatgtagcattctcaactacctaaagctcatcaagaagcgagctagcggcgagctgatgactgtcgcaagatggatgcgcgagtttatagctaaccaccccgactataaacaggattcggtgataaccgatgagatgaattacagcctcattttgaagtgtaaccaaatcgctaatgaactctgcgaatgccccgaactcctgggttctgcgttcagaaaggtcaagtacagtggcagcaagacggattcttctaactag

SEQ ID NO: 118163 - DNA, 1914 bp, Artificial Sequence
  derived and/or modified sequence
atgggcctgctgagccagggcagccccctgagctgggaggagaccaagagacacgccgaccacgtgagaagacacggcatcctgcagttcctgcacatctaccacgccgtgaaggacagacacaaggacgtgctgaagtggggcgacgaggtggagtacatgctggtgagcttcgaccacgagaacaagaaggtgagactggtgctgagcggcgagaaggtgctggagaccctgcaggagaagggcgagagaaccaaccccaaccaccccaccctgtggagacccgagtacggcagctacatgatcgagggcacccccggccagccctacggcggcaccatgagcgagttcaacaccgtggaggccaacatgagaaagagaagaaaggaggccaccagcatcctggaggagaaccaggccctgtgcaccatcaccagcttccccagactgggctgccccggcttcaccctgcccgaggtgaagcccaaccccgtggagggcggcgccagcaagagcctgttcttccccgacgaggccatcaacaagcaccccagattcagcaccctgaccagaaacatcagacacagaagaggcgagaaggtggtgatcaacgtgcccatcttcaaggacaagaacacccccagccccttcatcgagaccttcaccgaggacgacgaggccagcagagccagcaagcccgaccacatctacatggacgccatgggcttcggcatgggcaactgctgcctgcaggtgaccttccaggcctgcagcatcagcgaggccagatacctgtacgaccagctggccaccatctgccccatcgtgatggccctgagcgccgccagccccttctacagaggctacgtgagcgacatcgactgcagatggggcgtgatcagcgccagcgtggacgacagaaccagagaggagagaggcctggagcccctgaagaacaacaactacagaatcagcaagagcagatacgacagcatcgacagctacctgagcaagtgcggcgagaagtacaacgacatcgacctgaccatcgacaaggagatctacgagcagctgctgcaggagggcatcgaccacctgctggcccagcacgtggcccacctgttcatcagagaccccctgaccctgttcgaggagaagatccacctggacgacgccaacgagagcgaccacttcgagaacatccagagcaccaactggcagaccatgagattcaagccccccccccccaacagcgacatcggctggagagtggagttcagacccatggaggtgcagctgaccgacttcgagaacagcgcctacgtggtgttcgtggtgctgctgaccagagtgatcctgagctacaagctggacttcctgatccccctgagcaaggtggacgagaacatgaaggtggcccagaagagagacgccgtgctgcagggcatgttctacttcagaaaggacatctgcaagggcggcaacgccgtggtggacggctgcggcaaggcccagaacagcaccgagctggccgccgaggagtacaccctgatgagcatcgacaccatcatcaacggcaaggagggcgtgttccccggcctgatccccatcctgaacagctacctggagaacatggaggtggacgtggacaccagatgcagcatcctgaactacctgaagctgatcaagaagagagccagcggcgagctgatgaccgtggccagatggatgagagagttcatcgccaaccaccccgactacaagcaggacagcgtgatcaccgacgagatgaactacagcctgatcctgaagtgcaaccagatcgccaacgagctgtgcgagtgccccgagctgctgggcagcgccttcagaaaggtgaagtacagcggcagcaagaccgacagcagcaactag

SEQ ID NO: 118164 - protein, 659 aa, Artificial Sequence
  derived and/or modified sequence
MPSEGRCWETLKALRSSDKGRLCYYRDWLLRREDVLEECMSLPKLSSYSGWVVEHVLPHMQENQPLSETSPSSTSASALDQPSFVPKSPDASSAFSPASPATPNGTKGKDESQHTESMVLQSSRGIKVEGCVRMYELVHRMKGTEGLRLWQEEQERKVQALSEMASEQLKRFDEWKELKQHKEFQDLREVMEKSSREALGHQEKLKAEHRHRAKILNLKLREAEQQRVKQAEQERLRKEEGQIRLRALYALQEEMLQLSQQLDASEQHKALLKVDLAAFQTRGNQLCSLISGIIRASSESSYPTAESQAEAERALREMRDLLMNLGQEITRACEDKRRQDEEEAQVKLQEAQMQQGPEAHKEPPAPSQGPGGKQNEDLQVKVQDITMQWYQQLQDASMQCVLTFEGLTNSKDSQAKKIKMDLQKAATIPVSQISTIAGSKLKEIFDKIHSLLSGKPVQSGGRSVSVTLNPQGLDFVQYKLAEKFVKQGEEEVASHHEAAFPIAVVASGIWELHPRVGDLILAHLHKKCPYSVPFYPTFKEGMALEDYQRMLGYQVKDSKVEQQDNFLKRMSGMIRLYAAIIQLRWPYGNRQEIHPHGLNHGWRWLAQILNMEPLSDVTATLLFDFLEVCGNALMKQYQVQFWKMLILIKEDYFPRYQAC

SEQ ID NO: 118165 - DNA, 1980 bp, Artificial Sequence
  derived and/or modified sequence
atgccatctgaagggcgctgctgggaaacattaaaggcattgcgcagttcagacaaaggcagattatgctactatcgggattggttacttcgccgtgaggacgtcttggaggaatgtatgagtctccccaaactgtcttcctactcaggctgggtggtcgagcacgtacttcctcatatgcaagagaaccagcctctcagcgagacctctccctcatccacttcagcaagtgcgttagaccaaccgtcatttgtccctaaatctcctgacgccagctccgcgttctccccagcaagccctgcgactcctaatggtactaaagggaaagatgaaagtcagcacaccgaatctatggtccttcagtcgtcccggggcataaaagtggagggatgcgttcgcatgtacgaactggttcacaggatgaagggcaccgaaggactaagactttggcaggaggaacaagaaagaaaggttcaggccctttccgagatggcctccgagcagctgaaacgattcgatgagtggaaggagctgaaacagcataaggaattccaggatctgcgggaggtgatggagaagagcagccgggaagctctcggtcatcaggagaagcttaaagctgagcatcgccatcgagcgaagatactgaatttaaaactgagggaagcagaacagcagcgagtcaaacaggccgagcaggaacggttacgtaaggaagaaggccagatccggctgcgggccctctacgccctgcaggaagagatgctgcagttgtctcaacagctggatgccagcgagcagcataaggcattgctgaaagttgaccttgcggccttccaaacccgcggcaaccagctttgcagccttatcagcggaatcataagggctagctctgagtcctcttaccctactgcagagagccaggctgaagctgagcgtgcacttcgtgaaatgagagaccttttgatgaatctcggccaggagatcactcgggcttgcgaagataagaggcggcaggatgaggaagaggctcaagtcaagctgcaggaggctcagatgcagcagggccccgaagctcacaaggagccccccgcaccatcccagggcccaggtggtaagcagaacgaggatctgcaggtcaaggtccaggatatcacaatgcagtggtaccaacagctgcaagacgcatctatgcagtgcgtgcttaccttcgaaggactgaccaacagtaaggactctcaagccaagaaaatcaagatggatctgcaaaaagccgctacgatccctgtgagccagatatccacaattgcaggatcaaagctgaaagagatttttgataaaatccactccctgctctccggtaagcccgtccagtcaggtggtaggtcggtttccgtcactttgaatcctcaaggtctggatttcgtacaatacaaactggcggagaagttcgttaagcaaggagaagaggaagtagcttcccatcacgaggcagcgttcccgatcgcagtggtagcttcggggatctgggagctgcacccccgcgtgggtgatctaattctcgctcatcttcacaagaagtgcccttacagcgtccccttctatccaacttttaaggagggcatggcgttagaagactaccagagaatgcttgggtaccaggtcaaagattctaaggttgagcagcaggacaattttctcaaacgtatgtccggcatgattagactctacgcagctatcatccagttaaggtggccctacggcaatcggcaggagatccatcctcatggcctgaatcatggctggagatggctcgcccagattctaaacatggaacctctgagcgacgtcactgcaaccttactgtttgatttcctggaggtgtgcggcaacgccctaatgaagcagtaccaggtccaattttggaagatgttgatcctgattaaagaagattatttccccagataccaggcctgttag

SEQ ID NO: 118166 - DNA, 2218 bp, Artificial Sequence
  derived and/or modified sequence
ggccttcccggcggctgattcgagggcttgtttggtcagaaggggggcgtcagagaagctgccccttagccaaccatgccgtctgagggtcgctgctgggagaccttgaaggccctacgcagttccgacaaaggtcgcctttgctactaccgcgactggctgctgcggcgcgaggatgttttagaagaatgtatgtctcttcccaagctatcttcttattctggatgggtggtagagcacgtcctaccccatatgcaggagaaccaacctctgtctgagacttcgccatcctctacgtcagcttcagccctagatcaaccctcatttgttcccaaatctcctgacgcaagctctgccttttccccagcctcccctgcaacaccaaatggaaccaagggcaaagatgagtcccagcacacagaatctatggtacttcagtcctcacgggggatcaaagtggaaggctgcgtccgaatgtacgaactggtacacagaatgaaaggaacagagggcctgaggctatggcaggaggagcaggagaggaaggtgcaagccctctcggagatggcatctgaacaactgaagcggtttgatgaatggaaggaactgaagcagcataaagaattccaggacttgcgggaagtaatggagaagagctccagagaagccttgggacaccaagagaagctaaaagctgagcaccgtcacagagcaaagattctcaacctgaagctgcgggaagcagagcagcagcgcgtgaagcaagcagaacaggagcggcttcggaaggaagaaggccagatccgcctgcgggccctctatgctctgcaggaggagatgctgcagctcagccagcagctggatgcctctgagcagcacaaagccctgcttaaggtcgacctggctgccttccagacccgaggcaaccagctgtgcagcctcatctcagggatcatccgggcctcttcagagagcagctatcccacagcagagagtcaagctgaggctgagcgagctctgcgggaaatgcgggacctcctgatgaacttggggcaggagatcaccagagcctgcgaagacaagaggaggcaggatgaagaagaggcccaggtaaagctgcaagaggcacagatgcagcagggaccagaggcccacaaagagcccccagctcccagccagggcccaggagggaaacagaatgaagacctccaggtgaaggtacaagacattacaatgcagtggtaccagcagctgcaggatgcttccatgcagtgtgtgttgacctttgagggcctgaccaacagcaaggacagtcaggccaaaaagataaagatggacctccagaaggctgctaccatcccagtgagccaaatctctaccattgcaggctcaaaactgaaggagatctttgacaagatccacagcctgctctctggaaaacctgttcaatctggtgggcgctctgtgtctgtcacacttaacccacaggggctggactttgttcaatacaaactggcagagaaatttgtgaaacaaggcgaggaggaagtggcctctcaccatgaagcagcattccccattgcagttgtggcatccgggatctgggagctccaccccagagtgggggacctcattcttgctcatctacataagaagtgtccttactctgttcctttctatcccactttcaaggagggaatggctttggaagactatcagaggatgcttggttaccaagtaaaggattccaaagtggagcagcaagacaactttctaaaacgcatgtcagggatgatccgtctctacgctgctatcatccagctccggtggccatatggaaaccgacaggagattcaccctcatggcttaaatcatggatggcgctggttggcacagatcttaaacatggagcccttgtcagatgtgacagccaccctcctctttgacttcctggaggtgtgtgggaatgccctcatgaagcaataccaggttcagttctggaagatgctaattctcatcaaagaggactactttcccaggtatcaggcttgttgagcagacagcaggggattaagtaactcataaccaggcctcagatacccaagggtgctattacctgctggttttgattcaagttaaaaacacctgtactaagtatgacatctttcctactccagtccctctcgttgatatttgaataaatgcttttgaaccttaa

SEQ ID NO: 118167 - DNA, 1980 bp, Artificial Sequence
  derived and/or modified sequence
atgcccagcgagggccgctgctgggagaccctgaaggccctgcggagcagtgacaagggccgcctgtgctactacagagactggctgctgcggagagaagatgtgctggaggagtgcatgagcctgcccaagctgagcagctacagcggctgggtggtggagcacgtgctgccccacatgcaggagaaccagcccctgtctgagaccagccccagcagcaccagcgccagcgccctggaccagcccagctttgtgcccaagagcccagatgccagcagcgccttctccccagccagccctgccacccccaacggcaccaagggcaaggatgagagccagcacacagagagcatggtgctgcagagcagccggggcatcaaggtggagggctgtgtgaggatgtatgagctggtgcacaggatgaagggcacagagggcctgcggctgtggcaggaggagcaggagaggaaggtgcaggccctgtctgagatggccagcgagcagctgaagagatttgatgagtggaaggagctgaagcagcacaaggagttccaggacctgcgggaggtgatggagaagagcagccgggaggccctgggccaccaggagaagctgaaggccgagcaccgccaccgggccaagatcctgaacctgaagctgcgggaggccgagcagcagagggtgaagcaggccgagcaggagcggctgaggaaggaggagggccagatccggctgcgggccctgtatgccctgcaggaggagatgctgcagctgagccagcagctggatgccagcgagcagcacaaggccctgctgaaggtggacctggccgccttccagacccggggcaaccagctgtgcagcctcatcagcggcatcatccgggccagcagcgagagcagctaccccacagctgagagccaggccgaggccgagcgggccctgcgggagatgagggacctgctgatgaacctgggccaggagatcacccgggcctgtgaggacaagaggcggcaggatgaggaggaggcccaggtgaagctgcaggaggcccagatgcagcagggccctgaggcccacaaggagcccccagcccccagccagggccctgggggcaagcagaatgaagacctgcaggtgaaggtgcaggacatcaccatgcagtggtaccagcagctgcaggatgcctccatgcagtgtgtgctgacctttgagggcctgaccaacagcaaggacagccaggccaagaagatcaagatggacctgcagaaggccgccaccatccctgtgtcccagatcagcaccatcgccggcagcaagctgaaggagatctttgacaagatccacagcctgctgagcggcaagcctgtgcagagcggcggccgctctgtgtctgtgaccctgaacccccagggcctggactttgtgcagtacaagctggccgagaagtttgtgaagcagggcgaggaggaggtggccagccaccacgaggccgccttccccatcgctgtggtggccagcggcatctgggagctgcacccccgggtgggggacctgatcctggcccacctgcacaagaagtgcccctacagcgtgcccttctaccccaccttcaaggagggcatggccctggaggactaccagaggatgctgggctaccaggtgaaggacagcaaggtggagcagcaggacaacttcctgaagaggatgagcggcatgatccggctgtatgctgccatcatccagctgcgctggccctacggcaaccggcaggagatccacccccacggcctgaaccacggctggcgctggctggcccagatcctgaacatggagcccctgagtgatgtgacagccaccctgctgtttgacttcctggaggtgtgtggaaatgccctgatgaagcagtaccaggtgcagttctggaagatgctgatcctgatcaaggaggactacttcccccgctaccaggcctgctag

SEQ ID NO: 118168 - DNA, 1980 bp, Artificial Sequence
  derived and/or modified sequence
atgcccagcgagggccggtgctgggagaccctgaaggccctgcggtcttccgataagggtcggttgtgctattaccgtgattggttgctgagaagggaagatgtactggaggagtgtatgagcctgcctaaactttcgtcctacagtgggtgggtggtggagcatgtacttccccacatgcaggagaaccagcccctttctgaaaccagcccgtcgtccacatctgcaagcgctcttgaccagccctcatttgtgccaaagtctcccgatgcttccagtgcttttagccccgcctctcccgctactcccaatggtacaaaaggtaaagacgagagccagcacactgagagtatggttctgcagtcttcacgaggcattaaggtggagggctgcgttaggatgtacgagctggtacaccgcatgaaaggcactgagggcctacgactatggcaggaagagcaagaaagaaaagtgcaggctctttcagagatggcctccgaacagttgaagaggtttgatgagtggaaagagttgaaacagcacaaagagtttcaggatttacgagaggtgatggagaagtcttctagagaggcactgggacatcaggagaagttaaaggccgaacatcgccatagagccaaaatcctcaacctcaagctgcgcgaggcagaacagcagcgggtaaaacaggccgagcaggagcggttgagaaaggaggagggacagatcaggctgcgtgccctctatgccttgcaggaagaaatgctacagttatctcaacaactggatgcatcagagcaacataaggctttactgaaagtggacttggccgcctttcagactcgcggaaaccagctgtgcagtctcatttccggcattatacgggcttcaagtgagagctcctatccaactgctgagtctcaggccgaggctgagcgggcactgcgagaaatgcgcgacttacttatgaacctcggccaggaaattactcgtgcctgcgaggataaaaggcgccaagatgaagaggaagcccaggtgaaactgcaggaggcccagatgcagcaggggccggaagcgcacaaggagccccctgctccttcccagggccccggcggcaagcaaaacgaagacttgcaagtgaaagtacaggacatcacaatgcaatggtatcagcaacttcaagatgcctcaatgcagtgtgttcttacattcgaaggcctcaccaacagtaaagattcccaggccaagaagatcaagatggacctccagaaggctgccacgatcccggtcagtcaaatctcaaccattgccgggtcaaagctaaaggaaatctttgacaaaattcacagcctgctcagcgggaaacccgtacagtccggaggtagatcggtttcagttacattaaatcctcagggactggatttcgtgcagtacaagctggcggagaaatttgttaagcagggagaagaagaggtggcttcccaccacgaggccgcattccccatagctgtcgtcgcttccggtatatgggagctgcacccaagagtcggagatttgattttggcccatctccacaagaaatgtccttattccgtccccttctatcctacttttaaagaggggatggccctggaggattatcagaggatgctcggttatcaggtcaaggattctaaggtcgaacagcaggataacttcctgaagcggatgtctggcatgattcgtctgtacgctgccattattcagctgcggtggccctatggcaatagacaggaaattcacccgcatggactgaatcacgggtggaggtggcttgcacaaattcttaacatggagccactttcggacgtgaccgccaccctgctcttcgacttcttagaggtgtgcggcaatgctttgatgaagcagtatcaggtgcagttctggaagatgctgatcctgatcaaagaagattactttccacggtaccaggcgtgctag

SEQ ID NO: 118169 - DNA, 1980 bp, Artificial Sequence
  derived and/or modified sequence
atgccttcagagggtagatgttgggagacactgaaggcactgagatcctccgataaaggacgactctgctattatagagattggttgctgcgacgagaagacgttctggaggaatgcatgtctctcccaaaactgagcagctactctggttgggtcgtggaacatgttctgccacatatgcaagagaatcagccacttagtgagaccagtccttcaagtacaagcgccagcgccctggaccagcctagcttcgtaccgaagtcacccgacgccagctcagcattttcaccagcaagccccgctaccccaaacgggacaaagggtaaggacgagagtcagcacacggagtccatggtcttgcagagctccaggggtatcaaggtggaaggctgcgtgcgaatgtacgagttagtccaccgaatgaaaggcactgagggattgagactgtggcaggaggaacaggagagaaaggttcaggccctctccgaaatggctagcgagcaacttaaacggttcgatgaatggaaggaactcaaacaacataaagaatttcaggatctccgtgaagtaatggaaaaaagctcacgcgaggccctgggacaccaagagaaacttaaagctgaacatcgtcatcgcgctaagatactcaacctcaagctgcgggaagccgaacagcaacgcgtgaagcaggctgagcaggaaaggctccggaaggaagagggtcaaatcaggctcagggctctatacgcactgcaagaggaaatgttgcagttaagccagcagctcgacgctagtgagcagcacaaggcactgctgaaagtggacctggccgcatttcagacaaggggaaatcagctatgctccctaatttcgggaattatccgcgctagttccgagtccagctaccccaccgctgagtctcaggccgaagccgaaagggccctgagagaaatgcgagacctgctcatgaaccttgggcaggagattactagagcttgcgaggataagcgccgtcaggatgaggaagaggcgcaggtgaagctccaggaagcgcagatgcagcagggaccagaggcccacaaggagcctccggctccaagccagggcccagggggaaaacagaacgaggatctgcaagtaaaggtgcaggatattacaatgcagtggtaccagcaactgcaggacgcctcaatgcaatgcgtattgaccttcgagggccttactaactcaaaggattcacaggccaaaaagattaaaatggatcttcagaaagccgctaccatccctgtgtctcaaattagtactatcgctggtagcaagttaaaagaaatcttcgataaaatccacagtctgctcagtggtaaaccagtccagtccggtgggcgatccgtctccgtcacactcaatccacagggactggacttcgtacagtataagttggccgagaagtttgtgaagcagggggaagaggaggtggcctctcaccacgaggccgcttttcccattgccgtcgtcgccagcggcatttgggagctgcacccacgagtcggagacctgattttggcccacctgcacaaaaaatgtccttattccgtgcccttttaccctacctttaaagaaggcatggctctggaggactaccaacggatgctgggctaccaggtgaaagattctaaagtggagcagcaggacaacttcctgaaaaggatgagcgggatgatacgactatacgcagctatcattcaactccgatggccatacggcaacaggcaagaaatccacccccacggactgaatcacggatggcgatggcttgcccagatcctgaatatggagccactgtcggacgtgacagctacactgttatttgattttctggaggtgtgtgggaatgctcttatgaagcaatatcaggtgcagttttggaaaatgctcattctgatcaaggaggattactttcctaggtaccaagcctgttag

SEQ ID NO: 118170 - DNA, 1980 bp, Artificial Sequence
  derived and/or modified sequence
atgcccagcgagggcagatgctgggagaccctgaaggccctgagaagcagcgacaagggcagactgtgctactacagagactggctgctgagaagagaggacgtgctggaggagtgcatgagcctgcccaagctgagcagctacagcggctgggtggtggagcacgtgctgccccacatgcaggagaaccagcccctgagcgagaccagccccagcagcaccagcgccagcgccctggaccagcccagcttcgtgcccaagagccccgacgccagcagcgccttcagccccgccagccccgccacccccaacggcaccaagggcaaggacgagagccagcacaccgagagcatggtgctgcagagcagcagaggcatcaaggtggagggctgcgtgagaatgtacgagctggtgcacagaatgaagggcaccgagggcctgagactgtggcaggaggagcaggagagaaaggtgcaggccctgagcgagatggccagcgagcagctgaagagattcgacgagtggaaggagctgaagcagcacaaggagttccaggacctgagagaggtgatggagaagagcagcagagaggccctgggccaccaggagaagctgaaggccgagcacagacacagagccaagatcctgaacctgaagctgagagaggccgagcagcagagagtgaagcaggccgagcaggagagactgagaaaggaggagggccagatcagactgagagccctgtacgccctgcaggaggagatgctgcagctgagccagcagctggacgccagcgagcagcacaaggccctgctgaaggtggacctggccgccttccagaccagaggcaaccagctgtgcagcctgatcagcggcatcatcagagccagcagcgagagcagctaccccaccgccgagagccaggccgaggccgagagagccctgagagagatgagagacctgctgatgaacctgggccaggagatcaccagagcctgcgaggacaagagaagacaggacgaggaggaggcccaggtgaagctgcaggaggcccagatgcagcagggccccgaggcccacaaggagccccccgcccccagccagggccccggcggcaagcagaacgaggacctgcaggtgaaggtgcaggacatcaccatgcagtggtaccagcagctgcaggacgccagcatgcagtgcgtgctgaccttcgagggcctgaccaacagcaaggacagccaggccaagaagatcaagatggacctgcagaaggccgccaccatccccgtgagccagatcagcaccatcgccggcagcaagctgaaggagatcttcgacaagatccacagcctgctgagcggcaagcccgtgcagagcggcggcagaagcgtgagcgtgaccctgaacccccagggcctggacttcgtgcagtacaagctggccgagaagttcgtgaagcagggcgaggaggaggtggccagccaccacgaggccgccttccccatcgccgtggtggccagcggcatctgggagctgcaccccagagtgggcgacctgatcctggcccacctgcacaagaagtgcccctacagcgtgcccttctaccccaccttcaaggagggcatggccctggaggactaccagagaatgctgggctaccaggtgaaggacagcaaggtggagcagcaggacaacttcctgaagagaatgagcggcatgatcagactgtacgccgccatcatccagctgagatggccctacggcaacagacaggagatccacccccacggcctgaaccacggctggagatggctggcccagatcctgaacatggagcccctgagcgacgtgaccgccaccctgctgttcgacttcctggaggtgtgcggcaacgccctgatgaagcagtaccaggtgcagttctggaagatgctgatcctgatcaaggaggactacttccccagataccaggcctgctag

SEQ ID NO: 118171 - protein, 372 aa, Artificial Sequence
  derived and/or modified sequence
MAHAPARCPSARGSGDGEMGKPRNVALITGITGQDGSYLAEFLLEKGYEVHGIVRRSSSFNTGRIEHLYKNPQAHIEGNMKLHYGDLTDSTCLVKIINEVKPTEIYNLGAQSHVKISFDLAEYTADVDGVGTLRLLDAVKTCGLINSVKFYQASTSELYGKVQEIPQKETTPFYPRSPYGAAKLYAYWIVVNFREAYNLFAVNGILFNHESPRRGANFVTRKISRSVAKIYLGQLECFSLGNLDAKRDWGHAKDYVEAMWLMLQNDEPEDFVIATGEVHSVREFVEKSFLHIGKTIVWEGKNENEVGRCKETGKVHVTVDLKYYRPTEVDFLQGDCTKAKQKLNWKPRVAFDELVREMVHADVELMRTNPNA

SEQ ID NO: 118172 - DNA, 1119 bp, Artificial Sequence
  derived and/or modified sequence
atggcgcatgccccagctcggtgtccatccgcgcggggctccggtgatggcgagatgggaaagcccaggaatgtcgcattgattacaggaataaccggtcaggacggctcctacctcgctgagttcctccttgaaaagggctacgaggtccacggtatagtacggcgatccagtagtttcaacacagggaggatcgagcatctctataagaatccccaagcgcatatcgagggtaacatgaagctgcattacggagatctgacagattcaacttgcttggtgaagatcatcaacgaagttaagccaacagagatttacaatctgggggcgcagagccacgttaagatctcattcgatttggccgagtataccgctgacgtggatggggtcggcactttgagacttttggacgccgttaagacttgtggactgatcaacagcgtgaagttttaccaggcgtccacaagcgaactttatggaaaagtccaggagatcccacagaaagagaccaccccattctaccctcggtcaccatatggcgcagcaaagttgtatgcctattggatcgtggtcaatttccgtgaagcgtataacctttttgctgtgaacggcatcctatttaatcacgagtctccgaggcggggcgccaatttcgtgactcggaaaataagtcggtccgtggccaagatctacctggggcagctagagtgtttctctctggggaatttggatgccaagcgcgattgggggcacgccaaggattacgtcgaagcaatgtggctgatgctacaaaacgacgagccagaggacttcgtcattgccacaggtgaagtccacagcgtcagggagttcgtggagaagagctttctgcacatagggaagaccatcgtgtgggagggtaaaaatgaaaacgaggttgggagatgcaaagagacggggaaggtccatgtcaccgtggatttgaagtactatcggccaacagaagtggatttcctgcagggagactgtaccaaagctaagcagaagcttaactggaaacccagagtagcttttgatgaactcgtgagggagatggtgcatgctgatgtggaactaatgcgaaccaaccccaacgcttag

SEQ ID NO: 118173 - DNA, 1752 bp, Artificial Sequence
  derived and/or modified sequence
gacgcgaatgacgctgcgccagtcaggccgcagccccgctgcttggcccgtcgggcccgccttggccggctcggcccgcccccggccctccctgcacggcctcccgtgcgcccctgtcagactgtggcggccggtcgcgcggtgcgctctccctccctgcccgcagcctggagaggcgcttcgtgctgcacacccccgcgttcctgccggcaccgcgcctgccctctgccgcgctccgccctgccgccgaccgcacgcccgccgcgggacatggcacacgcaccggcacgctgccccagcgcccggggctccggggacggcgagatgggcaagcccaggaacgtggcgctcatcaccggtatcacaggccaggatggttcctacctggctgagttcctgctggagaaaggctatgaggtccatggaattgtacggcggtccagttcatttaatacgggtcgaattgagcatctgtataagaatccccaggctcacattgaaggaaacatgaagttgcactatggcgatctcactgacagtacctgccttgtgaagatcattaatgaagtaaagcccacagagatctacaaccttggagcccagagccacgtcaaaatttcctttgacctcgctgagtacactgcggacgttgacggagttggcactctacgacttctagatgcagttaagacttgtggccttatcaactctgtgaagttctaccaagcctcaacaagtgaactttatgggaaagtgcaggaaataccccagaaggagaccacccctttctatccccggtcaccctatggggcagcaaaactctatgcctattggattgtggtgaacttccgtgaggcgtataatctctttgcagtgaacggcattctcttcaatcatgagagtcccagaagaggagctaatttcgttactcgaaaaattagccggtcagtagctaagatttaccttggacaactggaatgtttcagtttgggaaatctggatgccaaacgagattggggccatgccaaggactatgtggaggctatgtggttgatgttgcagaatgatgagccggaggacttcgttatagctactggggaggtccatagtgtccgggaatttgtcgagaaatcattcttgcacattggaaaaaccattgtgtgggaaggaaagaatgaaaatgaagtgggcagatgtaaagagaccggcaaagttcacgtgactgtggatctcaagtactaccggccaactgaagtggactttctgcagggcgactgcaccaaagcgaaacagaagctgaactggaagccccgggtcgctttcgatgagctggtgagggagatggtgcacgccgacgtggagctcatgaggacaaaccccaatgcctgagcagcgcctcggagcccggcccgccctccggctacaatccccgcagagtctccggtgcagacgcgctgcggggatggggagcggcgtgccaatctgcgggtcccctgcggcccctgctgccgctgcgctgtcccggccgcaagagcggggccgccccgccgaggtttgtagcagccgggatgtgaccctccagggtttgggtcgctttgcgtttgtcgaagcctcctctgaatggctttgtgaaatcaagatgttttaatcacattcactttacttgaaattatgttgttacacaacaaattgtggggccttcaaattgtttttctcttttcatattaaaaatggtctttctgtgaactagca

SEQ ID NO: 118174 - DNA, 1119 bp, Artificial Sequence
  derived and/or modified sequence
atggcccacgccccagcccgctgccccagcgcccggggcagcggagatggagagatgggcaagcccagaaatgtggccctgatcaccggcatcaccggccaggacggcagctacctggccgagttcctgctggagaagggctatgaggtgcatggaattgtgagaagaagcagcagcttcaacacaggaagaattgagcacctgtacaagaacccccaggcccacatcgagggcaacatgaagctgcactacggggacctgacagacagcacctgcctggtgaagatcatcaatgaggtgaagcccacagagatctacaacctgggcgcccagagccacgtgaagatcagctttgacctggccgagtacacagcagatgtggatggagtgggcaccctgcggctgctggatgctgtgaagacctgtggcctcatcaacagcgtgaagttctaccaggccagcaccagcgagctgtatggcaaggtgcaggagatcccccagaaggagaccacccccttctaccccaggagcccctatggagctgccaagctgtatgcctactggatcgtggtgaacttccgggaggcctacaacctgtttgctgtgaatggcatcctcttcaaccacgagagccccaggagaggagccaactttgtgaccaggaagatcagccgctctgtggccaagatctacctgggccagctggagtgcttcagcctgggcaacctggatgccaagagggactggggccacgccaaggactatgtggaggccatgtggctgatgctgcagaatgatgagccagaagattttgtgattgccactggagaggtgcacagcgtgcgggagtttgtggagaagagcttcctgcacatcggcaagaccatcgtgtgggagggcaagaatgaaaatgaggtgggccgctgcaaggagaccgggaaggtgcacgtgacagtggacctgaagtactaccggcccacagaggtggacttcctgcagggcgactgcaccaaggccaagcagaagctgaactggaagccccgggtggcctttgatgagctggtgcgggagatggtgcatgctgatgtggagctgatgaggaccaaccccaatgcctag

SEQ ID NO: 118175 - DNA, 1119 bp, Artificial Sequence
  derived and/or modified sequence
atggcccacgcccccgcccggtgccccagcgcccggggcagcggcgacggcgaaatgggcaagccacgtaatgtggctctgattacagggatcacaggccaagacggaagctacctcgccgagttcttactcgagaagggctacgaggttcacgggatcgtccggagatcatctagtttcaacacgggtcgcattgaacacctgtataaaaacccccaagcccatatcgagggcaatatgaagctgcactacggcgatttaaccgacagcacttgcctggtgaagataataaatgaagtcaaacccaccgagatttacaatttaggggcacagagccacgtgaagatctctttcgacctggccgaatacacagcagacgtggacggcgttggaacactgcgcttactggacgcagtcaaaacgtgcgggctcattaatagtgttaagttttaccaggcatctactagcgaattatacgggaaagtgcaggagatccctcagaaggaaactacccccttctatcccagatcaccatacggggctgcaaaactttatgcatactggatcgtggtgaattttcgggaggcctataatcttttcgccgtgaacggcatcctgttcaaccatgagtctccccgccgcggagccaatttcgttacccgtaaaatttccagatcagtagctaaaatttacctcggccagttagagtgcttctcactcggcaatttggacgcaaagagggattggggtcatgccaaggactatgtggaagctatgtggctgatgctgcagaacgacgagcctgaagactttgtaattgctaccggggaggtccacagtgtgagggaattcgtggagaaaagcttcttgcacattggaaagacaatcgtttgggaaggtaaaaacgagaatgaagtgggccgctgtaaggaaaccggaaaggtgcatgttaccgttgatttaaagtattataggcctacagaagtggactttctgcaaggcgactgtacaaaagcgaagcaaaagctgaattggaagccacgagtcgccttcgacgaactggtccgtgaaatggtacacgcggatgtcgaattaatgcgaacaaacccaaatgcctag

SEQ ID NO: 118176 - DNA, 1119 bp, Artificial Sequence
  derived and/or modified sequence
atggctcacgcaccagccaggtgccccagcgccagaggctccggagacggcgagatgggaaaacctaggaatgtcgccttgatcacagggattactgggcaggacggatcctatctcgccgaattcctactcgagaagggctatgaggttcatggtattgtccggaggagctccagttttaatacgggccgtatagagcacctgtacaagaatcctcaggcacacatcgagggtaacatgaaactccactatggagacctgacagatagtacttgcctcgtgaaaataataaacgaagtcaaaccaactgaaatctataacctgggcgcacagtctcacgtcaaaatttcttttgacttggctgaatatacggctgacgtggacggcgtcgggaccctgagactgctggacgcggtgaagacttgtgggttgataaacagtgttaagttctatcaagctagtacttcggagctctacggtaaggtgcaagaaattccacagaaggagactactcccttctatcctaggtctccatatggagccgctaaattgtacgcctattggatcgtggtcaatttccgagaagcctataacctattcgcagtgaacggtatcctgtttaaccatgaatccccaaggagaggggctaatttcgtaacccgcaagatctcacggagcgtggccaaaatatatcttgggcaactggaatgcttctctttgggtaacttggacgcgaaacgggactgggggcatgctaaggattacgtggaagcgatgtggctgatgctccaaaacgatgagcccgaagattttgttattgcaacaggcgaggtgcactctgtaagagaattcgtcgagaagtcatttctgcacattggtaagactatcgtgtgggagggcaaaaatgagaacgaggtcggaagatgcaaggagactggaaaggtccatgtgactgtcgatctgaaatattatagacctacagaagtagattttctgcaaggcgactgcacaaaagcgaaacaaaagcttaattggaaaccacgtgtcgcttttgatgaactggtgcgtgagatggtacacgcggacgtagagcttatgagaacaaatccaaacgcctag

SEQ ID NO: 118177 - DNA, 1119 bp, Artificial Sequence
  derived and/or modified sequence
atggcccacgcccccgccagatgccccagcgccagaggcagcggcgacggcgagatgggcaagcccagaaacgtggccctgatcaccggcatcaccggccaggacggcagctacctggccgagttcctgctggagaagggctacgaggtgcacggcatcgtgagaagaagcagcagcttcaacaccggcagaatcgagcacctgtacaagaacccccaggcccacatcgagggcaacatgaagctgcactacggcgacctgaccgacagcacctgcctggtgaagatcatcaacgaggtgaagcccaccgagatctacaacctgggcgcccagagccacgtgaagatcagcttcgacctggccgagtacaccgccgacgtggacggcgtgggcaccctgagactgctggacgccgtgaagacctgcggcctgatcaacagcgtgaagttctaccaggccagcaccagcgagctgtacggcaaggtgcaggagatcccccagaaggagaccacccccttctaccccagaagcccctacggcgccgccaagctgtacgcctactggatcgtggtgaacttcagagaggcctacaacctgttcgccgtgaacggcatcctgttcaaccacgagagccccagaagaggcgccaacttcgtgaccagaaagatcagcagaagcgtggccaagatctacctgggccagctggagtgcttcagcctgggcaacctggacgccaagagagactggggccacgccaaggactacgtggaggccatgtggctgatgctgcagaacgacgagcccgaggacttcgtgatcgccaccggcgaggtgcacagcgtgagagagttcgtggagaagagcttcctgcacatcggcaagaccatcgtgtgggagggcaagaacgagaacgaggtgggcagatgcaaggagaccggcaaggtgcacgtgaccgtggacctgaagtactacagacccaccgaggtggacttcctgcagggcgactgcaccaaggccaagcagaagctgaactggaagcccagagtggccttcgacgagctggtgagagagatggtgcacgccgacgtggagctgatgagaaccaaccccaacgcctag

SEQ ID NO: 118178 - protein, 534 aa, Artificial Sequence
  derived and/or modified sequence
MPHLMERMVGSGLLWLALVSCILTQASAVQRGYGNPIEASSYGLDLDCGAPGTPEAHVCFDPCQNYTLLDEPFRSTENSAGSQGCDKNMSGWYRFVGEGGVRMSETCVQVHRCQTDAPMWLNGTHPALGDGITNHTACAHWSGNCCFWKTEVLVKACPGGYHVYRLEGTPWCNLRYCTDPSTVEDKCEKACRPEEECLALNSTWGCFCRQDLNSSDVHSLQPQLDCGPREIKVKVDKCLLGGLGLGEEVIAYLRDPNCSSILQTEERNWVSVTSPVQASACRNILERNQTHAIYKNTLSLVNDFIIRDTILNINFQCAYPLDMKVSLQAALQPIVSSLNVSVDGNGEFIVRMALFQDQNYTNPYEGDAVELSVESVLYVGAILEQGDTSRFNLVLRNCYATPTEDKADLVKYFIIRNSCSNQRDSTIHVEENGQSSESRFSVQMFMFAGHYDLVFLHCEIHLCDSLNEQCQPSCSRSQVRSEVPAIDLARVLDLGPITRRGAQSPGVMNGTPSTAGFLVAWPMVLLTVLLAWLF

SEQ ID NO: 118179 - DNA, 1605 bp, Artificial Sequence
  derived and/or modified sequence
atgcctcacttgatggagaggatggtcgggtcaggccttctgtggctggcgctggtttcatgcattctgacacaggcatcagccgtccagcggggatacggcaatccaatcgaagcgagtagttacggcctggatctggattgtggcgctccaggtacgccagaggcgcacgtatgcttcgatccatgccagaactatacactgttggacgaacctttccggtcaacggagaattctgcagggagccagggctgcgacaagaatatgagcggctggtataggttcgtgggcgaaggtggcgttcggatgtcagagacctgtgtgcaggtccatcgctgccaaacagacgcaccaatgtggctcaacggcacccatccggctttaggcgatggaatcaccaaccacacagcgtgcgcacattggtccggcaactgctgtttctggaagacagaagtcctcgtgaaggcttgcccaggcggataccacgtgtacagactcgagggcaccccttggtgcaatctgcggtactgtactgacccaagtactgtcgaggacaaatgtgagaaggcatgtcgtccagaagaagaatgcctcgcactcaactctacttggggctgtttctgtcgtcaagacttgaatagcagtgacgtgcactctctccaaccgcagcttgattgtgggccgcgagaaattaaagtcaaagtcgacaagtgcttgctgggcgggctgggtctgggggaggaggtgatcgcatacctgcgagatcctaactgttccagcatcctgcaaaccgaagaaagaaactgggtgtctgtgacaagtccggttcaagcaagcgcatgtagaaatattctggaaagaaatcagacacacgctatttacaaaaatacactttccctggtgaatgacttcataatcagagatacaatacttaatattaattttcaatgtgcatacccacttgatatgaaagtatcactgcaagcggctctgcaaccgattgtgtcttccttgaacgttagcgtcgacggcaatggcgaatttatcgtacggatggccctgttccaggaccaaaattacaccaacccgtacgagggggacgcagtcgagctcagcgtcgagtcagtcctgtacgtgggagcgatcttggagcagggcgacaccagccggttcaacttagtactccgcaactgttatgcaactccaactgaggataaagcagacctggtcaaatattttataatacgaaattcatgctccaatcagcgcgactctaccatacacgtggaagagaatggccagtccagtgagtccaggttctcggtgcaaatgtttatgttcgccggccactacgatctcgtgtttctgcactgcgagattcacctatgtgatagcctgaacgaacagtgtcagccatcctgtagccgtagccaggtgcggagtgaggttccagcaattgatctggcgagagttctagacttggggcccatcactcggcggggcgcccagagtccaggagtgatgaacggaaccccgtccactgctggatttctcgtggcctggccaatggttctcttaaccgtgctgctggcctggctgttttag

SEQ ID NO: 118180 - DNA, 3402 bp, Artificial Sequence
  derived and/or modified sequence
gcaccaattgaggagagacacatgggtgggaaattgcaataaaaagacggcccacagcaggctgcattcccatggctggccagaggaggaacgctttgtgttctcatcggagctgcatgggaagtctgcatacagcaaagtgacctgcatgcctcaccttatggaaaggatggtgggctctggcctcctgtggctggccttggtctcctgcattctgacccaggcatctgcagtgcagcgaggttatggaaaccccattgaagccagttcgtatgggctggacctggactgcggagctcctggcaccccagaggctcatgtctgttttgacccctgtcagaattacaccctcctggatgaacccttccgaagcacagagaactcagcagggtcccaggggtgcgataaaaacatgagcggctggtaccgctttgtaggggaaggaggagtaaggatgtcggagacctgtgtccaggtgcaccgatgccagacagacgctcccatgtggctgaatgggacccaccctgcccttggggatggcatcaccaaccacactgcctgtgcccattggagtggcaactgctgtttctggaaaacagaggtgctggtgaaggcctgcccaggcgggtaccatgtgtaccggttggaaggcactccctggtgtaatctgagatactgcacagacccatccactgtggaggacaagtgtgagaaggcctgccgccccgaggaggagtgccttgccctcaacagcacctggggctgtttctgcagacaggacctcaatagttctgatgtccacagtttgcagcctcagctagactgtgggcccagggagatcaaggtgaaggtggacaaatgtttgctgggaggcctgggtttgggggaggaggtcattgcctacctgcgagacccaaactgcagcagcatcttgcagacagaggagaggaactgggtatctgtgaccagccccgtccaggctagtgcctgcaggaacattctggagagaaatcaaacccatgccatctacaaaaacaccctctccttggtcaatgatttcatcatcagagacaccatcctcaacatcaacttccaatgtgcctacccactggacatgaaagtcagcctccaagctgccttgcagcccattgtaagttccctgaacgtcagtgtggacgggaatggagagttcattgtcaggatggccctcttccaagaccagaactacacgaatccttacgaaggggatgcagttgaactgtctgttgagtccgtgctgtatgtgggtgccatcttggaacaaggggacacctcccggtttaacctggtgttgaggaactgctatgccacccccactgaagacaaggctgaccttgtgaagtatttcatcatcagaaacagctgctcaaatcaacgtgattccaccatccacgtggaggagaatgggcagtcctcggaaagccggttctcagttcagatgttcatgtttgctggacattatgacctagttttcctgcattgtgagattcatctctgtgattctcttaatgaacagtgccagccttcttgctcaagaagtcaagtccgcagtgaagtaccggccatcgacctagcccgggttctagatttggggcccatcactcggagaggtgcacagtctcccggtgtcatgaatggaacccctagcactgcagggttcctggtggcctggcctatggtcctcctgactgtcctcctggcttggctgttctgagagctccgctgagcatctggccttgaagtttgtgttcttccctctggcaatggctcccttcagcacttctgctttccactccaattcacacaggcttggtattaatagaatcaaggccaagctaggttaggaaaagggaagagctttcaccttctttaaaactctcggctgggcgcagtggctcatgcctgtaatcccagcattttgggaggctgaggcaggtggatcacctgaggtcagcagttcaaaatcagcctggccaaaatgctgaaactccgtctctactaaaaatacaaaaattagccaggcatggtggcaggcgcctgtaatcccagctactcgggaggccaaggcaggagaattgctcgaactcagggggtggaggttgcagtgagttgagattgtgccattgcactccagcctgggcaacagagcaagactctgtctcaggaaaaaaaaaaaaaaaaaagaaaagcaacatagtggggtttctgtcaatctgtcctcggctgcccttctcatttgttgatgggaccttgaaagcaagcttgctaggtgccctctgtggctccagcctttaccggaagtgtggtgcatgtttttaacttcagggaagcggtatcctgtcactggggtatgggatgagcatggagaagaggcaccagccacgattccttcctaagcatctcctgttctgactgctcatgaattgaagaaactgacccttgtgttcactctgcttcctctgattgtttctatcatggtttccaaaaattgccatgggaacatgtcaaagggccacttttggagactctgctccaggaagaactagtccccatagctcccctatcccccaccataccacagacatgctgtgacttagagaactacacaaacatccttgggacctagatgctggaggaatgacttaatttgatgcagaaactccatcacccaagggagtacctctcactgtaaacagtgctgtgcttgctctgaaggattaagcaagaagtcccaacagaagcaatgcaccagtcctgctatgggaatgaaactgcaaagcctaggagatgggtgaagtccctttctggagacctttaatgagtacttcaaagcacccgacacagatgcagcaaatagggcatcacacatacacaggcattaatactcacgggcatatagatgctgacatgtgtacactgacttacgcccttcccacagctacagataaggcctcgcaaagttggcctcagagacacatcaggaaccaaggtggaccagcaggtgccgagcctgtgtatctgcttggaggagacgttccaatgtgctgccttgttcagagatggtgtagttgcaagaaacagaaacccaccacaatttctcaggcaaaaagggagttaattataaggacataagagcacaaagttccagtgcaagagatacatccaggctgcacaagctccgggagtggggcctggcaagccaaaagaaaccaaagtttgtcttgccttctgttcctctttctgaagccacatagccttttatgactgtgtatttttgcatcgcttttgttttctttttatgtctctgaagccagcttttcctgttcactcatcccttgattaaatatggacattctagcttca

SEQ ID NO: 118181 - DNA, 1605 bp, Artificial Sequence
  derived and/or modified sequence
atgccccacctgatggagaggatggtgggcagcggcctgctgtggctggccctggtgtcctgcatcctgacccaggccagcgctgtgcagaggggctacggcaaccccatcgaggccagcagctatggcctggacctggactgtggggcccctggcaccccagaggcccacgtgtgctttgacccctgccagaactacaccctgctggatgagcccttccgcagcacagaaaattctgctggcagccagggctgtgacaagaacatgagcggctggtacagatttgtgggggagggcggcgtgaggatgtctgagacctgtgtgcaggtgcaccgctgccagacagatgcccccatgtggctgaatggcacccacccagccctgggagatggcatcaccaaccacacagcctgtgcccactggagcggcaactgctgcttctggaagacagaggtgctggtgaaggcctgccctgggggctaccacgtgtaccgcctggagggcaccccctggtgcaacctgcgctactgcacagaccccagcacagtggaggacaagtgtgagaaggcctgcaggcctgaggaggagtgcctggccctgaacagcacctggggctgcttctgccggcaggacctgaacagcagtgatgtgcacagcctgcagccccagctggactgtggcccccgggagatcaaggtgaaggtggacaagtgcctgctgggcggcctgggcctgggggaggaggtgattgcctacctgcgggaccccaactgcagcagcatcctgcagacagaggagaggaactgggtgtctgtgaccagccctgtgcaggccagcgcctgcaggaacatcctggagaggaaccagacccacgccatctacaagaacaccctgagcctggtgaatgacttcatcatccgggacaccatcctgaacatcaacttccagtgtgcctaccccctggacatgaaggtgtccctgcaggccgccctgcagcccatcgtgagcagcctgaatgtgtctgtggatggaaatggagagttcatcgtgaggatggccctcttccaggaccagaactacaccaacccctatgaaggagatgctgtggagctgtctgtggagagcgtgctgtatgtgggcgccatcctggagcagggcgacaccagccgcttcaacctggtgctgaggaactgctacgccacccccacagaggacaaggctgacctggtgaagtacttcatcatccggaacagctgcagcaaccagagggacagcaccatccacgtggaggagaatggccagagcagcgagagccgcttctctgtgcagatgttcatgtttgctggccactatgacctggtgttcctgcactgtgagatccacctgtgtgacagcctgaatgagcagtgccagcccagctgcagccgcagccaggtgcgctctgaggtgcctgccatcgacctggcccgggtgctggacctgggccccatcaccaggagaggagcccagagccctggggtgatgaatggcacccccagcacagctggcttcctggtggcctggcccatggtgctgctgactgtgctgctggcctggctgttctag

SEQ ID NO: 118182 - DNA, 1605 bp, Artificial Sequence
  derived and/or modified sequence
atgccccacctgatggagcggatggtgggcagcggcctgctgtggctggctctagtgtcttgtatcctgacacaggcatccgccgttcagagagggtacgggaatccaatagaggcttctagctacgggctcgaccttgactgcggcgcgcccggcacccccgaagcacacgtctgcttcgacccgtgtcagaattacactctgctcgacgaacctttcagatcaactgagaactctgccgggtcccaggggtgcgataagaatatgtccggatggtaccgttttgtgggggagggcggtgtgaggatgagcgagacttgtgtacaggtgcacagatgtcaaacagacgctccaatgtggctaaatgggacacatcctgccctgggtgatgggattaccaaccataccgcatgcgcacattggagcgggaactgctgtttttggaagacggaggttctggtgaaagcctgtccaggggggtaccatgtgtatagactggagggcaccccatggtgcaacctgagatattgtaccgaccccagcacagtggaggacaaatgtgagaaggcttgcaggcctgaggaggaatgcctggcattaaattccacctggggttgcttctgtagacaggatttaaattcttcagatgtgcattccctgcagcctcagttggattgcggcccacgggaaatcaaggtaaaggtagacaaatgtctccttggaggcctgggtctgggcgaggaggtgatcgcctatctgagagacccaaattgctcctccatcctgcagacggaggaacgaaactgggtgagcgttacatccccagtccaggctagcgcctgccggaatattctggaacgcaatcagacccacgcgatttacaagaatacacttagcttggtgaacgacttcattatcagagatactatattgaatatcaatttccagtgcgcatacccccttgatatgaaggtgagcctacaggctgccctgcagccaattgtttcaagtctcaacgtgtcggtcgacggtaacggggaattcatcgtgcgtatggccttatttcaggaccaaaactatacaaatccttatgagggcgacgccgtggagctgagcgttgaatccgtgctatatgtgggagccatcttggaacagggcgatactagccgcttcaatctggtgttgcgaaattgctatgcaactcccaccgaagataaggctgacttggtgaaatacttcatcattaggaacagttgctccaaccagcgagactccacaatccacgtggaggagaacggacagtcctcagagagtagatttagcgttcagatgttcatgtttgccggccattatgacttagtgtttctacattgcgaaatccacctctgtgactctctgaacgaacagtgccaaccaagttgtagtcgcagccaggtaaggtctgaggtacccgccattgacctcgccagggtgttggacctaggacccattactaggcgtggcgcacagtcaccaggcgtgatgaatggcacgccgagcacagccggatttttggtggcctggccaatggtgctgctaacagttttgctggcctggttattttag

SEQ ID NO: 118183 - DNA, 1605 bp, Artificial Sequence
  derived and/or modified sequence
atgccccatctgatggagcggatggtcgggtctgggctgctttggctggctctcgtcagttgtattctgacacaggctagcgctgtccagaggggatacggcaaccctatcgaagcttcctcttatggacttgatttagattgcggcgcacctgggacgcccgaggctcacgtttgctttgatccatgtcagaattacacactgttagatgagccctttaggtctaccgagaattctgccggatcacagggatgcgataagaacatgagcgggtggtacaggtttgtgggagaaggcggagtgcgaatgtcggaaacttgtgttcaggtacaccggtgtcaaaccgatgcccctatgtggctgaatggtacacacccagcgcttggcgacggaataacaaaccacacagcttgcgcacactggagcggaaattgctgtttctggaaaaccgaagtgctcgttaaggcctgccccggaggctaccatgtttacaggttggaggggaccccatggtgtaatctgcggtactgtactgacccgagtaccgtcgaggacaaatgtgaaaaggcatgccgaccagaagaagagtgccttgctctcaattccacatggggctgcttctgccggcaggacctaaattcatccgacgtgcattcactccagcctcaactggactgtgggcctagggaaatcaaagtgaaggtggataaatgtcttcttggcggattgggtttgggtgaggaagtgattgcgtatctgagggatcccaactgctcgtccattctccagacagaggagcgcaactgggtcagcgttacaagtccagtccaggcctctgcatgtcgcaatatcctggaacgaaaccagacacatgctatttataaaaacacactcagccttgttaacgacttcattatcagggacacaattctgaatataaatttccagtgcgcctacccactggatatgaaagtgtctctgcaagccgcattacaacccatagtgtccagtcttaacgtctccgtcgacggtaacggggaattcatagtacggatggcccttttccaggatcagaattacactaatccctatgaaggagacgcagtcgaattgtctgtggagtctgtgttatatgttggagctatcctggagcagggggatacatcccgcttcaatttggtcctccggaactgctacgccacccccaccgaagacaaggcagatctggtaaagtacttcatcatcaggaacagttgctctaatcaacgggattcaactattcacgtggaggagaacggccagtcatctgagagtcgcttctctgttcagatgtttatgtttgccggacattacgacctcgtttttttacattgcgagatccacctatgcgactccctgaacgagcagtgtcagccgtcttgctctagatcacaggtccgctctgaggttccagcaatcgatctagccagggtgttggatctgggcccaattactcgcagaggcgcacaatctccgggtgtcatgaacgggacgcccagtacagccggatttctagtagcgtggcccatggtgctgctcacagtgttgttggcctggctgttctag

SEQ ID NO: 118184 - DNA, 1605 bp, Artificial Sequence
  derived and/or modified sequence
atgccccacctgatggagagaatggtgggcagcggcctgctgtggctggccctggtgagctgcatcctgacccaggccagcgccgtgcagagaggctacggcaaccccatcgaggccagcagctacggcctggacctggactgcggcgcccccggcacccccgaggcccacgtgtgcttcgacccctgccagaactacaccctgctggacgagcccttcagaagcaccgagaacagcgccggcagccagggctgcgacaagaacatgagcggctggtacagattcgtgggcgagggcggcgtgagaatgagcgagacctgcgtgcaggtgcacagatgccagaccgacgcccccatgtggctgaacggcacccaccccgccctgggcgacggcatcaccaaccacaccgcctgcgcccactggagcggcaactgctgcttctggaagaccgaggtgctggtgaaggcctgccccggcggctaccacgtgtacagactggagggcaccccctggtgcaacctgagatactgcaccgaccccagcaccgtggaggacaagtgcgagaaggcctgcagacccgaggaggagtgcctggccctgaacagcacctggggctgcttctgcagacaggacctgaacagcagcgacgtgcacagcctgcagccccagctggactgcggccccagagagatcaaggtgaaggtggacaagtgcctgctgggcggcctgggcctgggcgaggaggtgatcgcctacctgagagaccccaactgcagcagcatcctgcagaccgaggagagaaactgggtgagcgtgaccagccccgtgcaggccagcgcctgcagaaacatcctggagagaaaccagacccacgccatctacaagaacaccctgagcctggtgaacgacttcatcatcagagacaccatcctgaacatcaacttccagtgcgcctaccccctggacatgaaggtgagcctgcaggccgccctgcagcccatcgtgagcagcctgaacgtgagcgtggacggcaacggcgagttcatcgtgagaatggccctgttccaggaccagaactacaccaacccctacgagggcgacgccgtggagctgagcgtggagagcgtgctgtacgtgggcgccatcctggagcagggcgacaccagcagattcaacctggtgctgagaaactgctacgccacccccaccgaggacaaggccgacctggtgaagtacttcatcatcagaaacagctgcagcaaccagagagacagcaccatccacgtggaggagaacggccagagcagcgagagcagattcagcgtgcagatgttcatgttcgccggccactacgacctggtgttcctgcactgcgagatccacctgtgcgacagcctgaacgagcagtgccagcccagctgcagcagaagccaggtgagaagcgaggtgcccgccatcgacctggccagagtgctggacctgggccccatcaccagaagaggcgcccagagccccggcgtgatgaacggcacccccagcaccgccggcttcctggtggcctggcccatggtgctgctgaccgtgctgctggcctggctgttctag

SEQ ID NO: 118185 - protein, 840 aa, Artificial Sequence
  derived and/or modified sequence
MSAFRLWPGLLIMLGSLCHRGSPCGLSTHVEIGHRALEFLQLHNGRVNYRELLLEHQDAYQAGIVFPDCFYPSICKGGKFHDVSESTHWTPFLNASVHYIRENYPLPWEKDTEKLVAFLFGITSHMAADVSWHSLGLEQGFLRTMGAIDFHGSYSEAHSAGDFGGDVLSQFEFNFNYLARRWYVPVKDLLGIYEKLYGRKVITENVIVDCSHIQFLEMYGEMLAVSKLYPTYSTKSPFLVEQFQEYFLGGLDDMAFWSTNIYHLTSFMLENGTSDCNLPENPLFIACGGQQNHTQGSKMQKNDFHRNLTTSLTESVDRNINYTERGVFFSVNSWTPDSMSFIYKALERNIRTMFIGGSQLSQKHVSSPLASYFLSFPYARLGWAMTSADLNQDGHGDLVVGAPGYSRPGHIHIGRVYLIYGNDLGLPPVDLDLDKEAHRILEGFQPSGRFGSALAVLDFNVDGVPDLAVGAPSVGSEQLTYKGAVYVYFGSKQGGMSSSPNITISCQDIYCNLGWTLLAADVNGDSEPDLVIGSPFAPGGGKQKGIVAAFYSGPSLSDKEKLNVEAANWTVRGEEDFSWFGYSLHGVTVDNRTLLLVGSPTWKNASRLGHLLHIRDEKKSLGRVYGYFPPNGQSWFTISGDKAMGKLGTSLSSGHVLMNGTLKQVLLVGAPTYDDVSKVAFLTVTLHQGGATRMYALTSDAQPLLLSTFSGDRRFSRFGGVLHLSDLDDDGLDEIIMAAPLRIADVTSGLIGGEDGRVYVYNGKETTLGDMTGKCKSWITPCPEEKAQYVLISPEASSRFGSSLITVRSKAKNQVVIAAGRSSLGARLSGALHVYSLGSD

SEQ ID NO: 118186 - protein, 176 aa, Artificial Sequence
  derived and/or modified sequence
MSAFRLWPGLLIMLGSLCHRGSPCGLSTHVEIGHRALEFLQLHNGRVNYRELLLEHQDAYQAGIVFPDCFYPSICKGGKFHDVSESTHWTPFLNASVHYIRENYPLPWEKDTEKLVAFLFGITSHMAADVSWHSLGLEQGFLRTMGAIDFHGSYSEAHSAGDFGTVYLHLLNFLVV

SEQ ID NO: 118187 - DNA, 2523 bp, Artificial Sequence
  derived and/or modified sequence
atgtcggcctttcgactctggccgggactgctaataatgctcggcagcttgtgtcaccgagggagcccgtgtggtctgagcacgcatgtcgagatcggacaccgggccctggagtttctacaactgcacaacggcagggttaattatcgggagttgctgctggaacaccaggatgcttaccaagctggtatcgtcttcccagattgtttttatccatctatttgcaagggaggtaagtttcatgatgtgagcgagtcaactcactggacacccttcctcaatgcttctgtgcactacattcgcgagaactatcctctaccctgggaaaaagacaccgagaagctggtcgcctttctctttgggatcacaagccatatggccgctgacgtgtcctggcactctctcggcctagaacagggatttctgaggactatgggggccatcgacttccacgggtcttattcagaagctcattccgctggcgactttggcggagacgtcttatcacagtttgaattcaattttaattatctggctagaaggtggtacgtgcctgtgaaagatctgctcggcatatacgagaagctttacggtaggaaagtgattacggagaatgtgattgtggactgctcccacattcaattcctcgagatgtatggagaaatgctggcggtcagtaagctgtatcctacatatagtactaaatccccatttctggtggagcagttccaagaatatttcttgggcggcttggatgatatggctttttggtccaccaatatctaccacctgacttcctttatgcttgagaatggaaccagtgactgtaaccttccagaaaaccccctgttcatcgcctgcggtggacagcagaaccatacacagggatccaagatgcagaaaaatgacttccatcgcaatctgaccacctcactgactgagtctgtcgaccggaatatcaactatactgagcgaggcgttttcttttctgtgaacagctggacaccagattcgatgagcttcatttacaaggccctggagagaaacatacggaccatgtttattggtggcagccaattgtcacagaaacatgtctcttctccattagcttcctactttctgtcatttccctatgcacgactgggctgggccatgacttccgccgatctgaaccaggacggccacggagatcttgttgtcggggcccccggctatagtaggcctggccatatccatatcggccgggtataccttatatatggaaacgatctcggccttccacccgtggaccttgatcttgataaggaagcgcatcggatcctggaaggttttcagccctccgggcgatttgggagcgccttggccgtgctcgacttcaacgtggatggcgtccccgacctggcagtcggagccccctcagtcggctccgagcagctgacatataagggagcggtatacgtctatttcgggagcaagcagggaggtatgtcatcctcacccaacatcacaatatcatgccaagatatttattgcaatcttggatggacactccttgccgctgatgtcaatggggatagcgagccggacctcgtgatagggtcacccttcgctccaggggggggcaagcagaaagggatcgttgccgcgttctattcgggcccctctctgtctgacaaggagaaattaaacgtggaagccgccaattggactgtgagaggagaagaggatttcagctggttcggctactccctgcacggggtgacagtagataatcgtacattactgctggtcgggagcccaacttggaaaaatgccagtcgcctgggccacctactgcatatccgggacgaaaagaaatccctgggcagagtgtatgggtattttcctccgaacggacaatcctggttcaccatcagtggtgataaagctatgggcaaactaggcacctctcttagctccgggcacgttctgatgaacggcacactcaagcaggtacttctggttggggcccccacatatgatgatgtgagcaaagtcgccttcctgacagttacacttcaccaggggggcgccacccgtatgtacgctctcacgtccgatgctcagccgttactgctgtccacattcagcggagataggagattttctcgatttggcggggttctgcacctgtcagacctagatgacgatggtctagacgagatcatcatggccgcccccctccgcatcgctgatgtgacatctggcttaattgggggagaggacggtagggtgtatgtctataacggtaaagagaccactcttggcgatatgaccggcaaatgcaagagctggattactccctgccctgaggagaaagctcagtacgtgctgattagcccggaagcatcaagcagattcgggagtagtttaattactgtgcgtagcaaggctaagaatcaagtggtgatcgccgccgggagatcttcactcggagcaaggctgagcggtgccctccacgtttattcccttggctctgactag

SEQ ID NO: 118188 - DNA, 2523 bp, Artificial Sequence
  derived and/or modified sequence
atgtctgccttccggctgtggccaggcctgctgatcatgctgggcagcctgtgccaccggggcagcccctgtggcctgagcacccacgtggagatcggccaccgggccctggagttcctgcagctgcacaacggccgggtgaactaccgggagctgctgctggagcaccaggatgcctaccaggccggcatcgtgtttcctgactgcttctaccccagcatctgcaagggcggcaagttccatgatgtgtctgagagcacccactggacccccttcctgaatgcctctgtgcactacatccgggagaactaccccctgccctgggagaaggacacagagaagctggtggccttcctgtttggcatcaccagccacatggccgcagatgtgtcctggcacagcctgggcctggagcagggcttcctgcggaccatgggcgccatcgacttccacggcagctacagcgaggcccacagcgctggggactttggaggagatgtgctgagccagtttgagttcaacttcaactacctggcccggcgctggtacgtgcctgtgaaggacctgctgggcatctatgagaagctgtatggcaggaaggtgatcacagaaaatgtgattgtggactgcagccacatccagttcctggagatgtatggagagatgctggccgtgtccaagctgtaccccacctacagcaccaagagccccttcctggtggagcagttccaggagtacttcctgggcggcctggatgacatggccttctggagcaccaacatctaccacctgaccagcttcatgctggagaatggcaccagtgactgcaacctgcctgagaaccccctcttcatcgcctgtggcggccagcagaaccacacccagggcagcaagatgcagaagaatgacttccacaggaacctgaccaccagcctgacagaatctgtggacaggaacatcaactacacagagcggggcgtcttcttctctgtgaacagctggaccccagacagcatgtccttcatctacaaggccctggagaggaacatccgcaccatgtttattggaggcagccagctgagccagaagcacgtgagcagccccctggccagctacttcctgtccttcccctatgcccggctgggctgggccatgaccagcgctgacctgaaccaggacggccatggagacctggtggtgggcgcccctggctacagccggcccggccacatccacatcggccgggtgtacctgatctatggaaatgacctgggcctgccccctgtggacctggacctggacaaggaggcccaccgcatcctggagggcttccagcccagcggccgcttcggcagcgccctggccgtgctggacttcaacgtggatggagtgcctgacctggccgtgggcgcccccagcgtgggcagcgagcagctgacctacaagggagctgtgtatgtgtacttcggcagcaagcagggcggcatgagcagcagccccaacatcaccatcagctgccaggacatctactgcaacctgggctggaccctgctggccgcagatgtgaatggagacagcgagccagacctggtgattggcagcccctttgcccctgggggcggcaagcagaagggcatcgtggccgccttctacagcggccccagcctgagtgacaaggagaagctgaatgtggaggccgccaactggacagtgcggggggaggaggacttctcctggtttggctacagcctgcatggagtgacagtggacaacagaaccctgctgctggtgggcagccccacctggaagaatgccagccggctgggccacctgctgcacatcagagatgagaagaagagcctgggccgggtgtatggctacttccccccaaatggccagagctggttcaccatcagcggggacaaggccatgggcaagctgggcaccagcctgagcagcggccacgtgctgatgaatggcaccctgaagcaggtgctgctggtgggcgcccccacctatgatgatgtgtccaaggtggccttcctgactgtgaccctgcaccagggcggggccaccaggatgtatgccctgaccagtgatgcccagcccctgctgctgagcaccttcagcggggaccggcgcttcagcagatttggaggagtgctgcacctgagtgacctggatgatgatggcctggatgagatcatcatggccgcccccctgagaattgctgatgtgaccagcggcctgattggaggagaagatggccgggtgtatgtgtacaacgggaaggagaccaccctgggggacatgaccgggaagtgcaagtcctggatcaccccctgcccagaggagaaggcccagtatgtgctgatcagccctgaggccagcagccgcttcggcagcagcctcatcaccgtgcgcagcaaggccaagaaccaggtggtgattgctgctggccgcagcagcctgggcgcccggctgagcggggccctgcacgtgtacagcctgggcagtgactag

SEQ ID NO: 118189 - DNA, 2523 bp, Artificial Sequence
  derived and/or modified sequence
atgagcgccttccggctgtggcccggcctgctgatcatgctgggcagcctttgccacagaggctcaccatgcggtctgtctacgcatgtggaaattggtcatcgggcactggagtttctccaattacacaacggtcgggtgaattatagagaactccttcttgagcaccaggatgcttatcaggccgggatcgtttttccagactgtttttaccctagtatttgcaagggggggaaattccacgacgtgtccgaatccacccactggacccctttcctaaatgcaagcgtgcattatatcagggaaaactaccccctgccctgggagaaagacactgagaagctggttgctttcctctttggcataacaagccatatggctgccgatgtaagttggcattccctcggcctagagcagggcttcttaaggaccatgggagcaatcgatttccacggttcctacagcgaggctcactccgcaggggacttcggaggggatgtgctgagccaatttgaatttaacttcaattatctcgcgcgacgttggtacgtgcccgtaaaagacctgctgggcatctacgaaaagctgtacggtaggaaagtaatcacagagaacgtgattgttgactgctcacacattcaatttcttgagatgtacggagagatgctggccgtgagcaaactgtaccccacctactccaccaagtccccctttttggtcgagcagtttcaggaatactttctggggggactagacgacatggctttctggtccaccaacatttaccacctgacaagcttcatgcttgagaatgggacgtctgattgcaatctgccagaaaacccgctctttatcgcctgtggcggccagcagaatcatacgcagggttctaagatgcaaaaaaatgactttcaccgaaacctgactacctccctaactgaaagtgtagacaggaacattaattatactgaacgcggtgtgtttttttctgttaattcttggacgcctgatagcatgagcttcatctacaaggctctggaaaggaacatcagaacaatgttcatcggggggagtcaactcagccaaaagcacgtctccagcccactcgccagctacttcttgtcattcccgtacgcgcgcctgggatgggccatgacgtccgcagacctcaatcaggacggccatggagatctggtggtaggcgctccagggtacagcagaccaggccatatccacattggacgagtctacctgatctatggtaacgatctcggcctgcctcccgttgacttggacctggacaaagaagcccatagaatcctggaagggttccagccatctgggcgcttcgggtcggccctggccgtattggacttcaacgttgatggcgtaccggacctagcagttggtgccccgtctgtaggttcagagcagcttacctacaagggagcggtgtacgtatacttcggaagtaaacagggcgggatgagtagtagccctaacatcaccatcagctgtcaggatatctattgtaacctaggctggaccctgctggcggctgacgtgaacggcgattccgagcccgatttggtgatcggaagtcctttcgcacctgggggaggaaagcagaaaggcattgttgcggctttctactccggcccgagtctgagcgataaggagaagctgaacgtggaagctgccaactggaccgtgcggggggaagaggatttttcgtggttcggttatagcctacacggggtgactgtggacaacaggacactactgctggtggggtctccaacctggaagaacgccagtcgcctcggacaccttctccacatccgcgacgaaaagaagtccctgggccgggtgtacggatattttccacctaatggacagagttggtttaccatctctggagataaagcgatgggaaagctcggaacatccctgagttcaggtcacgtgttgatgaacggcacgctaaaacaggtgctgttggttggagcacctacttatgacgatgtttcaaaggtggcctttctgacagttacgctccaccagggaggcgcaacaagaatgtacgccctaacctcggatgctcagccactgctcttatctactttttctggggatcgccgattttccagattcgggggtgtgctgcacttgtcagatctggacgatgacggccttgatgagattatcatggctgcaccccttcgtatcgcagacgtgaccagcggcttgatcgggggcgaagatggccgcgtatatgtgtacaacggtaaggagacaactctgggtgacatgactggaaaatgcaaaagttggatcacgccgtgccccgaggaaaaggctcagtatgtcctgatctcgccagaggctagttcgagattcggatcttctctgattaccgtgcggtccaaagctaaaaaccaggttgtcatagctgccgggcgatcctcactgggagcacggctgtccggcgccctccacgtgtatagcttaggatccgattag

SEQ ID NO: 118190 - DNA, 2523 bp, Artificial Sequence
  derived and/or modified sequence
atgagcgctttccgcctttggccgggacttctgattatgctcgggtctttgtgccaccgtggatccccatgcggtttgtccacacatgtggaaattggtcatcgcgctctggagtttctccagcttcataacggtagagtgaactatagagagctgttgctggagcatcaggatgcatatcaagccggaattgtttttcctgattgcttttacccttctatctgtaaaggcggaaagtttcacgatgtgtccgagtccacgcattggacacctttcctcaacgcaagcgtccattatatcagagagaattatccactgccatgggagaaagatactgagaagttggtggctttcctgtttggaatcacttcccatatggccgcagatgtttcttggcattcattaggactggagcagggcttccttagaacaatgggcgctatcgactttcacggcagctactccgaggcgcatagcgctggggacttcggcggagacgtcctgagtcagttcgaattcaatttcaactacctggcgcgacgatggtatgtgcctgtgaaggacctccttgggatttacgagaaattgtatggcaggaaggtaataaccgagaacgtgatagtagactgctcccatatacaattcttagaaatgtacggcgaaatgttggcagtaagcaaactgtaccctacttacagcaccaagtcgcccttcttggtagaacagtttcaggagtacttcctgggtggtctggacgacatggcgttctggagtacgaacatctatcatctgacgagttttatgcttgaaaatggcactagtgattgtaacctccctgagaaccctctgttcattgcctgtggtgggcagcagaaccatacccaagggtcaaagatgcagaagaacgactttcaccgaaatcttaccactagccttacagagagcgtcgatcgcaatattaactacacagagcgcggtgtttttttcagcgtgaactcttggacccccgattcaatgtcttttatctacaaagccctggagcgcaacattcgcacaatgttcatcggagggagtcaactgtcacagaagcacgtgagttctcctctggcctcatacttcctttcctttccatacgcacgcttgggatgggccatgacaagcgctgacctgaatcaggatggccatggcgatctggttgtcggcgctcccggttatagcagaccaggccacatccatattggcagggtgtaccttatctacggaaatgacttggggctaccacctgtcgacctggacttggataaagaagcccataggatcctcgagggattccagccctctgggagattcgggtcagccctggccgtgctggactttaacgtggacggcgtgcccgatttggccgtaggggctccttctgtaggaagcgagcagctgacatacaagggggctgtgtacgtgtattttgggtctaaacagggtggaatgtcaagctcacccaacatcactatctcatgccaggacatctattgcaacctgggctggacccttctcgctgccgacgtaaacggtgacagcgagcccgatctcgttatcgggtcaccttttgcaccagggggagggaaacagaaggggatagtcgccgcattttatagcggcccttctttaagcgacaaagaaaagctgaatgttgaggccgcaaattggaccgtccggggtgaagaggatttttcatggttcgggtacagcttacacggagtgacagttgataacaggaccttgcttctggtcggctcccctacatggaagaatgcaagtcggttgggccacctcctgcacatcagggatgagaagaagagtctgggccgagtgtatggctattttccacccaatgggcagagctggttcaccatcagtggcgacaaagcaatgggcaagctggggacctctctctcgtcagggcacgttttgatgaatggcaccctgaaacaggtgctgctggtgggggctccgacatacgacgatgtgagcaaggtggctttcctgacagtcaccctccaccagggcggagccacgcgaatgtatgctctgacaagcgatgcccagcccctgctcttgagtaccttctctggggaccggagattctccagattcggaggagtcctgcatctatctgacctggatgacgatgggctggatgaaataatcatggccgctcccctgcgcattgctgatgtgaccagcggcctcatcgggggagaggatggcagagtttacgtttacaatggcaaggagacgacactgggcgatatgactggcaagtgcaagagctggatcacaccttgcccagaggagaaggcccaatatgtgttgatctcacctgaagctagtagtcgctttggcagctctcttataaccgtaaggtccaaagcgaagaaccaggtcgtcattgctgccggtcgttcctctctaggagccaggctgagcggagcgctgcacgtgtactccctcggcagcgactag

SEQ ID NO: 118191 - DNA, 2523 bp, Artificial Sequence
  derived and/or modified sequence
atgagcgccttcagactgtggcccggcctgctgatcatgctgggcagcctgtgccacagaggcagcccctgcggcctgagcacccacgtggagatcggccacagagccctggagttcctgcagctgcacaacggcagagtgaactacagagagctgctgctggagcaccaggacgcctaccaggccggcatcgtgttccccgactgcttctaccccagcatctgcaagggcggcaagttccacgacgtgagcgagagcacccactggacccccttcctgaacgccagcgtgcactacatcagagagaactaccccctgccctgggagaaggacaccgagaagctggtggccttcctgttcggcatcaccagccacatggccgccgacgtgagctggcacagcctgggcctggagcagggcttcctgagaaccatgggcgccatcgacttccacggcagctacagcgaggcccacagcgccggcgacttcggcggcgacgtgctgagccagttcgagttcaacttcaactacctggccagaagatggtacgtgcccgtgaaggacctgctgggcatctacgagaagctgtacggcagaaaggtgatcaccgagaacgtgatcgtggactgcagccacatccagttcctggagatgtacggcgagatgctggccgtgagcaagctgtaccccacctacagcaccaagagccccttcctggtggagcagttccaggagtacttcctgggcggcctggacgacatggccttctggagcaccaacatctaccacctgaccagcttcatgctggagaacggcaccagcgactgcaacctgcccgagaaccccctgttcatcgcctgcggcggccagcagaaccacacccagggcagcaagatgcagaagaacgacttccacagaaacctgaccaccagcctgaccgagagcgtggacagaaacatcaactacaccgagagaggcgtgttcttcagcgtgaacagctggacccccgacagcatgagcttcatctacaaggccctggagagaaacatcagaaccatgttcatcggcggcagccagctgagccagaagcacgtgagcagccccctggccagctacttcctgagcttcccctacgccagactgggctgggccatgaccagcgccgacctgaaccaggacggccacggcgacctggtggtgggcgcccccggctacagcagacccggccacatccacatcggcagagtgtacctgatctacggcaacgacctgggcctgccccccgtggacctggacctggacaaggaggcccacagaatcctggagggcttccagcccagcggcagattcggcagcgccctggccgtgctggacttcaacgtggacggcgtgcccgacctggccgtgggcgcccccagcgtgggcagcgagcagctgacctacaagggcgccgtgtacgtgtacttcggcagcaagcagggcggcatgagcagcagccccaacatcaccatcagctgccaggacatctactgcaacctgggctggaccctgctggccgccgacgtgaacggcgacagcgagcccgacctggtgatcggcagccccttcgcccccggcggcggcaagcagaagggcatcgtggccgccttctacagcggccccagcctgagcgacaaggagaagctgaacgtggaggccgccaactggaccgtgagaggcgaggaggacttcagctggttcggctacagcctgcacggcgtgaccgtggacaacagaaccctgctgctggtgggcagccccacctggaagaacgccagcagactgggccacctgctgcacatcagagacgagaagaagagcctgggcagagtgtacggctacttcccccccaacggccagagctggttcaccatcagcggcgacaaggccatgggcaagctgggcaccagcctgagcagcggccacgtgctgatgaacggcaccctgaagcaggtgctgctggtgggcgcccccacctacgacgacgtgagcaaggtggccttcctgaccgtgaccctgcaccagggcggcgccaccagaatgtacgccctgaccagcgacgcccagcccctgctgctgagcaccttcagcggcgacagaagattcagcagattcggcggcgtgctgcacctgagcgacctggacgacgacggcctggacgagatcatcatggccgcccccctgagaatcgccgacgtgaccagcggcctgatcggcggcgaggacggcagagtgtacgtgtacaacggcaaggagaccaccctgggcgacatgaccggcaagtgcaagagctggatcaccccctgccccgaggagaaggcccagtacgtgctgatcagccccgaggccagcagcagattcggcagcagcctgatcaccgtgagaagcaaggccaagaaccaggtggtgatcgccgccggcagaagcagcctgggcgccagactgagcggcgccctgcacgtgtacagcctgggcagcgactag

SEQ ID NO: 118192 - DNA, 3489 bp, Artificial Sequence
  derived and/or modified sequence
gtgacctgcttagagagaagcggtgggtctgcacctggattttggagtcccagtgctgctgcagctctgagcattcccacgtcaccagagaagccggtgggcaatgagatcatgtctgctttcaggttgtggcctggcctgctgatcatgttgggttctctctgccatagaggttcaccgtgtggcctttcaacacacgtagaaataggacacagagctctggagtttcttcagcttcacaatgggcgtgttaactacagagagctgttactagaacaccaggatgcgtatcaggctggaatcgtgtttcctgattgtttttaccctagcatctgcaaaggaggaaaattccatgatgtgtctgagagcactcactggactccgtttcttaatgcaagcgttcattatatccgagagaactatccccttccctgggagaaggacacagagaaactggtagctttcttgtttggaattacttctcacatggcggcagatgtcagctggcatagtctgggccttgaacaaggattccttaggaccatgggagctattgattttcacggctcctattcagaggctcattcggctggtgattttggaggagatgtgttgagccagtttgaatttaattttaattaccttgcacgacgctggtatgtgccagtcaaagatctactgggaatttatgagaaactgtatggtcgaaaagtcatcaccgaaaatgtaatcgttgattgttcacatatccagttcttagaaatgtatggtgagatgctagctgtttccaagttatatcccacttactctacaaagtccccgtttttggtggaacaattccaagagtattttcttggaggactggatgatatggcattttggtccactaatatttaccatctaacaagcttcatgttggagaatgggaccagtgactgcaacctgcctgagaaccctctgttcattgcatgtggcggccagcaaaaccacacccagggctcaaaaatgcagaaaaatgattttcacagaaatttgactacatccctaactgaaagtgttgacaggaatataaactatactgaaagaggagtgttctttagtgtaaattcctggaccccggattccatgtcctttatctacaaggctttggaaaggaacataaggacaatgttcataggtggctctcagttgtcacaaaagcacgtctccagccccttagcatcttacttcttgtcatttccttatgcgaggcttggctgggcaatgacctcagctgacctcaaccaggatgggcacggtgacctcgtggtgggcgcaccaggctacagccgccccggccacatccacatcgggcgcgtgtacctcatctacggcaatgacctgggcctgccacctgttgacctggacctggacaaggaggcccacaggatccttgaaggcttccagccctcaggtcggtttggctcggccttggctgtgttggactttaacgtggacggcgtgcctgacctggccgtgggagctccctcggtgggctccgagcagctcacctacaaaggtgccgtgtatgtctactttggttccaaacaaggaggaatgtcttcttcccctaacatcaccatttcttgccaggacatctactgtaacttgggctggactctcttggctgcagatgtgaatggagacagtgaacccgatctggtcatcggctccccttttgcaccaggtggagggaagcagaagggaattgtggctgcgttttattctggccccagcctgagcgacaaagaaaaactgaacgtggaggcagccaactggacggtgagaggcgaggaagacttctcctggtttggatattcccttcacggtgtcactgtggacaacagaaccttgctgttggttgggagcccgacctggaagaatgccagcaggctgggccatttgttacacatccgagatgagaaaaagagccttgggagggtgtatggctacttcccaccaaacggccaaagctggtttaccatttctggagacaaggcaatggggaaactgggtacttccctttccagtggccacgtactgatgaatgggactctgaaacaagtgctgctggttggagcccctacgtacgatgacgtgtctaaggtggcattcctgaccgtgaccctacaccaaggcggagccactcgcatgtacgcactcacatctgacgcgcagcctctgctgctcagcaccttcagcggagaccgccgcttctcccgatttggtggcgttctgcacttgagtgacctggatgatgatggcttagatgaaatcatcatggcagcccccctgaggatagcagatgtaacctctggactgattgggggagaagacggccgagtatatgtatataatggcaaagagaccacccttggtgacatgactggcaaatgcaaatcatggataactccatgtccagaagaaaaggcccaatatgtattgatttctcctgaagccagctcaaggtttgggagctccctcatcaccgtgaggtccaaggcaaagaaccaagtcgtcattgctgctggaaggagttctttgggagcccgactctccggggcacttcacgtctatagccttggctcagattgaagatttcactgcatttccccactctgcccacctctctcatgctgaatcacatccatggtgagcattttgatggacaaagtggcacatccagtggagcggtggtagatcctgatagacatggggctcctgggagtagagagacacactaacagccacaccctctggaaatctgatacagtaaatatatgactgcaccagaaatatgtgaaatagcagacattctgcttactcatgtctccttccacagtttacttcctcgctccctttgcatctaaacctttcttctttcccaacttattgcctgtagtcagacctgctgtacaacctatttcctcttcctcttgaatgtctttccaatggctggaaaggtccctctgtggttatctgttagaacagtctctgtacacaattcctcctaaaaacatccttttttaaaaaaagaattgttcagccataaagaaagaacaagatcatgccctttgcagggacatggatggagctggaggccattatccttcataaactattgcaggaacagaaaaccaaacactccatattctcacttgtaagtgggagctaaatgagaacacgtggacacatagagggaaacaacacacactggggcctatgagagggcggaaggtgggaggagggagagatcaggaaaaataactaatggatacttagggtgatgaaataatctgtgtaacaaacccccatgacacacctttatgtatgtaacaaaccagcacttcctgcgcatgtacccctgaacttaaaagttaaaaaaaagttgaacttaaaaataacagattggcccatgccaatcaaagtataatagaaagcatagtatac

SEQ ID NO: 118193 - protein, 368 aa, Artificial Sequence
  derived and/or modified sequence
MVLEVSDHQVLNDAEVAALLENFSSSYDYGENESDSCCTSPPCPQDFSLNFDRAFLPALYSLLFLLGLLGNGAVAAVLLSRRTALSSTDTFLLHLAVADTLLVLTLPLWAVDAAVQWVFGSGLCKVAGALFNINFYAGALLLACISFDRYLNIVHATQLYRRGPPARVTLTCLAVWGLCLLFALPDFIFLSAHHDERLNATHCQYNFPQVGRTALRVLQLVAGFLLPLLVMAYCYAHILAVLLVSRGQRRLRAMRLVVVVVVAFALCWTPYHLVVLVDILMDLGALARNCGRESRVDVAKSVTSGLGYMHCCLNPLLYAFVGVKFRERMWMLLLRLGCPNQRGLQRQPSSSRRDSSWSETSEASYSGL

SEQ ID NO: 118194 - DNA, 1107 bp, Artificial Sequence
  derived and/or modified sequence
atggtactggaagtttcagaccaccaggtgctcaatgatgcagaagtagccgcgctgttagagaacttctcatcttcttacgactacggcgagaacgaaagtgattcatgttgcactagccctccatgccctcaggatttttccctcaactttgacagggccttcctaccagcactctactctctgttattcttactgggcctcctgggtaacggcgccgtagctgcagtgctcctgagtcgccggactgcgctgtccagtaccgatacatttctgttacatttggctgtggcggatactctcctggtactgactctgccgttgtgggccgttgatgccgccgttcagtgggttttcgggagcgggctgtgcaaggtcgctggagccctgttcaatataaacttttatgcaggggccctgctcctggcctgtatctcgttcgacaggtaccttaacatcgtgcacgctactcaattgtacaggcgaggacctcccgctcgtgtgacactgacctgcttagcagtatggggtttatgcctgctgtttgctctgcctgatttcatctttctttcagctcaccacgatgagcggctgaatgctacgcattgtcagtataatttcccacaagtggggaggacggccttgagagtcctgcagcttgttgctggatttctgttacccctccttgtgatggcctactgctacgctcatattctggcggtcctgctggtcagtcgaggccagaggcgattgcgcgccatgaggttggtggtggtcgtggtcgttgccttcgccctgtgctggaccccttaccacctggtggtgcttgtggatatccttatggaccttggtgcgctggccaggaactgcggccgagaaagccgtgtcgacgtcgctaaatccgttacaagtggcctgggatacatgcactgctgcctcaacccactgctgtatgcgttcgttggggtaaagtttcgagagaggatgtggatgttgctactgcggcttggctgcccaaatcagcgagggctccagagacagccctcaagcagcagacgcgatagctcgtggtctgagactagcgaagcgtcctatagcggcctgtag

SEQ ID NO: 118195 - DNA, 1107 bp, Artificial Sequence
  derived and/or modified sequence
atggtgctggaggtgtctgaccaccaggtgctgaatgatgctgaggtggccgccctgctggagaacttcagcagcagctatgactatggagaaaatgaaagtgacagctgctgcaccagccccccctgcccccaggacttcagcctgaactttgaccgggccttcctgcctgccctgtacagcctgctcttcctgctgggcctgctgggcaatggagctgtggccgctgtgctgctgagcagaagaacagccctgagcagcacagacaccttcctgctgcacctggccgtggccgacaccctgctggtgctgaccctgcccctgtgggccgtggatgctgctgtgcagtgggtgtttggaagtggcctgtgcaaggtggccggggccctcttcaacatcaacttctacgccggggccctgctgctggcctgcatcagctttgaccgctacctgaacatcgtgcacgccacccagctgtacagaagaggccccccagcccgggtgaccctgacctgcctggccgtgtggggcctgtgcctgctgtttgccctgcctgacttcatcttcctgagcgcccaccatgatgagcggctgaatgccacccactgccagtacaacttcccccaggtgggccgcacagccctgcgggtgctgcagctggtggccggcttcctgctgcccctgctggtgatggcctactgctacgcccacatcctggccgtgctgctggtgtcccggggccagaggcggctgcgggccatgaggctggtggtggtggtggtggtggcctttgccctgtgctggaccccctaccacctggtggtgctggtggacatcctgatggacctgggcgccctggccaggaactgtggccgggagagccgggtggatgtggccaagtctgtgaccagcggcctgggctacatgcactgctgcctgaaccccctgctgtatgcctttgtgggcgtgaagttccgggagaggatgtggatgctgctgctgcggctgggctgccccaaccagaggggcctgcagaggcagcccagcagcagccggcgggacagctcctggagcgagaccagcgaggccagctacagcggcctgtag

SEQ ID NO: 118196 - DNA, 1107 bp, Artificial Sequence
  derived and/or modified sequence
atggtgctggaggtgagcgaccaccaggtgctgaacgacgccgaggtggccgcattactggagaatttttcaagctcatacgattacggcgaaaatgagtccgactcctgttgcacatcaccaccctgtcctcaggacttttccctcaattttgacagggctttcctgccagccctgtactccctgctgtttctcttggggctgcttggtaatggtgccgttgcagccgtgttactgagtaggaggactgccctctcctccaccgataccttcctgctgcacctcgccgtcgccgataccctactggtgttgaccctccctctgtgggccgtggatgcagctgtgcaatgggtcttcgggtctggactgtgtaaggtcgcgggtgccttattcaatattaacttctacgctggcgctctgctgctggcctgcatctcctttgatcgatatctaaatatcgtacacgccacacagctgtaccgtagaggaccacccgctcgagtaactctcacatgtcttgccgtttggggcctgtgtttgctcttcgcgttgccagactttattttcctgtcagcccaccacgatgaacgcttgaacgctactcactgccaatacaatttccctcaagtgggaagaaccgctctccgggtcctccagctggttgctggatttctgctacctcttctcgtgatggcttactgctacgcccacatcctggccgtcttgctagtgtctagaggtcagaggcggctcagggcgatgaggcttgtggtcgtggtggttgtggcttttgccctatgttggacaccttaccacttggtggttttggtcgatatcttgatggatctgggcgctctagcccggaactgtggtagggagagtcgtgtagatgtggccaagtccgtaacttcaggtctgggctatatgcactgttgcctcaacccccttctgtacgccttcgtcggagtcaaattccgggagcgcatgtggatgctgctgcttcggctgggctgccctaaccagcggggcttacagcgccagcctagttcttctcgtcgcgacagcagctggtctgagacctctgaggcgtcgtactcaggactatag

SEQ ID NO: 118197 - DNA, 1107 bp, Artificial Sequence
  derived and/or modified sequence
atggtcctggaggtctccgatcaccaggttctgaatgacgctgaagtcgcggcactcctggaaaacttctcgtcctcctatgactatggcgagaatgagtccgattcttgttgcacttcccccccatgtccgcaggacttttctctcaatttcgacagagcgttcctgcccgctctctattccctgctgttcctactgggactgctgggcaatggcgcagtggcggctgtactgctgagccggagaacggcattatcctctactgatacattcttgcttcacctggccgtcgctgacacattactcgtccttacacttcctctttgggctgtcgacgccgcagtgcagtgggtcttcgggagcgggctttgtaaggttgcaggggctctattcaatattaatttttacgccggagccctactgctggcttgcatatcttttgaccgttaccttaacattgtgcacgctactcagttatacagaagaggccctccggcaagagtgacattgacttgcctggccgtgtggggactgtgtttgctatttgcactgcctgactttatcttcctaagcgcacaccacgatgagcgtctgaacgctactcattgtcagtacaatttcccacaagtgggcaggacagccctccgggtgctgcaacttgtcgcagggtttcttctccctctcctcgtgatggcctactgttacgctcacatcctcgccgtgctcctagtcagtagggggcagaggagactgagggccatgagactagtggtggtcgtcgtcgtggcctttgccttatgctggaccccgtaccacctggtggttctggtggacatcctgatggatctgggcgctctggcaaggaattgtgggagagagtcacgcgtcgatgtggctaagtcagtaaccagtgggctaggatatatgcattgctgtcttaacccactgctttatgctttcgtgggcgtaaaatttcgcgaacgtatgtggatgttactgctacggcttggttgtccaaatcaacgcggtctgcagcgccaaccatccagttctagacgagactcctcttggagcgagacatccgaggctagttattcggggctgtag

SEQ ID NO: 118198 - DNA, 1624 bp, Artificial Sequence
  derived and/or modified sequence
ccaaccacaagcaccaaagcagaggggcaggcagcacaccacccagcagccagagcaccagcccagccatggtccttgaggtgagtgaccaccaagtgctaaatgacgccgaggttgccgccctcctggagaacttcagctcttcctatgactatggagaaaacgagagtgactcgtgctgtacctccccgccctgcccacaggacttcagcctgaacttcgaccgggccttcctgccagccctctacagcctcctctttctgctggggctgctgggcaacggcgcggtggcagccgtgctgctgagccggcggacagccctgagcagcaccgacaccttcctgctccacctagctgtagcagacacgctgctggtgctgacactgccgctctgggcagtggacgctgccgtccagtgggtctttggctctggcctctgcaaagtggcaggtgccctcttcaacatcaacttctacgcaggagccctcctgctggcctgcatcagctttgaccgctacctgaacatagttcatgccacccagctctaccgccgggggcccccggcccgcgtgaccctcacctgcctggctgtctgggggctctgcctgcttttcgccctcccagacttcatcttcctgtcggcccaccacgacgagcgcctcaacgccacccactgccaatacaacttcccacaggtgggccgcacggctctgcgggtgctgcagctggtggctggctttctgctgcccctgctggtcatggcctactgctatgcccacatcctggccgtgctgctggtttccaggggccagcggcgcctgcgggccatgcggctggtggtggtggtcgtggtggcctttgccctctgctggaccccctatcacctggtggtgctggtggacatcctcatggacctgggcgctttggcccgcaactgtggccgagaaagcagggtagacgtggccaagtcggtcacctcaggcctgggctacatgcactgctgcctcaacccgctgctctatgcctttgtaggggtcaagttccgggagcggatgtggatgctgctcttgcgcctgggctgccccaaccagagagggctccagaggcagccatcgtcttcccgccgggattcatcctggtctgagacctcagaggcctcctactcgggcttgtgaggccggaatccgggctcccctttcgcccacagtctgacttccccgcattccaggctcctccctccctctgccggctctggctctccccaatatcctcgctcccgggactcactggcagccccagcaccaccaggtctcccgggaagccaccctcccagctctgaggactgcaccattgctgctccttagctgccaagccccatcctgccgcccgaggtggctgcctggagccccactgcccttctcatttggaaactaaaacttcatcttccccaagtgcggggagtacaaggcatggcgtagagggtgctgccccatgaagccacagcccaggcctccagctcagcagtgactgtggccatggtccccaagacctctatatttgctcttttatttttatgtctaaaatcctgcttaaaacttttcaataaacaagatcgtcaggacca

SEQ ID NO: 118199 - DNA, 1107 bp, Artificial Sequence
  derived and/or modified sequence
atggtgctggaggtgagcgaccaccaggtgctgaacgacgccgaggtggccgccctgctggagaacttcagcagcagctacgactacggcgagaacgagagcgacagctgctgcaccagccccccctgcccccaggacttcagcctgaacttcgacagagccttcctgcccgccctgtacagcctgctgttcctgctgggcctgctgggcaacggcgccgtggccgccgtgctgctgagcagaagaaccgccctgagcagcaccgacaccttcctgctgcacctggccgtggccgacaccctgctggtgctgaccctgcccctgtgggccgtggacgccgccgtgcagtgggtgttcggcagcggcctgtgcaaggtggccggcgccctgttcaacatcaacttctacgccggcgccctgctgctggcctgcatcagcttcgacagatacctgaacatcgtgcacgccacccagctgtacagaagaggcccccccgccagagtgaccctgacctgcctggccgtgtggggcctgtgcctgctgttcgccctgcccgacttcatcttcctgagcgcccaccacgacgagagactgaacgccacccactgccagtacaacttcccccaggtgggcagaaccgccctgagagtgctgcagctggtggccggcttcctgctgcccctgctggtgatggcctactgctacgcccacatcctggccgtgctgctggtgagcagaggccagagaagactgagagccatgagactggtggtggtggtggtggtggccttcgccctgtgctggaccccctaccacctggtggtgctggtggacatcctgatggacctgggcgccctggccagaaactgcggcagagagagcagagtggacgtggccaagagcgtgaccagcggcctgggctacatgcactgctgcctgaaccccctgctgtacgccttcgtgggcgtgaagttcagagagagaatgtggatgctgctgctgagactgggctgccccaaccagagaggcctgcagagacagcccagcagcagcagaagagacagcagctggagcgagaccagcgaggccagctacagcggcctgtag

SEQ ID NO: 118200 - protein, 412 aa, Artificial Sequence
  derived and/or modified sequence
MGSPWNGSDGPEGAREPPWPALPPCDERRCSPFPLGALVPVTAVCLCLFVVGVSGNVVTVMLIGRYRDMRTTTNLYLGSMAVSDLLILLGLPFDLYRLWRSRPWVFGPLLCRLSLYVGEGCTYATLLHMTALSVERYLAICRPLRARVLVTRRRVRALIAVLWAVALLSAGPFLFLVGVEQDPGISVVPGLNGTARIASSPLASSPPLWLSRAPPPSPPSGPETAEAAALFSRECRPSPAQLGALRVMLWVTTAYFFLPFLCLSILYGLIGRELWSSRRPLRGPAASGRERGHRQTVRVLLVVVLAFIICWLPFHVGRIIYINTEDSRMMYFSQYFNIVALQLFYLSASINPILYNLISKKYRAAAFKLLLARKSRPRGFHRSRDTAGEVAGDTGGDTVGYTETSANVKTMG

SEQ ID NO: 118201 - protein, 386 aa, Artificial Sequence
  derived and/or modified sequence
MGSPWNGSDGPEGAREPPWPALPPCDERRCSPFPLGALVPVTAVCLCLFVVGVSGNVVTVMLIGRYRDMRTTTNLYLGSMAVSDLLILLGLPFDLYRLWRSRPWVFGPLLCRLSLYVGEGCTYATLLHMTALSVERYLAICRPLRARVLVTRRRVRALIAVLWAVALLSAGPFLFLVGVEQDPGISVVPGLNGTARIASSPLASSPPLWLSRAPPPSPPSGPETAEAAALFSRECRPSPAQLGALRVMLWVTTAYFFLPFLCLSILYGLIGRELWSSRRPLRGPAASGRERGHRQTVRVLRKWSRRGSKDACLQSAPPGTAQTLGPLPLLAQLWAPLPAPFPISIPASTRRGGGSGIYNLLVALPRWQNHLHKHGRFADDVLLSVL

SEQ ID NO: 118202 - DNA, 1239 bp, Artificial Sequence
  derived and/or modified sequence
atgggctccccctggaacggcagtgacggcccagagggtgctagagagcccccatggcctgcccttccgccctgtgatgagcgccgatgttctcccttccccctgggcgcattggtgcccgtgacggccgtctgtctgtgtctgtttgtggtcggtgtaagcggcaatgtagttaccgtcatgctgattggcagatacagagacatgcgtaccactactaatctctatttgggttctatggcagtgtctgacctcctgatcttactcggtcttccttttgatctttaccggctctggagatcccgaccttgggtgtttgggcctctcctgtgcagattatccctgtatgtaggtgaaggatgtacatatgccactctattacatatgaccgcactgagcgtggaacgttacctagccatttgtcggcccttaagagctagagtcctcgttacccgaagacgggttcgcgccctgattgccgtcctctgggctgtggccctgctgtctgcagggcccttcctcttcctggtgggcgtcgagcaggaccccggaatatccgtggtgcctggcctcaatggtacggccagaatcgcatcaagtccactcgctagcagccctccactgtggctctccagggcgccccctccttctccgcctagcggccctgagaccgcagaggccgcagctctcttctcccgcgagtgcagaccatctccggcacagctgggtgccctgcgagttatgctctgggtgactaccgcgtacttctttctcccattcctgtgcctatccattttgtacggacttattggacgagagctctggtccagtcggcgccctctgcggggaccagcggcatccgggagagagagaggacatcgccagacagtgcgcgtccttttagttgtggtgcttgcattcataatatgttggcttccatttcacgtgggacgaatcatctacataaataccgaggactccagaatgatgtacttttctcagtatttcaatattgtggccctgcaactgttctacctgagcgccagtatcaatcctatcctgtataacttgatttccaaaaaatatagggctgcggctttcaagctcttattagctaggaaatctcggccgaggggattccataggtccagagataccgcgggtgaagtggccggcgacactgggggagacaccgtgggctataccgagacatcagctaatgtgaagacaatgggctag

SEQ ID NO: 118203 - DNA, 1161 bp, Artificial Sequence
  derived and/or modified sequence
atgggctcgccttggaatggatcagatggccctgagggggctcgcgagcccccctggcctgcactccctccatgcgatgaacggcggtgctctccttttccccttggtgcccttgtgcccgttactgccgtttgcctctgcctgtttgtggtcggagtgtccggcaacgtagtgactgttatgctcattgggcggtatcgcgacatgcgtaccaccacaaacctgtatctggggtctatggcggtatccgatctgcttatactcctcggtttgcccttcgacctttaccggctctggcggagcaggccgtgggtgttcgggccactgctctgtcggctcagtctctacgtgggcgaaggatgcacatacgccaccctgctccatatgaccgctctgagcgttgagagataccttgccatatgtagacctttgcgggccagagtcctggtcactaggcggagagtgcgcgccctaatcgcggttttgtgggccgtggcactactgagtgcgggcccttttttgtttctggtaggagtggagcaggatccaggaatcagcgtcgtccctggtttgaatggaactgctcgcatagctagcagcccactggcctcctccccccccctctggctctcacgggcgccacctccctcccctccatccggtccggagacagccgaagccgctgctctgttttctcgtgagtgtcgcccctccccagcccagctgggcgccctaagggtaatgctctgggtgaccaccgcctactttttcctgccattcctgtgtctcagcatcctctacggactaatcggaagggagctttggtctagcagaagacccctgcggggccctgccgcctcaggtcgcgagcgcgggcaccgccagacagtccgcgttcttcggaaatggtcccgacgcggatccaaagatgcatgcctccagtccgcccctccagggacagcacaaacacttggcccacttcctttgctggctcagctttgggcgccacttccagcccctttccccatcagcattcctgcctccacgagacggggagggggcagcggaatttacaacctgctggtagctctgcctagatggcagaaccacctccataaacacggccgtttcgccgacgatgtcttattatctgtgctgtag

SEQ ID NO: 118204 - DNA, 1239 bp, Artificial Sequence
  derived and/or modified sequence
atgggcagcccctggaatggaagtgatggccctgagggcgcccgggagcccccctggccagccctgcccccctgtgatgagcggcgctgcagccccttccccctgggcgccctggtgcctgtgacagctgtgtgcctgtgcctgtttgtggtgggcgtgtctggaaatgtggtgacagtgatgctgattggccgctacagagacatgaggaccaccaccaacctgtacctgggctccatggctgtgtctgacctgctgatcctgctgggcctgccctttgacctgtaccgcctgtggaggagccggccctgggtgtttggccccctgctgtgccgcctgagcctgtatgtgggggagggctgcacctacgccaccctgctgcacatgacagccctgtctgtggagcgctacctggccatctgccggcccctgcgggcccgggtgctggtgaccaggagaagagtgcgggccctgattgctgtgctgtgggccgtggccctgctgtctgctggccccttcctgttcctggtgggcgtggagcaggaccccggcatctctgtggtgcccggcctgaatggaacagccagaattgccagcagccccctggccagcagcccccccctgtggctgagccgggcccccccacccagcccccccagcggccctgagacagctgaggccgccgccctcttcagccgggagtgccggcccagccctgcccagctgggcgccctgcgggtgatgctgtgggtgaccacagcctacttcttcctgcccttcctgtgcctgagcatcctgtatggcctcatcggccgggagctgtggagcagccggcggcccctgcggggccctgctgccagcggccgggagcggggccaccggcagacagtgcgggtgctgctggtggtggtgctggccttcatcatctgctggctgcccttccacgtgggccgcatcatctacatcaacacagaggacagcaggatgatgtacttcagccagtacttcaacatcgtggccctgcagctgttctacctgagcgccagcatcaaccccatcctgtacaacctgatcagcaagaagtacagagctgctgccttcaagctgctgctggccaggaagagccggccccggggcttccacaggagccgggacacagctggggaggtggccggggacaccggcggggacacagtgggctacacagagaccagcgccaacgtgaagaccatgggctag

SEQ ID NO: 118205 - DNA, 1161 bp, Artificial Sequence
  derived and/or modified sequence
atgggcagcccctggaatggaagtgatggccctgagggcgcccgggagcccccctggccagccctgcccccctgtgatgagcggcgctgcagccccttccccctgggcgccctggtgcctgtgacagctgtgtgcctgtgcctgtttgtggtgggcgtgtctggaaatgtggtgacagtgatgctgattggccgctacagagacatgaggaccaccaccaacctgtacctgggctccatggctgtgtctgacctgctgatcctgctgggcctgccctttgacctgtaccgcctgtggaggagccggccctgggtgtttggccccctgctgtgccgcctgagcctgtatgtgggggagggctgcacctacgccaccctgctgcacatgacagccctgtctgtggagcgctacctggccatctgccggcccctgcgggcccgggtgctggtgaccaggagaagagtgcgggccctgattgctgtgctgtgggccgtggccctgctgtctgctggccccttcctgttcctggtgggcgtggagcaggaccccggcatctctgtggtgcccggcctgaatggaacagccagaattgccagcagccccctggccagcagcccccccctgtggctgagccgggcccccccacccagcccccccagcggccctgagacagctgaggccgccgccctcttcagccgggagtgccggcccagccctgcccagctgggcgccctgcgggtgatgctgtgggtgaccacagcctacttcttcctgcccttcctgtgcctgagcatcctgtatggcctcatcggccgggagctgtggagcagccggcggcccctgcggggccctgctgccagcggccgggagcggggccaccggcagacagtgcgggtgctgaggaagtggagcagaagaggcagcaaggatgcctgcctgcagagcgcccctcctggaacagcccagaccctgggccccctgcccctgctggcccagctgtgggcccccctgcctgcccccttccccatcagcatcccagccagcacccggcggggcggcggcagcggcatctacaacctgctggtggccctgccccgctggcagaaccacctgcacaagcacggccgctttgctgatgatgtgctgctgtctgtgctgtag

SEQ ID NO: 118206 - DNA, 1239 bp, Artificial Sequence
  derived and/or modified sequence
atgggcagcccctggaacggcagcgacggccccgagggcgcccgggagcctccatggcctgccttgcctccgtgtgatgagcggaggtgtagtccctttccactgggcgcgctcgtcccagtgactgccgtgtgcttgtgtctttttgtggtgggcgtgtcagggaacgttgttacagtgatgcttatcggccggtatagagatatgcgcaccacaaccaacctctacttggggtctatggcggtcagcgacctgctgatcttgctcggcctcccctttgacttgtaccggctgtggcgatcaagaccatgggttttcggccccctgctgtgtcggctgtctctgtacgtgggcgagggttgcacctacgccacccttttgcatatgaccgctctgagtgtggaaagatacttagccatttgccgacctctgagggcacgcgtgctggtgaccaggcgaagagtgagagcacttatcgcagtcctgtgggccgtggccttactgtccgccggtccctttttatttcttgtgggggtcgagcaagaccccggaatctctgtggtgcccggcctcaatggaacggcccgcatagcttcatctccactggccagtagtcctcccctgtggctgtcccgagccccaccacccagcccaccctctggccccgagaccgccgaggcagcagctctcttcagcagggaatgcaggccttcaccggcccagctgggcgctttaagggtgatgctatgggtcaccacagcttattttttcctgccttttctgtgcctgtctatactttatggccttatcgggcgagaactgtggtctagcaggcgccctttgcgcggccccgccgcaagtgggcgagagcgaggtcacagacagaccgttagggttttgctggtcgtggtgcttgcatttatcatttgttggttgccatttcacgtcgggcgcatcatatacatcaatacagaagattcaagaatgatgtatttctctcagtatttcaacattgtggcgcttcagctcttttatctgtctgcatccattaacccaatcctgtataatctgatttccaaaaagtatcgcgccgcagcatttaagttattgctggcaagaaagtcacgtcctcgcggctttcaccgaagccgtgacaccgccggtgaagtggctggtgacacggggggggatactgtgggatatacagagacgagcgccaatgttaaaacaatgggatag

SEQ ID NO: 118207 - DNA, 1239 bp, Artificial Sequence
  derived and/or modified sequence
atgggcagcccctggaacggcagcgacggccccgagggggcgcgggagccgccgtggcccgcgctgccgccttgcgacgagcgccgctgctcgccctttcccctgggggcgctggtgccggtgaccgctgtgtgcctgtgcctgttcgtcgtcggggtgagcggcaacgtggtgaccgtgatgctgatcgggcgctaccgggacatgcggaccaccaccaacttgtacctgggcagcatggccgtgtccgacctactcatcctgctcgggctgccgttcgacctgtaccgcctctggcgctcgcggccctgggtgttcgggccgctgctctgccgcctgtccctctacgtgggcgagggctgcacctacgccacgctgctgcacatgaccgcgctcagcgtcgagcgctacctggccatctgccgcccgctccgcgcccgcgtcttggtcacccggcgccgcgtccgcgcgctcatcgctgtgctctgggccgtggcgctgctctctgccggtcccttcttgttcctggtgggcgtcgagcaggaccccggcatctccgtagtcccgggcctcaatggcaccgcgcggatcgcctcctcgcctctcgcctcgtcgccgcctctctggctctcgcgggcgccaccgccgtccccgccgtcggggcccgagaccgcggaggccgcggcgctgttcagccgcgaatgccggccgagccccgcgcagctgggcgcgctgcgtgtcatgctgtgggtcaccaccgcctacttcttcctgccctttctgtgcctcagcatcctctacgggctcatcgggcgggagctgtggagcagccggcggccgctgcgaggcccggccgcctcggggcgggagagaggccaccggcagaccgtccgcgtcctgctggtggtggttctggcatttataatttgctggttgcccttccacgttggcagaatcatttacataaacacggaagattcgcggatgatgtacttctctcagtactttaacatcgtcgctctgcaacttttctatctgagcgcatctatcaacccaatcctctacaacctcatttcaaagaagtacagagcggcggcctttaaactgctgctcgcaaggaagtccaggccgagaggcttccacagaagcagggacactgcgggggaagttgcaggggacactggaggagacacggtgggctacaccgagacaagcgctaacgtgaagacgatgggataa

SEQ ID NO: 118208 - DNA, 1390 bp, Artificial Sequence
  derived and/or modified sequence
atgggcagcccctggaacggcagcgacggccccgagggggcgcgggagccgccgtggcccgcgctgccgccttgcgacgagcgccgctgctcgccctttcccctgggggcgctggtgccggtgaccgctgtgtgcctgtgcctgttcgtcgtcggggtgagcggcaacgtggtgaccgtgatgctgatcgggcgctaccgggacatgcggaccaccaccaacttgtacctgggcagcatggccgtgtccgacctactcatcctgctcgggctgccgttcgacctgtaccgcctctggcgctcgcggccctgggtgttcgggccgctgctctgccgcctgtccctctacgtgggcgagggctgcacctacgccacgctgctgcacatgaccgcgctcagcgtcgagcgctacctggccatctgccgcccgctccgcgcccgcgtcttggtcacccggcgccgcgtccgcgcgctcatcgctgtgctctgggccgtggcgctgctctctgccggtcccttcttgttcctggtgggcgtcgagcaggaccccggcatctccgtagtcccgggcctcaatggcaccgcgcggatcgcctcctcgcctctcgcctcgtcgccgcctctctggctctcgcgggcgccaccgccgtccccgccgtcggggcccgagaccgcggaggccgcggcgctgttcagccgcgaatgccggccgagccccgcgcagctgggcgcgctgcgtgtcatgctgtgggtcaccaccgcctacttcttcctgccctttctgtgcctcagcatcctctacgggctcatcgggcgggagctgtggagcagccggcggccgctgcgaggcccggccgcctcggggcgggagagaggccaccggcagaccgtccgcgtcctgcgtaagtggagccgccgtggttccaaagacgcctgcctgcagtccgccccgccggggaccgcgcaaacgctgggtccccttcccctgctcgcccagctctgggcgccgcttccagctccctttcctatttcgattccagcctccacccgccgtggtggtggttctggcatttataatttgctggttgcccttccacgttggcagaatcatttacataaacacggaagattcgcggatgatgtacttctctcagtactttaacatcgtcgctctgcaacttttctatctgagcgcatctatcaacccaatcctctacaacctcatttcaaagaagtacagagcggcggcctttaaactgctgctcgcaaggaagtccaggccgagaggcttccacagaagcagggacactgcgggggaagttgcaggggacactggaggagacacggtgggctacaccgagacaagcgctaacgtgaagacgatgggataa

SEQ ID NO: 118209 - DNA, 1161 bp, Artificial Sequence
  derived and/or modified sequence
atgggcagcccctggaacggcagcgacggccccgagggcgcccgggaacctccttggccagccctccccccgtgcgatgaaagacggtgctcaccgttccctctaggagccctggtacccgtcacagcagtgtgtctgtgtttgttcgttgtgggcgtgagtggtaacgtggtcaccgtcatgctgatcggaagatatcgggacatgcggaccactacgaatttgtatttaggcagcatggctgtgagtgatcttctgattctcctgggactgcctttcgacctgtatcgtttgtggcgctcccgtccatgggttttcgggccgttactgtgcagattgtcactgtacgtcggagaaggatgtacgtatgcaaccttgctgcacatgaccgccttaagcgtcgaacgttacctggccatctgtcggcctctccgcgcccgggtccttgtgacacggaggcgcgttagagctcttatcgccgtgctatgggccgtggctctgctgtccgctggtcccttcctcttcctggtcggtgtggagcaagatcccggcatctctgtcgtgcctggattaaatggtacggcgcgtatcgccagctctccccttgccagtagtcctcccttgtggcttagccgagcaccccccccgtcccccccgtccggccctgagactgctgaagccgccgctctcttctctagggagtgcagaccgtctccggctcaactgggcgcactgagggtgatgttatgggtaaccaccgcctatttctttcttccatttctgtgcctctctattctctacgggcttatcggacgtgagctgtggagtagccgacggcctcttcgtgggcctgccgcttcaggaagggagagagggcacagacagacagtacgcgtgctacggaaatggagccgcaggggaagcaaggacgcgtgcctgcagtcagcaccgcccgggactgcccagaccctcggaccactccctctgctggcccaactgtgggctccgcttccggcaccattccccatcagcatccccgcctccacaagacgaggaggggggagcgggatatataatctgcttgttgcactcccccgctggcaaaatcatctgcacaaacatggacgtttcgctgatgacgttctgctttcagtgctatag

SEQ ID NO: 118210 - DNA, 1239 bp, Artificial Sequence
  derived and/or modified sequence
atgggcagtccctggaatgggtccgacggtcctgaaggggctagggaacccccttggcctgctctgcccccttgcgatgaacgcaggtgctccccatttccactgggcgctctggtgcctgtcaccgctgtgtgtctgtgtctcttcgttgtcggcgtttccggcaacgttgtgaccgtcatgctgatcggaagatatagggatatgcggactacaacgaatttgtatcttgggagtatggcagtctcagacttgttgatcctgctcgggctgccattcgatctctacaggctctggcggagccggccttgggtgttcgggccactcctttgtaggctgagcctgtacgtgggagaagggtgcacatatgcgactttgttgcacatgaccgcattatccgtcgaacggtacctggccatttgcaggccgttaagggcacgcgtgttggtgacgcgacggagggtcagagccttaattgccgttctgtgggccgtcgccctgttgtctgctggccctttcctttttcttgtgggagtggaacaggaccccggaatttcagttgttcctggccttaatggaacagcaagaatcgcttctagtcccctagcttcctctcccccactatggctctcaagggctcctccacctagcccccctagcggacctgaaacggctgaggcggcagccctgttctcgagagagtgtcggccttcccctgcgcagctgggcgcactgcgagtgatgttatgggtcacaactgcatacttcttcttgcctttcctctgtctgtcaatcctctacggtctgataggtagagagctgtggtcctcacggagaccattaagaggacctgctgcttccggccgtgaaaggggccaccggcagacagtgcgggtccttctggtggtcgtacttgccttcataatttgttggctgccctttcatgttgggagaatcatttatattaacacagaagattcccggatgatgtatttctcacaatacttcaacattgttgcactgcagctgttttatctctcagcatcgattaaccctatactttacaacctcatatctaagaagtacagggccgcagccttcaaactgctactggcacggaagtcccgccctcggggatttcacagaagccgggataccgctggggaggtcgccggagacaccggtggagacaccgttgggtataccgagacctctgctaacgtgaaaactatggggtag

SEQ ID NO: 118211 - DNA, 1161 bp, Artificial Sequence
  derived and/or modified sequence
atgggctcaccatggaacggctcagacggccctgagggagcacgtgagccgccttggcccgcacttcctccctgtgatgaacgcaggtgctccccttttccacttggggctctggttcctgtgacagcagtttgtctttgcctgtttgttgttggggtatcaggtaacgtggtcaccgtgatgctaattggtcggtatcgtgatatgcgcaccaccacaaacctgtacctggggagcatggctgtgtctgatctattgatacttctcgggctgccctttgatctctaccggctatggagaagcagaccatgggtcttcggacctctgctgtgtaggctctctctctacgtaggagagggttgtacatatgctacactcctccacatgaccgctctcagcgtcgaacggtatttggcgatctgtaggcctctgagagctagagtactggtcactagaagaagggtgagagctctgatagcagtgttgtgggccgtagctcttttatcagcaggtccctttctgtttctcgtcggcgtcgaacaggatccgggaatctcagttgtacccggactgaacggcactgcgcgtatagccagctcccctttggcatcctcaccaccgctgtggctttctcgagcccctccaccaagccccccatccggacccgagaccgcagaggcagccgctctcttttcaagagagtgcaggcctagcccagcccagctgggtgcgcttcgagtgatgctgtgggtgacaaccgcttatttttttctcccattcctgtgcctgtcgattctatatggcctgataggcagagaactgtggtcttccaggcgtcctttacggggaccagcagcgtcaggcagggagcgtgggcatagacaaacggtgcgggtgctgcggaaatggagccggagagggtcgaaagacgcatgtttgcagtcagcacccccagggaccgcacagactcttggcccactaccgttgctggcccagctgtgggcacccctgcccgctcccttccctatatcaattcccgcaagcactagacgcggtggtggctctggcatctacaatctcctggtggcactccccaggtggcagaaccatctgcacaaacatggtcggtttgcggacgatgtactgctctctgtcctttag

SEQ ID NO: 118212 - DNA, 1239 bp, Artificial Sequence
  derived and/or modified sequence
atgggcagcccctggaacggcagcgacggccccgagggcgccagagagcccccctggcccgccctgcccccctgcgacgagagaagatgcagccccttccccctgggcgccctggtgcccgtgaccgccgtgtgcctgtgcctgttcgtggtgggcgtgagcggcaacgtggtgaccgtgatgctgatcggcagatacagagacatgagaaccaccaccaacctgtacctgggcagcatggccgtgagcgacctgctgatcctgctgggcctgcccttcgacctgtacagactgtggagaagcagaccctgggtgttcggccccctgctgtgcagactgagcctgtacgtgggcgagggctgcacctacgccaccctgctgcacatgaccgccctgagcgtggagagatacctggccatctgcagacccctgagagccagagtgctggtgaccagaagaagagtgagagccctgatcgccgtgctgtgggccgtggccctgctgagcgccggccccttcctgttcctggtgggcgtggagcaggaccccggcatcagcgtggtgcccggcctgaacggcaccgccagaatcgccagcagccccctggccagcagcccccccctgtggctgagcagagcccccccccccagcccccccagcggccccgagaccgccgaggccgccgccctgttcagcagagagtgcagacccagccccgcccagctgggcgccctgagagtgatgctgtgggtgaccaccgcctacttcttcctgcccttcctgtgcctgagcatcctgtacggcctgatcggcagagagctgtggagcagcagaagacccctgagaggccccgccgccagcggcagagagagaggccacagacagaccgtgagagtgctgctggtggtggtgctggccttcatcatctgctggctgcccttccacgtgggcagaatcatctacatcaacaccgaggacagcagaatgatgtacttcagccagtacttcaacatcgtggccctgcagctgttctacctgagcgccagcatcaaccccatcctgtacaacctgatcagcaagaagtacagagccgccgccttcaagctgctgctggccagaaagagcagacccagaggcttccacagaagcagagacaccgccggcgaggtggccggcgacaccggcggcgacaccgtgggctacaccgagaccagcgccaacgtgaagaccatgggctag

SEQ ID NO: 118213 - DNA, 1161 bp, Artificial Sequence
  derived and/or modified sequence
atgggcagcccctggaacggcagcgacggccccgagggcgccagagagcccccctggcccgccctgcccccctgcgacgagagaagatgcagccccttccccctgggcgccctggtgcccgtgaccgccgtgtgcctgtgcctgttcgtggtgggcgtgagcggcaacgtggtgaccgtgatgctgatcggcagatacagagacatgagaaccaccaccaacctgtacctgggcagcatggccgtgagcgacctgctgatcctgctgggcctgcccttcgacctgtacagactgtggagaagcagaccctgggtgttcggccccctgctgtgcagactgagcctgtacgtgggcgagggctgcacctacgccaccctgctgcacatgaccgccctgagcgtggagagatacctggccatctgcagacccctgagagccagagtgctggtgaccagaagaagagtgagagccctgatcgccgtgctgtgggccgtggccctgctgagcgccggccccttcctgttcctggtgggcgtggagcaggaccccggcatcagcgtggtgcccggcctgaacggcaccgccagaatcgccagcagccccctggccagcagcccccccctgtggctgagcagagcccccccccccagcccccccagcggccccgagaccgccgaggccgccgccctgttcagcagagagtgcagacccagccccgcccagctgggcgccctgagagtgatgctgtgggtgaccaccgcctacttcttcctgcccttcctgtgcctgagcatcctgtacggcctgatcggcagagagctgtggagcagcagaagacccctgagaggccccgccgccagcggcagagagagaggccacagacagaccgtgagagtgctgagaaagtggagcagaagaggcagcaaggacgcctgcctgcagagcgccccccccggcaccgcccagaccctgggccccctgcccctgctggcccagctgtgggcccccctgcccgcccccttccccatcagcatccccgccagcaccagaagaggcggcggcagcggcatctacaacctgctggtggccctgcccagatggcagaaccacctgcacaagcacggcagattcgccgacgacgtgctgctgagcgtgctgtag

SEQ ID NO: 118214 - protein, 453 aa, Artificial Sequence
  derived and/or modified sequence
MASPSLPGSDCSQIIDHSHVPEFEVATWIKITLILVYLIIFVMGLLGNSATIRVTQVLQKKGYLQKEVTDHMVSLACSDILVFLIGMPMEFYSIIWNPLTTSSYTLSCKLHTFLFEACSYATLLHVLTLSFERYIAICHPFRYKAVSGPCQVKLLIGFVWVTSALVALPLLFAMGTEYPLVNVPSHRGLTCNRSSTRHHEQPETSNMSICTNLSSRWTVFQSSIFGAFVVYLVVLLSVAFMCWNMMQVLMKSQKGSLAGGTRPPQLRKSESEESRTARRQTIIFLRLIVVTLAVCWMPNQIRRIMAAAKPKHDWTRSYFRAYMILLPFSETFFYLSSVINPLLYTVSSQQFRRVFVQVLCCRLSLQHANHEKRLRVHAHSTTDSARFVQRPLLFASRRQSSARRTEKIFLSTFQSEAEPQSKSQSLSLESLEPNSGAKPANSAAENGFQEHEV

SEQ ID NO: 118215 - DNA, 1891 bp, Artificial Sequence
  derived and/or modified sequence
ccttcagtctcagccgccaactccggaggcgcggtgctcggcccgggagcgcgagcgggaggagcagagacccgcagccgggagcccgagcgcgggcgatgcaggctccgcgagcggcacctgcggctcctctaagctacgaccgtcgtctccgcggcagcagcgcgggccccagcagcctcggcagccacagccgctgcagccggggcagcctccgctgctgtcgcctcctctgatgcgcttgccctctcccggccccgggactccgggagaatgtgggtcctaggcatcgcggcaactttttgcggattgttcttgcttccaggctttgcgctgcaaatccagtgctaccagtgtgaagaattccagctgaacaacgactgctcctcccccgagttcattgtgaattgcacggtgaacgttcaagacatgtgtcagaaagaagtgatggagcaaagtgccgggatcatgtaccgcaagtcctgtgcatcatcagcggcctgtctcatcgcctctgccgggtaccagtccttctgctccccagggaaactgaactcagtttgcatcagctgctgcaacacccctctttgtaacgggccaaggcccaagaaaaggggaagttctgcctcggccctcaggccagggctccgcaccaccatcctgttcctcaaattagccctcttctcggcacactgctgaagctgaaggagatgccaccccctcctgcattgttcttccagccctcgcccccaaccccccacctccctgagtgagtttcttctgggtgtccttttattctgggtagggagcgggagtccgtgttctcttttgttcctgtgcaaataatgaaagagctcggtaaagcattctgaataaattcagcctgactgaattttcagtatgtacttgaaggaaggaggtggagtgaaagttcacccccatgtctgtgtaaccggagtcaaggccaggctggcagagtcagtccttagaagtcactgaggtgggcatctgccttttgtaaagcctccagtgtccattccatccctgatgggggcatagtttgagactgcagagtgagagtgacgttttcttagggctggagggccagttcccactcaaggctccctcgcttgacattcaaacttcatgctcctgaaaaccattctctgcagcagaattggctggtttcgcgcctgagttgggctctagtgactcgagactcaatgactgggacttagactggggctcggcctcgctctgaaaagtgcttaagaaaatcttctcagttctccttgcagaggactggcgccgggacgcgaagagcaacgggcgctgcacaaagcgggcgctgtcggtggtggagtgcgcatgtacgcgcaggcgcttctcgtggttggcgtgctgcagcgacaggcggcagcacagcacctgcacgaacacccgccgaaactgctgcgaggacaccgtgtacaggagcgggttgatgaccgagctgaggtagaaaaacgtctccgagaaggggaggaggatcatgtacgcccggaagtaggacctcgtccagtcgtgcttgggtttggccgcagccatgatcctccgaatctggttgggcatccagcatacggccaatgtcacaacaatcagccctgggcagacacgagcaggagggagagacagagaaaagaaaaacacagcatgagaacacagtaaatgaataaaaccataaaatatttagcccctctgttctgtgcttactggccaggaaatggtaccaatttttcagtgttggacttgacagcttcttttgccacaagcaagagagaatttaacactgtttcaaacccgggggagttggctgtgttaaagaaagaccattaaatgctttagacagtgt

SEQ ID NO: 118216 - DNA, 2784 bp, Artificial Sequence
  derived and/or modified sequence
atgattaatcgctgaccaccccgcctcccgcagctcgggagagggtgctctgggaatgtggaccggggctctcaagtgccggcagctggaaaggaagaggagtgctgcgaggcggagtgcgccctcggcgaagaggggcagaggcggagcgccaggtgctgcggtctcactcccagccagccaggagtttagaacgttcttcctccgccctctccccgcctcgccccagccacatacactcccaaacctcaacacccaggcgcctcctgggcctctcctaggttgggctgctccagcaagtttccatgaaagcacctgaaatactaagttaccttcgcgaggagaactcgagtgagataaaatcgtgcgcccacgcaggtgagtttgcagccaagaattttggacgctgctgggaggagaaagggaagttgagaaagtctttggacctggtagcctggtgctctttctcatggcttcacccagcctcccgggcagtgactgctcccaaatcattgatcacagtcatgtccccgagtttgaggtggccacctggatcaaaatcacccttattctggtgtacctgatcatcttcgtgatgggccttctggggaacagcgccaccattcgggtcacccaggtgctgcagaagaaaggatacttgcagaaggaggtgacagaccacatggtgagtttggcttgctcggacatcttggtgttcctcatcggcatgcccatggagttctacagcatcatctggaatcccctgaccacgtccagctacaccctgtcctgcaagctgcacactttcctcttcgaggcctgcagctacgctacgctgctgcacgtgctgacactcagctttgagcgctacatcgccatctgtcaccccttcaggtacaaggctgtgtcgggaccttgccaggtgaagctgctgattggcttcgtctgggtcacctccgccctggtggcactgcccttgctgtttgccatgggtactgagtaccccctggtgaacgtgcccagccaccggggtctcacttgcaaccgctccagcacccgccaccacgagcagcccgagacctccaatatgtccatctgtaccaacctctccagccgctggaccgtgttccagtccagcatcttcggcgccttcgtggtctacctcgtggtcctgctctccgtagccttcatgtgctggaacatgatgcaggtgctcatgaaaagccagaagggctcgctggccgggggcacgcggcctccgcagctgaggaagtccgagagcgaagagagcaggaccgccaggaggcagaccatcatcttcctgaggctgattgttgtgacattggccgtatgctggatgcccaaccagattcggaggatcatggctgcggccaaacccaagcacgactggacgaggtcctacttccgggcgtacatgatcctcctccccttctcggagacgtttttctacctcagctcggtcatcaacccgctcctgtacacggtgtcctcgcagcagtttcggcgggtgttcgtgcaggtgctgtgctgccgcctgtcgctgcagcacgccaaccacgagaagcgcctgcgcgtacatgcgcactccaccaccgacagcgcccgctttgtgcagcgcccgttgctcttcgcgtcccggcgccagtcctctgcaaggagaactgagaagattttcttaagcacttttcagagcgaggccgagccccagtctaagtcccagtcattgagtctcgagtcactagagcccaactcaggcgcgaaaccagccaattctgctgcagagaatggttttcaggagcatgaagtttgaatgtcaagcgagggagccttgagtgggaactggccctccagccctaagaaaacgtcactctcactctgcagtctcaaactatgcccccatcagggatggaatggacactggaggctttacaaaaggcagatgcccacctcagtgacttctaaggactgactctgccagcctggccttgactccggttacacagacatgggggtgaactttcactccacctccttccttcaagtacatactgaaaattcagtcaggctgaatttattcagaatgctttaccgagctctttcattatttgcacaggaacaaaagagaacacggactcccgctccctacccagaataaaaggacacccagaagaaactcactcagggaggtggggggttgggggcgagggctggaagaacaatgcaggagggggtggcatctccttcagcttcagcagtgtgccgagaagagggctaatttgaggaacaggatggtggtgcggagccctggcctgagggccgaggcagaacttccccttttcttgggccttggcccgttacaaagaggggtgttgcagcagctgatgcaaactgagttcagtttccctggggagcagaaggactggtacccggcagaggcgatgagacaggccgctgatgatgcacaggacttgcggtacatgatccctgtaacacagacccaaaggagctgagttaacgtgcaccggcaaaagaatagctgtccctctcagcccaaatccaaacggacagctcttccttactcctcccacagcccagagactaggtgaggtcagggaagtgcttcggattgtctcattgatattcaagatagatggtgaaagagacaggcactatttcattagttttaacaaaactgttccaaaagcgatttgagatgccaatacctgtgaatacctgttaataaagagctgttaaatagactta

SEQ ID NO: 118217 - DNA, 1362 bp, Artificial Sequence
  derived and/or modified sequence
atggcgtctccatctctcccgggatccgactgcagccagatcattgaccactctcatgtgcctgagttcgaggttgccacctggattaaaataacgcttattttggtctatctcattatctttgtgatgggattacttggcaactccgccacgattagggtcactcaggtactgcagaagaagggttatctgcagaaggaggtgactgaccacatggtgtcgctagcctgtagcgacattctggtgtttctcatcggcatgcctatggagttctactccattatctggaaccccttaactacatcttcgtacactctcagttgcaagctgcacacctttctttttgaggcctgcagctatgcgacattactgcatgttctcacattgtcattcgagcgatacatagccatctgtcaccccttcaggtataaggctgtgtcgggcccttgccaagtgaaactgctcattgggtttgtgtgggtgacatccgcactggtggctctccccttgttgttcgctatgggaaccgaatacccactcgtgaacgtgcccagtcatcggggtctgacctgtaatcgctcatcgaccaggcatcacgagcagcctgaaaccagcaatatgtccatctgcacaaacctttcttccaggtggaccgtattccagagcagtattttcggcgcgttcgtggtgtacctcgttgtactgctgtcagtggcctttatgtgctggaacatgatgcaggtattaatgaagtctcagaaggggagcctggcaggaggtactagacctccacagttacgcaagtctgagagcgaggagagtcgaacagctcgaaggcaaaccatcatcttcctaagactcatcgtggtgaccctggctgtttgttggatgccgaatcaaatccggcgaattatggccgctgctaagcctaagcacgattggacgaggtcgtatttccgggcctacatgatcctcctgcctttttctgagaccttcttttacctaagcagcgtgatcaatcccctgctgtacacggtttctagccagcagttcagaagggtgttcgtgcaggtcctgtgttgtcgactgagcttacagcatgctaaccacgagaaaaggctgcgcgttcatgctcactcaactacggatagcgctaggttcgtgcagcggccactactctttgcgagtcgaagacagtcaagtgcccggaggacagaaaaaatttttctgagcacatttcagagtgaggccgaaccccagtctaagagtcagagcctttccttagagagtttagagcctaattccggtgcaaagcccgcgaacagcgctgcggaaaacggatttcaagagcacgaagtctag

SEQ ID NO: 118218 - DNA, 1362 bp, Artificial Sequence
  derived and/or modified sequence
atggccagccccagcctgcccggcagtgactgcagccagatcatcgaccacagccacgtgcctgagtttgaggtggccacctggatcaagatcaccctcatcctggtgtacctgatcatctttgtgatgggcctgctgggcaacagcgccaccatccgggtgacccaggtgctgcagaagaagggctacctgcagaaggaggtgacagaccacatggtgtccctggcctgcagcgacatcctggtgttcctgattggcatgcccatggagttctacagcatcatctggaaccccctgaccaccagcagctacaccctgagctgcaagctgcacaccttcctgtttgaggcctgcagctatgccaccctgctgcacgtgctgaccctgagctttgagcgctacatcgccatctgccaccccttccgctacaaggctgtgtctggcccctgccaggtgaagctgctgattggatttgtgtgggtgaccagcgccctggtggccctgcccctgctgtttgccatgggcacagagtaccccctggtgaatgtgcccagccaccggggcctgacctgcaacagaagcagcaccaggcaccacgagcagcctgagaccagcaacatgagcatctgcaccaacctgagcagccgctggacagtgttccagagcagcatctttggagcctttgtggtgtacctggtggtgctgctgtctgtggccttcatgtgctggaacatgatgcaggtgctgatgaagagccagaagggcagcctggccggcggcaccaggcctccccagctgaggaagtctgagagcgaggagagcaggacagcccggcggcagaccatcatcttcctgcggctcatcgtggtgaccctggccgtgtgctggatgcccaaccagatccgccgcatcatggctgctgccaagcccaagcatgactggaccaggagctacttccgggcctacatgatcctgctgcccttcagcgagaccttcttctacctgagcagcgtcatcaaccccctgctgtacacagtgagcagccagcagttccggcgggtgtttgtgcaggtgctgtgctgccgcctgagcctgcagcacgccaaccacgagaagaggctgcgggtgcacgcccacagcaccacagacagcgccaggtttgtgcagaggcccctgctgtttgccagccggcggcagagcagcgccaggagaacagagaagatcttcctgagcaccttccagagcgaggccgagccccagagcaagagccagagcctgagcctggagagcctggagcccaacagcggggccaagccagccaacagcgctgctgaaaatggcttccaggagcacgaggtgtag

SEQ ID NO: 118219 - DNA, 1362 bp, Artificial Sequence
  derived and/or modified sequence
atggccagccccagcctgcccggcagcgactgcagccagatcatcgatcactctcacgttccagagttcgaggtggcaacctggattaagatcaccctaattctggtctacctgatcatcttcgtgatggggttactcggtaactcagcgacgattcgggtgacccaggtgctgcagaagaaggggtacttgcaaaaggaggtcacagaccacatggtgtccttggcttgttccgatatactcgtgttcctcatcggtatgcctatggagttttatagtatcatctggaatccactgacaaccagttcctacaccctgagctgtaaacttcatacgtttctgttcgaagcctgctcttatgccactcttttacatgttctcaccttatctttcgagaggtacatcgcaatttgccacccatttagatacaaggcggtgtctggaccttgtcaggtgaaactgttgatcggattcgtctgggtgacttctgcactggtggctctgcctctcctgtttgctatgggtactgagtacccgctggttaatgtgccatcacatcgcggtttaacctgtaaccggagttcaacaagacaccacgagcagcctgagacttctaacatgagcatatgcaccaacctatcatcccggtggactgtgttccaaagctccatcttcggtgctttcgttgtctacctagtcgtgttgctctcagtggccttcatgtgctggaacatgatgcaggtactgatgaagtctcagaaaggttccctggctggcggtacccgccctccacaactgcggaagagcgagtctgaggagtccaggaccgctcgtaggcagaccattattttcctgagattgatcgtggtgacattggccgtgtgctggatgcctaaccagatcagaagaattatggctgctgcaaagccaaagcacgattggactaggagctatttccgcgcgtacatgatcttactcccatttagtgagacgttcttttacctaagctcagtgattaaccctcttctctacaccgttagcagccagcagttcaggcgggtattcgtccaggtgctgtgctgccgactgtctctccaacacgcaaaccacgagaagcgcctgcgcgtgcatgcacattccaccacagacagcgcccggtttgtgcaaagaccattattatttgccagcagacggcagagctctgcgcgacgcacggaaaagatctttctatccaccttccagtccgaagccgagccacagtcaaagtcacagagcctctcactggaatcccttgaacccaattccggcgctaagcctgccaactccgccgccgagaacggctttcaggaacacgaggtatag

SEQ ID NO: 118220 - DNA, 1362 bp, Artificial Sequence
  derived and/or modified sequence
atggctagcccatccctgcccggttcagattgttctcagataatcgaccattcccacgttccggaatttgaagtagccacgtggatcaaaatcactctgattctggtgtacctcataatcttcgtaatgggtcttttaggcaacagcgctacaattcgcgttacacaggttctacagaagaaggggtacctgcagaaggaggtcactgaccacatggtgtctttggcttgtagcgacatcctggtgtttcttattggtatgccaatggagttttactctatcatctggaatcccctaacgaccagctcttatacactttcttgtaagttacacacattcctgttcgaggcctgttcatatgcaacactccttcacgtcttgacactcagttttgagcgatacatcgccatttgccacccgtttcgatataaagctgtctccgggccttgtcaggtcaaacttctgatcgggttcgtgtgggttacgtctgcactggtcgcattaccccttctatttgctatggggaccgagtatccccttgtgaatgtgccttcacacagaggcttaacgtgcaacaggagcagtactaggcaccacgaacagcccgagaccagtaatatgagtatctgtactaatttgagctccagatggacagtgttccaatcttccatttttggagctttcgttgtctatctggttgtgctgttgtctgtggccttcatgtgttggaatatgatgcaggtgctgatgaagagccagaaaggcagcctcgccggaggaacgcgtcctcctcagctgaggaaatcagaatctgaagagtcccggaccgccaggaggcaaacaatcatcttcctgcggttgatcgtggtaactctggcggtttgttggatgcccaatcagattaggcggattatggccgcagcaaaaccgaagcacgactggacaaggtcgtattttcgggcttatatgatcctcctgcctttcagtgagacctttttctacctgtcctccgtgattaatcccctgctgtatactgtgagcagtcagcagttcagacgagtattcgtacaggtactttgttgtaggctgtcccttcagcacgctaaccatgagaaaaggctccgggtccatgcccatagtacaactgactctgctcgcttcgtacagcgacccctcttgtttgccagccgccgtcagagtagcgccagacggacagagaagattttcttaagtacttttcagagcgaggccgaacctcaaagtaaatcccagtcactcagtctggagagtttagaacctaactcaggggctaagcctgcgaattccgccgcagaaaatgggtttcaggaacatgaggtgtag

SEQ ID NO: 118221 - DNA, 1362 bp, Artificial Sequence
  derived and/or modified sequence
atggccagccccagcctgcccggcagcgactgcagccagatcatcgaccacagccacgtgcccgagttcgaggtggccacctggatcaagatcaccctgatcctggtgtacctgatcatcttcgtgatgggcctgctgggcaacagcgccaccatcagagtgacccaggtgctgcagaagaagggctacctgcagaaggaggtgaccgaccacatggtgagcctggcctgcagcgacatcctggtgttcctgatcggcatgcccatggagttctacagcatcatctggaaccccctgaccaccagcagctacaccctgagctgcaagctgcacaccttcctgttcgaggcctgcagctacgccaccctgctgcacgtgctgaccctgagcttcgagagatacatcgccatctgccaccccttcagatacaaggccgtgagcggcccctgccaggtgaagctgctgatcggcttcgtgtgggtgaccagcgccctggtggccctgcccctgctgttcgccatgggcaccgagtaccccctggtgaacgtgcccagccacagaggcctgacctgcaacagaagcagcaccagacaccacgagcagcccgagaccagcaacatgagcatctgcaccaacctgagcagcagatggaccgtgttccagagcagcatcttcggcgccttcgtggtgtacctggtggtgctgctgagcgtggccttcatgtgctggaacatgatgcaggtgctgatgaagagccagaagggcagcctggccggcggcaccagacccccccagctgagaaagagcgagagcgaggagagcagaaccgccagaagacagaccatcatcttcctgagactgatcgtggtgaccctggccgtgtgctggatgcccaaccagatcagaagaatcatggccgccgccaagcccaagcacgactggaccagaagctacttcagagcctacatgatcctgctgcccttcagcgagaccttcttctacctgagcagcgtgatcaaccccctgctgtacaccgtgagcagccagcagttcagaagagtgttcgtgcaggtgctgtgctgcagactgagcctgcagcacgccaaccacgagaagagactgagagtgcacgcccacagcaccaccgacagcgccagattcgtgcagagacccctgctgttcgccagcagaagacagagcagcgccagaagaaccgagaagatcttcctgagcaccttccagagcgaggccgagccccagagcaagagccagagcctgagcctggagagcctggagcccaacagcggcgccaagcccgccaacagcgccgccgagaacggcttccaggagcacgaggtgtag

SEQ ID NO: 118222 - protein, 221 aa, Artificial Sequence
  derived and/or modified sequence
MTTQLRVVHLLPLLLACFVQTSPKQEKMKMDCHKDEKGTIYDYEAIALNKNEYVSFKQYVGKHILFVNVATYCGLTAQYPELNALQEELKPYGLVVLGFPCNQFGKQEPGDNKEILPGLKYVRPGGGFVPSFQLFEKGDVNGEKEQKVFSFLKHSCPHPSEILGTFKSISWDPVKVHDIRWNFEKFLVGPDGIPVMRWSHRATVSSVKTDILAYLKQFKTK

SEQ ID NO: 118223 - DNA, 666 bp, Artificial Sequence
  derived and/or modified sequence
atgaccacccagctgcgggtggtgcacctgctgcccctgctgctggcttgctttgtccagacaagccccaagcaggagaaaatgaagatggattgccataaagacgagaaaggtaccatctatgattacgaggctattgccttaaataaaaatgaatatgtgtccttcaaacagtacgtcggaaagcacatcctgtttgtgaatgtggccacctactgcggtctcactgcacaatacccagagttgaatgctctgcaggaagagctgaaaccctacggtctcgtcgttctgggcttcccttgcaatcagtttggcaaacaggaaccaggagataataaagagattctaccaggcctcaaatacgtgcgcccaggcggtggctttgtcccatcgtttcaactgttcgaaaaaggagatgtaaacggtgagaaagaacaaaaagtgttcagttttctgaagcattcatgcccacacccctctgaaattttaggtaccttcaagtcgatctcttgggacccagtgaaggtacacgatatccgatggaacttcgagaagttccttgtcgggcctgatggtatccccgtgatgcgatggagccatagagctaccgtgagttcagtgaaaaccgacatcctggcctatcttaagcaattcaagaccaaatag

SEQ ID NO: 118224 - DNA, 666 bp, Artificial Sequence
  derived and/or modified sequence
atgaccacacaacttcgtgtggtccacctgctccccttgctgctggcctgcttcgtccagacatctcccaaacaggagaaaatgaagatggattgtcacaaagatgaaaaaggcaccatctacgactatgaggctattgcactcaataaaaacgagtacgttagctttaaacagtacgttggcaaacacatcctattcgtgaacgtggccacctactgcggtctaacagcgcagtaccctgaactcaacgctctacaggaggaactaaagccttatggcttggtggtactcgggtttccgtgcaatcagtttggcaagcaggaaccaggggataacaaggagattttacctggccttaagtacgttcgcccaggcggaggcttcgtccccagtttccagctgttcgagaagggggacgtcaacggggagaaagagcaaaaggtgttcagcttcctgaagcatagttgtccacacccttccgaaatcctgggaactttcaagtccatatcctgggaccctgtgaaagtacacgacataagatggaactttgagaagtttctggtcgggcctgatggcattccagtgatgcggtggtctcaccgcgctacagtctcgtccgtgaagaccgacatcctcgcatatttaaagcagtttaaaactaagtag

SEQ ID NO: 118225 - DNA, 666 bp, Artificial Sequence
  derived and/or modified sequence
atgaccacgcagctgagagttgtccatctcttgccgctgctgctcgcctgctttgtgcagacctctcctaagcaggaaaagatgaagatggactgccacaaggacgagaaaggcacaatctacgactatgaagcaattgcgctgaataagaacgagtatgtgagcttcaaacaatatgtcgggaagcatatcctgttcgtcaacgtggcgacttattgcggcctgaccgcacaatacccggaattgaatgccttgcaggaggagctgaagccctacggactcgtcgtacttggatttccctgtaatcagttcggcaagcaagaacctggggataacaaagagatcctgccaggcctcaaatatgttcgcccaggggggggatttgtaccgtcattccaactctttgaaaagggtgatgtaaatggtgagaaagaacagaaagtgttcagttttctgaaacactcatgccctcacccaagcgagatccttggtacgtttaagagtatctcttgggatccagtgaaggttcatgacatacggtggaactttgaaaaatttttagtaggacccgatggaatccctgtaatgcgctggtctcatagagcgaccgtcagtagcgtaaaaactgacattctggcctacttaaagcaattcaaaacaaaatag

SEQ ID NO: 118226 - DNA, 666 bp, Artificial Sequence
  derived and/or modified sequence
atgaccacacagttacgtgtcgtgcatttgttgcctctcctcttagcatgtttcgtgcagacatccccaaaacaagagaaaatgaagatggattgtcacaaagacgaaaaaggtaccatttatgattatgaagcaatagctctgaacaaaaacgaatatgtgtcatttaaacaatatgtgggtaagcacattttgttcgtgaacgtggcaacatactgcggactgacagcacaataccccgaactgaacgctctccaggaagagctgaaaccttacggcctggtagtcctcggctttccttgtaaccagtttggcaagcaggaacctggcgataacaaagagatactgcccggccttaagtacgttagacccggcggcggattcgtgccgtcattccagctcttcgagaaaggtgacgtcaatggagaaaaggaacagaaggttttcagctttttgaagcattcctgcccacacccctcggagattctgggaacatttaagtcgatttcctgggacccagtaaaagtgcacgatattagatggaattttgaaaagtttttagtaggccccgatggcatcccggtcatgcgatggagtcacagagcaactgtgtcgagcgttaaaacagatatcctggcctacctaaagcaattcaagactaagtag

SEQ ID NO: 118227 - DNA, 1452 bp, Artificial Sequence
  derived and/or modified sequence
tcatgactacacagttaagggtcgtccatctgcttccccttctcctagcctgctttgtgcaaacaagtcccaagcaggagaagatgaagatggattgccacaaagacgagaaaggcaccatctatgactatgaggccatcgcacttaataagaatgaatatgtttccttcaagcagtatgtgggcaagcacatcctcttcgtcaacgtggccacctactgtggtctgacagcgcaatatcctgaactaaatgcactccaggaggagctgaagccctatggtctagttgtgttgggctttccctgcaaccaatttggaaagcaagaaccaggagataacaaagagattcttcctgggctcaagtatgtccgtccagggggaggatttgtacctagtttccagctttttgagaaaggggatgtgaatggtgaaaaagaacagaaagtcttcagtttcttgaagcactcctgtcctcatccctctgagattttgggcacattcaaatctatatcctgggaccctgtaaaggtccatgacatccgttggaactttgaaaagttcctggtggggcctgatggaatccctgtcatgcgctggtcccaccgggctacggtcagctcagtcaagacagacatcctggcgtacttgaagcaattcaaaaccaaataggaaggtggagttaagggcaggagcaaccctacttctcacctaatgacttgctctccccacccctccaaaaaaaaggaatacccatcttctcaccacactctcttcctgcatgggctccacctgagtaaatcaccgccacatactgccagaattcccactctccacaaactagatttatatttggaaggctactgctcttttgcctctcaagagtatgtgggtgaagactgaaacaaatggaaacctaaaatccccagacctctgttacaggttgaatcattcatatccaccagagggaaatcatccttccacgacaatggttcagtcggccatcacatcctgaagaacattcctagacattctgactcttccatctctctctaccctggaggtgtagaaatagcaatggggtcacagtcacacaatttaggttccacttcataacattttttgtctcctaggacaaacgtgtatcatcagtttccaactgttttggctcagttttcatccatgacacctccccctaccagccattctcctgtgggagcaagaacattgcttcaaaagaagagagggcatctccatgcttgtgggacccaaaacctatctctggccctacaaaagttttcctaattgtctgatctttagtgcattcaggttatggcacctggagaggaatgccctttatcttttgaaggatgggatttcccatctcaaccctggattcctcaccttcagaacgagccctgccactgtctccaataaaatgttttctgcagcatcg

SEQ ID NO: 118228 - DNA, 1334 bp, Artificial Sequence
  derived and/or modified sequence
tcatgactacacagttaagggtcgtccatctgcttccccttctcctagcctgctttgtgcaaacaagtcccaagcaggagaagatgaagatggattgccacaaagacgagaaaggcaccatctatgactatgaggccatcgcacttaataagaatgaatatgtttccttcaagcagtatgtgggcaagcacatcctcttcgtcaacgtggccacctactgtggtctgacagcgcaatatcctggtatgtccgtccagggggaggatttgtacctagtttccagctttttgagaaaggggatgtgaatggtgaaaaagaacagaaagtcttcagtttcttgaagcactcctgtcctcatccctctgagattttgggcacattcaaatctatatcctgggaccctgtaaaggtccatgacatccgttggaactttgaaaagttcctggtggggcctgatggaatccctgtcatgcgctggtcccaccgggctacggtcagctcagtcaagacagacatcctggcgtacttgaagcaattcaaaaccaaataggaaggtggagttaagggcaggagcaaccctacttctcacctaatgacttgctctccccacccctccaaaaaaaaggaatacccatcttctcaccacactctcttcctgcatgggctccacctgagtaaatcaccgccacatactgccagaattcccactctccacaaactagatttatatttggaaggctactgctcttttgcctctcaagagtatgtgggtgaagactgaaacaaatggaaacctaaaatccccagacctctgttacaggttgaatcattcatatccaccagagggaaatcatccttccacgacaatggttcagtcggccatcacatcctgaagaacattcctagacattctgactcttccatctctctctaccctggaggtgtagaaatagcaatggggtcacagtcacacaatttaggttccacttcataacattttttgtctcctaggacaaacgtgtatcatcagtttccaactgttttggctcagttttcatccatgacacctccccctaccagccattctcctgtgggagcaagaacattgcttcaaaagaagagagggcatctccatgcttgtgggacccaaaacctatctctggccctacaaaagttttcctaattgtctgatctttagtgcattcaggttatggcacctggagaggaatgccctttatcttttgaaggatgggatttcccatctcaaccctggattcctcaccttcagaacgagccctgccactgtctccaataaaatgttttctgcagcatcg

SEQ ID NO: 118229 - DNA, 666 bp, Artificial Sequence
  derived and/or modified sequence
atgaccacccagctgagagtggtgcacctgctgcccctgctgctggcctgcttcgtgcagaccagccccaagcaggagaagatgaagatggactgccacaaggacgagaagggcaccatctacgactacgaggccatcgccctgaacaagaacgagtacgtgagcttcaagcagtacgtgggcaagcacatcctgttcgtgaacgtggccacctactgcggcctgaccgcccagtaccccgagctgaacgccctgcaggaggagctgaagccctacggcctggtggtgctgggcttcccctgcaaccagttcggcaagcaggagcccggcgacaacaaggagatcctgcccggcctgaagtacgtgagacccggcggcggcttcgtgcccagcttccagctgttcgagaagggcgacgtgaacggcgagaaggagcagaaggtgttcagcttcctgaagcacagctgcccccaccccagcgagatcctgggcaccttcaagagcatcagctgggaccccgtgaaggtgcacgacatcagatggaacttcgagaagttcctggtgggccccgacggcatccccgtgatgagatggagccacagagccaccgtgagcagcgtgaagaccgacatcctggcctacctgaagcagttcaagaccaagtag

SEQ ID NO: 118230 - DNA, 666 bp, Artificial Sequence
  derived and/or modified sequence
atgactacccagctgcgcgtggtccacttactaccactgctcttagcatgtttcgtgcagacatcgcctaaacaggaaaagatgaagatggattgccataaagatgagaagggaaccatctacgactacgaggcaatcgccctaaacaaaaatgagtatgtatctttcaaacagtatgtgggaaaacatatcctgttcgttaacgtcgcaacttactgtggccttaccgcgcagtacccggaactaaacgccctccaggaagaattaaaaccttatggtctggtggtgctcggcttcccttgtaaccagtttggtaaacaggagcctggcgacaataaggaaattctgccaggcctcaagtacgtacgaccgggagggggtttcgtccccagcttccagttgtttgaaaaaggtgatgtgaatggcgagaaggagcagaaggtgttttccttcctcaagcacagctgccctcaccccagcgagatcttggggacctttaagtcaatctcgtgggaccctgtcaaagtgcatgacatccgatggaattttgaaaaattcttggtaggacctgacggaattcctgtcatgcgatggtcacaccgggctacggtgtcttctgtgaagaccgatattcttgcttatcttaaacagttcaagacaaagtag

SEQ ID NO: 118231 - DNA, 666 bp, Artificial Sequence
  derived and/or modified sequence
atgaccacccagctgcgggtggtgcacctgctgcccctgctgctggcctgctttgtgcagaccagccccaagcaggagaagatgaagatggactgccacaaggatgagaagggcaccatctatgactatgaggccatcgccctgaacaagaatgaatatgtgtccttcaagcagtatgtgggcaagcacatcctgtttgtgaatgtggccacctactgcggcctgacagcccagtacccagagctgaatgccctgcaggaggagctgaagccctacggcctggtggtgctgggcttcccctgcaaccagtttgggaagcaggagcccggggacaacaaggagatcctgcccggcctgaagtatgtgcggcctgggggcggctttgtgcccagcttccagctgtttgagaagggagatgtgaatggagagaaggagcagaaggtgttctccttcctgaagcacagctgcccccaccccagcgagatcctgggcaccttcaagagcatctcctgggaccctgtgaaggtgcatgacatccgctggaactttgagaagttcctggtgggcccagatggcatccctgtgatgcgctggagccaccgggccaccgtgtcctctgtgaagacagacatcctggcctacctgaagcagttcaagaccaagtag

SEQ ID NO: 118232 - DNA, 666 bp, Artificial Sequence
  derived and/or modified sequence
atgactacccagttgcgggtggtgcatctcctccctctcctcctggcgtgcttcgttcagacctcacctaagcaggaaaagatgaagatggattgtcataaggacgaaaagggtactatatatgattatgaggctatcgccctgaataaaaatgaatatgtctcttttaagcagtacgtaggtaagcacatcttgttcgtcaatgtcgctacatattgtgggctgaccgcacagtacccagagctcaatgcgttacaggaggagcttaagccatatggccttgtggttctcggctttccgtgtaatcagttcgggaagcaagaacctggagataacaaggaaatcttacccgggctgaaatacgttagacctggcgggggcttcgtgcctagcttccagctgtttgagaaaggcgatgtaaacggagagaaggagcagaaagtcttttcttttctgaaacattcatgcccacatcctagtgaaattcttggtaccttcaaatcaatcagctgggatcctgtgaaggtgcatgacattagatggaacttcgagaaatttttggttggccccgatggcatcccagttatgaggtggtcacaccgtgccaccgtatctagtgtgaagacagatattttggcttacctcaaacagttcaaaactaaatag

SEQ ID NO: 118233 - DNA, 1540 bp, Artificial Sequence
  derived and/or modified sequence
ttgggctaagtccctgccaagataccaaaagactgcagaggtgggcaaagacctcaggcccccagactagcaatctacaaacactagtcatgactacacagttaagggtcgtccatctgcttccccttctcctagcctgctttgtgcaaacaagtcccaagcaggagaagatgaagatggattgccacaaagacgagaaaggcaccatctatgactatgaggccatcgcacttaataagaatgaatatgtttccttcaagcagtatgtgggcaagcacatcctcttcgtcaacgtggccacctactgtggtctgacagcgcaatatcctgaactaaatgcactccaggaggagctgaagccctatggtctagttgtgttgggctttccctgcaaccaatttggaaagcaagaaccaggagataacaaagagattcttcctgggctcaagtatgtccgtccagggggaggatttgtacctagtttccagctttttgagaaaggggatgtgaatggtgaaaaagaacagaaagtcttcagtttcttgaagcactcctgtcctcatccctctgagattttgggcacattcaaatctatatcctgggaccctgtaaaggtccatgacatccgttggaactttgaaaagttcctggtggggcctgatggaatccctgtcatgcgctggtcccaccgggctacggtcagctcagtcaagacagacatcctggcgtacttgaagcaattcaaaaccaaataggaaggtggagttaagggcaggagcaaccctacttctcacctaatgacttgctctccccacccctccaaaaaaaaggaatacccatcttctcaccacactctcttcctgcatgggctccacctgagtaaatcaccgccacatactgccagaattcccactctccacaaactagatttatatttggaaggctactgctcttttgcctctcaagagtatgtgggtgaagactgaaacaaatggaaacctaaaatccccagacctctgttacaggttgaatcattcatatccaccagagggaaatcatccttccacgacaatggttcagtcggccatcacatcctgaagaacattcctagacattctgactcttccatctctctctaccctggaggtgtagaaatagcaatggggtcacagtcacacaatttaggttccacttcataacattttttgtctcctaggacaaacgtgtatcatcagtttccaactgttttggctcagttttcatccatgacacctccccctaccagccattctcctgtgggagcaagaacattgcttcaaaagaagagagggcatctccatgcttgtgggacccaaaacctatctctggccctacaaaagttttcctaattgtctgatctttagtgcattcaggttatggcacctggagaggaatgccctttatcttttgaaggatgggatttcccatctcaaccctggattcctcaccttcagaacgagccctgccactgtctccaataaaatgttttctgcagcatcga

SEQ ID NO: 118234 - DNA, 428 bp, Artificial Sequence
  derived and/or modified sequence
tcatgactacacagttaagggtcgtccatctgcttccccttctcctagcctgctttgtgcaaacaagtcccaagcaggagaagatgaagatggattgccacaaagacgagaaaggcaccatctatgactatgaggccatcgcacttaataagaatgaatatgtttccttcaagcagtatgtgggcaagcacatcctcttcgtcaacgtggccacctactgtggtctgacagcgcaatatcctggtatgtccgtccagggggaggatttgtacctagtttccagctttttgagaaaggggatgtgaatggtgaaaaagaacagaaagtcttcagtttcttgaagcactcctgtcctcatccctctgagattttgggcacattcaaatctatatcctgggaccctgtaaaggtccatgacatccgttgga

SEQ ID NO: 118235 - DNA, 666 bp, Artificial Sequence
  derived and/or modified sequence
atgaccacccagctgcgggtggtgcacctgctgcccctgctgctggcctgcttcgtgcagactagtccaaaacaagagaaaatgaaaatggactgccacaaggacgagaaggggacaatctatgattatgaagctattgctcttaacaaaaacgagtacgtgagctttaagcagtacgtcggcaaacatatactgtttgtgaatgtggctacatactgcggactcaccgctcaatatcccgagctgaacgcattacaggaagaactgaagccttatgggctggtcgtgctggggttcccatgcaaccagttcgggaagcaggaacctggcgacaataaggagatcctccccggtctgaaatacgtgagaccgggaggaggtttcgtgcctagcttccaactttttgagaagggcgacgtgaacggcgagaaggagcagaaggtgtttagctttttaaagcacagctgcccacacccctccgagatactcgggacctttaaaagcatttcctgggatccggtgaaagtccacgacatcaggtggaacttcgagaaattcctcgtggggccagatggtatccctgtgatgagatggtctcaccgggccacggtctcatccgtcaagaccgatatcctagcttatcttaagcagttcaaaacgaagtag

SEQ ID NO: 118236 - DNA, 666 bp, Artificial Sequence
  derived and/or modified sequence
atgacgacgcagctaagagtggtccacttgcttcccctgctcctggcgtgcttcgtgcagacatctcccaaacaggagaaaatgaagatggattgtcataaggacgagaagggtaccatatacgactatgaggcgatcgctctgaataaaaatgagtatgtctcctttaaacagtacgtgggcaagcacattctcttcgtgaacgtggctacctactgcggtctaactgcacagtaccccgaacttaacgccctacaggaggaactcaagccttatggccttgtcgtgttaggtttcccttgcaaccagttcgggaagcaggaaccgggtgataacaaagagattctcccaggcctgaagtatgtaaggccgggtggagggtttgtacccagttttcagctcttcgaaaagggcgatgtgaatggcgagaaggaacagaaagtgttctctttcctgaaacactcttgcccccatccgtctgaaattctggggacctttaaatctatctcttgggatccagttaaggtgcatgatattcgttggaatttcgagaaattcctagtgggtccagatggcatcccagttatgcgatggtcccacagggctacagtaagcagcgttaaaacagacattctggcgtacctgaagcagttcaagaccaaatag

SEQ ID NO: 118237 - RNA, 666 nt, Artificial Sequence
  derived and/or modified sequence
augaccacgcagcugagaguuguccaucucuugccgcugcugcucgccugcuuugugcagaccucuccuaagcaggaaaagaugaagauggacugccacaaggacgagaaaggcacaaucuacgacuaugaagcaauugcgcugaauaagaacgaguaugugagcuucaaacaauaugucgggaagcauauccuguucgucaacguggcgacuuauugcggccugaccgcacaauacccggaauugaaugccuugcaggaggagcugaagcccuacggacucgucguacuuggauuucccuguaaucaguucggcaagcaagaaccuggggauaacaaagagauccugccaggccucaaauauguucgcccaggggggggauuuguaccgucauuccaacucuuugaaaagggugauguaaauggugagaaagaacagaaaguguucaguuuucugaaacacucaugcccucacccaagcgagauccuugguacguuuaagaguaucucuugggauccagugaagguucaugacauacgguggaacuuugaaaaauuuuuaguaggacccgauggaaucccuguaaugcgcuggucucauagagcgaccgucaguagcguaaaaacugacauucuggccuacuuaaagcaauucaaaacaaaauag

SEQ ID NO: 118238 - RNA, 666 nt, Artificial Sequence
  derived and/or modified sequence
augaccacacaguuacgugucgugcauuuguugccucuccucuuagcauguuucgugcagacauccccaaaacaagagaaaaugaagauggauugucacaaagacgaaaaagguaccauuuaugauuaugaagcaauagcucugaacaaaaacgaauaugugucauuuaaacaauauguggguaagcacauuuuguucgugaacguggcaacauacugcggacugacagcacaauaccccgaacugaacgcucuccaggaagagcugaaaccuuacggccugguaguccucggcuuuccuuguaaccaguuuggcaagcaggaaccuggcgauaacaaagagauacugcccggccuuaaguacguuagacccggcggcggauucgugccgucauuccagcucuucgagaaaggugacgucaauggagaaaaggaacagaagguuuucagcuuuuugaagcauuccugcccacaccccucggagauucugggaacauuuaagucgauuuccugggacccaguaaaagugcacgauauuagauggaauuuugaaaaguuuuuaguaggccccgauggcaucccggucaugcgauggagucacagagcaacugugucgagcguuaaaacagauauccuggccuaccuaaagcaauucaagacuaaguag

SEQ ID NO: 118239 - protein, 1007 aa, Artificial Sequence
  derived and/or modified sequence
MEVFPFLLVLSVWWSRTWDSANADSIIHIGAIFDESAKKDDEVFRTAVGDLNQNEEILQTEKITFSVTFVDGNNPFQAVQEACELMNQGILALVSSIGCTSAGSLQSLADAMHIPHLFIQRSTAGTPRSGCGLTRSNRNDDYTLSVRPPVYLHDVILRVVTEYAWQKFIIFYDSEYDIRGIQEFLDKVSQQGMDVALQKVENNINKMITTLFDTMRIEELNRYRDTLRRAILVMNPATAKSFITEVVETNLVAFDCHWIIINEEINDVDVQELVRRSIGRLTIIRQTFPVPQNISQRCFRGNHRISSTLCDPKDPFAQNMEISNLYIYDTVLLLANAFHKKLEDRKWHSMASLSCIRKNSKPWQGGRSMLETIKKGGVSGLTGELEFGENGGNPNVHFEILGTNYGEELGRGVRKLGCWNPVTGLNGSLTDKKLENNMRGVVLRVVTVLEEPFVMVSENVLGKPKKYQGFSIDVLDALSNYLGFNYEIYVAPDHKYGSPQEDGTWNGLVGELVFKRADIGISALTITPDRENVVDFTTRYMDYSVGVLLRRAEKTVDMFACLAPFDLSLWACIAGTVLLVGLLVYLLNWLNPPRLQMGSMTSTTLYNSMWFVYGSFVQQGGEVPYTTLATRMMMGAWWLFALIVISSYTANLAAFLTITRIESSIQSLQDLSKQTEIPYGTVLDSAVYEHVRMKGLNPFERDSMYSQMWRMINRSNGSENNVLESQAGIQKVKYGNYAFVWDAAVLEYVAINDPDCSFYTIGNTVADRGYGIALQHGSPYRDVFSQRILELQQNGDMDILKHKWWPKNGQCDLYSSVDTKQKGGALDIKSFAGVFCILAAGIVLSCFIAMLETWWNKRKGSRVPSKEDDKEIDLEHLHRRVNSLCTDDDSPHKQFSTSSIDLTPLDIDTLPTRQALEQISDFRNTHITTTTFIPEQIQTLSRTLSAKAASGFTFGNVPEHRTGPFRHRAPNGGFFRSPIKTMSSIPYQPTPTLGLNLGNDPDRGTSI

SEQ ID NO: 118240 - DNA, 3024 bp, Artificial Sequence
  derived and/or modified sequence
atggaggttttcccttttcttctcgtcttatcagtctggtggtcacggacctgggactctgccaacgccgactcaataatccacattggagccatcttcgacgagagtgcaaagaaggacgacgaagtatttcgcacagccgtgggcgaccttaaccagaacgaggaaatattgcaaaccgagaagattacattctcagtgactttcgtggacggcaacaatccattccaagctgtacaagaggcatgtgagttgatgaaccaagggatactggcgctcgtgagtagcataggatgtactagtgcggggagcctgcaaagcctggcagatgccatgcatataccccacctgtttattcagaggagcaccgccgggacccccagatctggatgcggattgacgaggagtaacagaaatgatgactatactttgtctgttaggccgcctgtttacctgcacgatgtaatactgcgtgtggtgacagaatatgcgtggcagaaatttatcatcttttacgatagcgagtatgatattcggggtatccaggagtttctggataaagtgagccagcagggaatggacgttgcgctgcagaaggtggaaaacaacattaataaaatgattactactttgtttgataccatgcgaatcgaggagcttaacaggtatcgggacacacttcggcgagcgatcctcgttatgaaccccgcaaccgccaaatcatttataactgaggtagtcgagacaaacttagtcgcctttgactgccattggatcataattaacgaggaaatcaacgatgttgacgtacaggagttggtccggcgctccattgggaggctcacgatcatcaggcagacatttccagttccgcagaacatttcccagcgatgctttcgcggtaatcacagaatttcttcaactctttgtgatccaaaggatccatttgctcagaatatggagatttctaacctctacatctacgataccgttctcctgttggctaatgcttttcacaagaaactcgaggacagaaagtggcactcaatggcttctctgtcatgtataagaaaaaatagtaaaccatggcaaggaggacggtccatgctggagactatcaaaaaaggaggtgtttcaggtctgacgggagaattagaattcggagagaacggcggcaaccctaatgtgcatttcgaaatcctcggcacaaattacggcgaggagctcgggagaggcgtgcgcaaactggggtgctggaacccggtaactggcttgaacggatctttgacagataagaagcttgagaacaacatgcggggggtagtgctgagagttgtgaccgtgctcgaggaaccttttgtgatggtcagcgaaaatgtgctgggtaagccaaaaaagtatcagggatttagcatcgacgtgctggacgcactgtcgaattacctcggctttaactacgagatttatgtggcccctgatcacaaatacggtagtcctcaagaagacgggacctggaacgggctagtcggagagttggtctttaagagagctgatattggcattagcgctttaacaattacacctgatagagaaaacgtggtggacttcaccactcgttacatggattactcagttggggtcttgctgcgacgggctgagaaaacagtggatatgtttgcctgtttggcaccgtttgatctgtcactctgggcatgtatcgccggaacggtcctcctggtaggactcctggtgtacctcttaaactggctcaatcctcctcggctccagatgggttccatgacttctaccacgctatacaattccatgtggtttgtctacggaagtttcgtgcagcagggtggcgaggtaccctacaccacactggcgaccagaatgatgatgggagcctggtggttgttcgctctcatagtcatctcttcatatacggctaatcttgctgccttcttgacaatcacgcggatcgagtccagcattcaatcgcttcaggacctgtctaaacagaccgagattccctatggtacagtgctggactccgccgtctacgaacatgtgcggatgaagggcctgaacccctttgagcgggacagcatgtatagccagatgtggagaatgattaatagatccaatgggtctgaaaataacgtgcttgagtcccaggctggaatccagaaagtcaaatacggcaattacgcatttgtttgggacgcagctgtcctcgaatacgtggctatcaacgaccctgattgctccttctacaccatcggcaataccgtggcagaccgaggctatgggatcgccctgcagcacggatccccctatcgggacgtgttttctcagaggattctggagttgcagcagaatggcgatatggacatcctgaagcacaagtggtggccaaaaaatggccagtgtgatctgtattcctcagtggacactaagcagaagggtggggctcttgacatcaagtcttttgctggtgtcttctgtatcctggccgctggaatagtcctgtcttgttttatcgctatgctcgaaacttggtggaacaagcgaaagggatccagggtgccaagcaaagaagatgataaggagatcgaccttgagcacttgcatcgccgcgtgaattccctgtgcactgacgacgattcaccccataagcagttttctactagtagcattgacttgacacctctggacattgataccctgcctacccggcaagctctggagcagatctcggattttcgcaacacccatatcaccaccaccaccttcattccggagcaaatccagacattgtcccggacgttgagcgcaaaggccgcaagtgggtttacttttggcaatgtaccggagcaccggaccggaccctttagacaccgggccccgaacggaggattcttccggtctccaatcaaaactatgtcatcaatcccataccagccaacacccacactcgggctcaacctcggaaacgatcctgatcgcggcacatccatctag

SEQ ID NO: 118241 - DNA, 5340 bp, Artificial Sequence
  derived and/or modified sequence
tgcaaacaactctggcgatgccaaaattcccctccaagtgacacggctttgcgaaggaggtttcctcaggctgggctctttctgtcattcccttctgcctttctcggcgacgataaaaggctttgctctggcaataggaatttagaaaaaaagaaaaagctgcgctaaactccaccgtgacctcaaactctttggactgtttgaaaaaaaaaaaattggaagaaaatccatcctccaagagaatcggcataggaggagatggaagttttcccctttctcttggttttgtccgtctggtggtctcgaacctgggactcggcgaatgcggattcgatcattcacatcggagcaatttttgatgaatctgccaaaaaggatgatgaggtatttcgcactgcggttggtgaccttaaccagaatgaggagatcttacagactgagaaaatcacattttcagtgacgtttgttgatggcaacaaccctttccaagcagttcaagaagcctgtgaacttatgaatcaaggcatcttggccctggtcagctccattggctgcacgtcagcaggatccctccagtctttggcagacgccatgcatatcccccacctcttcattcagcgctcaacagctgggaccccaaggagtggctgtggactcacccggagcaacaggaatgatgactacactctctcagttcgcccacctgtctacttgcatgatgttatcctaagagtggtcacagagtatgcctggcagaaattcattatattctatgatagtgaatacgatatccgtggaatacaggagttcttggacaaagtctctcagcagggaatggatgttgcacttcagaaggtagaaaacaacatcaataaaatgattaccactctctttgacaccatgagaatagaagaactgaatcgctatcgagacactcttaggcgagcgatccttgttatgaatcctgctacagccaaatccttcattactgaggttgtggagactaatttggttgcttttgactgtcactggatcattataaatgaggaaataaacgatgtggacgtacaggaacttgtaagaaggtcaattggaaggttaacgattattcggcagacatttccagttccccagaacataagtcagcggtgtttccgtggcaaccatcgaatatcttcaacattgtgtgatccaaaggatccatttgctcagaatatggagatttccaacctttacatatatgacacggtgcttctgcttgctaatgcttttcataagaagctggaggaccgaaagtggcacagcatggcaagtctgtcatgtatcagaaagaactcaaagccctggcagggtgggcgctccatgttggagaccatcaagaagggtggagttagtgggttgactggagagctagaatttggagaaaatggaggcaatcccaatgtccactttgaaatccttggaaccaactatggagaagagcttggcagaggtgttcgaaaacttggttgctggaatcctgtcacaggtctgaatgggtcactgactgacaagaaattggagaataacatgcgtggagtggttctacgtgtagtaactgttctggaagaaccttttgtgatggtctctgaaaatgtcttgggtaagccgaagaaataccagggcttctccattgatgttttggatgccttatctaactacctgggttttaactacgaaatttacgtagcaccggatcacaaatacggaagcccacaagaagatgggacatggaatggcttggtaggagaacttgtctttaagagagccgacatagggatttctgctttaaccatcactccagatcgtgaaaatgtggtggactttacgacacgttacatggactactcagtgggggtactacttcgaagggctgaaaagacagtggatatgtttgcctgtcttgcaccatttgatctctctctatgggcttgcattgctggcacagtccttctggtgggtctactggtctacctcttgaactggcttaatcccccacgattacaaatgggatcaatgacgtctactactctctacaactccatgtggtttgtgtatggatcttttgtacaacaaggcggggaagtcccgtacacgactctggctacccgaatgatgatgggggcttggtggctatttgctttgattgttatctcatcttacacggcaaacctcgctgctttcctcactattacacgcattgaaagttccatccagtctctccaggacctttccaagcaaacagaaatcccttatggcacagtcctagactctgcggtatatgagcatgtccgcatgaaaggactgaatccttttgagagggacagcatgtattcccaaatgtggcggatgatcaaccgaagcaatggatcggagaacaatgttctggagtcccaggcaggcattcaaaaggtaaaatatggaaattatgctttcgtatgggatgcagctgtattggaatatgtggctatcaatgacccagattgttccttttacaccattggaaatactgttgctgatcggggatatggaattgcattacaacatggcagtccttaccgagatgttttttcacaaaggatcctggagcttcagcagaatggtgacatggacatcctgaagcacaaatggtggcctaagaatggccagtgtgacctgtactcgtcagtggacacaaagcagaaaggaggcgccctggacataaagagctttgcaggggtcttttgtatcctggctgctggaattgtcctctcctgcttcatagccatgctggagacgtggtggaacaagaggaaaggctcccgggttccatcaaaagaggatgacaaggaaattgacctggagcacctccatagacgtgtaaatagcttgtgcacagatgacgacagcccccataaacagttttccacctcgtcaattgatttgacccctctggacattgacactttgccaacacgacaagcactggagcaaatcagtgatttcaggaacactcatattaccacaacaacctttatcccagagcagatccagactcttagccgcacactgtcagctaaagctgcttctggtttcacttttggcaacgtgcctgagcaccgaactggcccttttaggcacagggcacctaatgggggctttttcaggagtcctataaaaacaatgtcatctattccttatcaaccaactcctaccctggggctcaatctgggtaatgatccagaccgaggcacctccatatgagcatcaaacaaatctcttcactgtttcttttttaggactccctttgcaaggagcaactgtaatattgtgggactaacatggatgtaacgtttaaaaaaaagatcaggattattagtaacaattctagttttttcctcccaccttctccctctcctctctcctctatgattttctctctttccccctcccttcctgtacattttcctccactttttttcattactcaacttgttccccaagaaggtagtgtactaggatcctattagtctgcttttcatatactgtacatcaagtataggaaatgtgcactgagtatactaaaagtatatgcaggattaattttacataaaggcctcttctgtaacatttctctattttttgaaatacaattgcaataacttcagtctttttacattcttctgctgcatccatacaatgctccactgctgttgagtgtcctttaactgtggaccaaaggcaacccctgcagtgtttataaaacaattttaagaccattcaggccacataagatgagaatgcaattttgtaggattacaaaaaagccattaatatgccagtcaagactacagttaaaactactcttgcactgcaacagtgcatatgacctttatgtgattgtacagtattaaaagttttttcttatgtacagtaaactttatcatatggcagaagcctctattgtgttaaataaattagtatttcatatatatacatatatatgcacctatataatgtgtatatatataaaaaggcagccattgctattgcaattcatttaataaagctttagtttaaacaaaagtattgtatacaggaactatgtatagtgcaggggttcttttcagttagaaaaggcaggttgctttaatgttattctgactcgcattgtttgccaacagaaaatattttatacttttgttattaaagcatccagggcaatttaatatttgttcctagatgtaactcatttgaataggttttgcatttgttattcagcagtgtataaagctaaccttgataattttacttttaattaattatctaaatgaaaaatgctattagctgaaccacatccacaacagcacatagagctctagaagagttgaaacatagatcattgaaggttaaaaatcctcttccaaagcagcaagtcaatcaatacaataatgatatttggggaggggtgggagcccttaagaactattgatgtggccttaaattactgtcatttattatcctaaagaagaaaacataataaccataatgggctctcaactcaactcccttttttatttagttctatttggaggagttatgtattttttacattagtgccaagtatatagaaggatgacagcaaaaacagtgcctctttgtgcacaatccttttaaagtagcattcttacttgttagaaatgtagaatgaactttgtttgtaatccttaaattaaaatgtggtaagtaggaagcaagaacttattctgtgtttttacgcagccatacacttactttaatctaactcattctgtggctaggattgatataggaatcaacctatgtgatttgctttaggagaaattaaaaggtatattcttaagatatattatattttgatgctaattctgttctggggagcatcttgtattgtcactgttttgtactaaatcttcaaatattgtctactgtgtaaggcagaaaaatttcttatcatgcaaaaaccattttgtttccagggtaacaagtaactaagtgcatgcacaacttgttttcccttgtaacattcatgatctcatttacaactctgattttaaaacaaaaaaatctttacaacaagctatatagggacataccagatgttgcagtgattttagctatcaacaaactgttaaccatgtacaatatttaaaataggcttattttgatgtatcgcctattatacaaacacacaaaacatttttggaggcctcagttatgagtgacagagctttctgtgtataatttgtctaaataatttgtctaataaaaatgttttctaaa

SEQ ID NO: 118242 - DNA, 3024 bp, Artificial Sequence
  derived and/or modified sequence
atggaggtgttccccttcctgctggtgctgtctgtgtggtggagcaggacctgggacagcgccaatgctgacagcatcatccacatcggggccatctttgatgagagcgccaagaaggatgatgaggtgttcagaacagctgtgggggacctgaaccagaatgaggagatcctgcagacagagaagatcaccttctctgtgacctttgtggatggcaacaaccccttccaggccgtgcaggaggcctgtgagctgatgaaccagggcatcctggccctggtgagcagcatcggctgcaccagcgctggcagcctgcagagcctggctgatgccatgcacatcccccacctgttcatccagaggagcacagctggcacccccaggagcggctgcggcctgaccaggagcaacagaaatgatgactacaccctgtctgtgcggccccctgtgtacctgcatgatgtgatcctgcgggtggtgacagaatatgcctggcagaagttcatcatcttctatgacagtgaatatgacatccggggcatccaggagttcctggacaaggtgtcccagcagggcatggatgtggccctgcagaaggtggagaacaacatcaacaagatgatcaccaccctgtttgacaccatgagaattgaggagctgaaccgctacagagacaccctgcggcgggccatcctggtgatgaacccagccacagccaagagcttcatcacagaggtggtggagaccaacctggtggcctttgactgccactggatcatcatcaatgaggagatcaatgatgtggatgtgcaggagctggtgagaagaagcatcggccgcctgaccatcatccggcagaccttccctgtgccccagaacatcagccagcgctgcttccggggcaaccaccgcatcagcagcaccctgtgtgaccccaaggacccctttgcccagaacatggagatcagcaacctgtacatctatgacacagtgctgctgctggccaatgccttccacaagaagctggaggacaggaagtggcacagcatggccagcctgagctgcatcaggaagaacagcaagccctggcagggcggccgctccatgctggagaccatcaagaagggcggcgtgtctggcctgaccggggagctggagtttggagaaaatggaggcaaccccaacgtgcactttgagatcctgggcaccaactatggagaggagctgggccggggcgtgaggaagctgggctgctggaaccctgtgacaggcctgaatggcagcctgacagacaagaagctggagaacaacatgaggggcgtggtgctgcgggtggtgacagtgctggaggagccctttgtgatggtgtctgaaaatgtgctgggcaagcccaagaagtaccagggcttcagcattgatgtgctggatgccctgagcaactacctgggcttcaactatgagatctacgtggccccagaccacaagtatggcagcccccaggaggatggcacctggaatggcctggtgggggagctggtgttcaagagagctgacatcggcatcagcgccctgaccatcaccccagacagagaaaatgtggtggacttcaccacccgctacatggactacagcgtgggcgtgctgctgcggcgggcagagaagacagtggacatgtttgcctgcctggccccctttgacctgagcctgtgggcctgcatcgccggcaccgtgctgctggtgggcctgctggtgtacctgctgaactggctgaaccccccccggctgcagatgggctccatgaccagcaccaccctgtacaacagcatgtggtttgtgtatggcagctttgtgcagcagggcggggaggtgccctacaccaccctggccaccaggatgatgatgggcgcctggtggctgtttgccctgattgtcatcagcagctacacagccaacctggccgccttcctgaccatcaccagaattgagagcagcatccagagcctgcaggacctgagcaagcagacagagatcccctatggaacagtgctggacagcgctgtgtatgagcacgtgaggatgaagggcctgaacccctttgagcgggacagcatgtacagccagatgtggaggatgatcaacagaagcaatggaagtgaaaataatgtgctggagagccaggccggcatccagaaggtgaagtatggcaactatgcctttgtgtgggatgctgctgtgctggagtatgtggccatcaatgaccctgactgcagcttctacaccatcggcaacacagtggccgaccggggctacggcatcgccctgcagcacggcagcccctacagagatgtgttcagccagaggatcctggagctgcagcagaatggagacatggacatcctgaagcacaagtggtggcccaagaatggccagtgtgacctgtacagctctgtggacaccaagcagaagggcggggccctggacatcaagagctttgctggggtcttctgcatcctggccgccggcatcgtgctgagctgcttcatcgccatgctggagacctggtggaacaagaggaagggcagccgggtgcccagcaaagaagatgacaaggagattgacctggagcacctgcacagaagagtgaacagcctgtgcacagatgatgacagcccccacaagcagttcagcaccagcagcattgacctgacccccctggacatcgacaccctgcccacccggcaggccctggagcagatcagtgacttcaggaacacccacatcaccaccaccaccttcatccctgagcagatccagaccctgagcaggaccctgagcgccaaggccgccagcggcttcacctttggaaatgtgcctgagcacaggacaggccccttccgccaccgggccccaaatggaggcttcttccgcagccccatcaagaccatgagcagcatcccctaccagcccacccccaccctgggcctgaacctgggcaatgaccctgaccggggcaccagcatctag

SEQ ID NO: 118243 - DNA, 3024 bp, Artificial Sequence
  derived and/or modified sequence
atggaggtgttccccttcctgctggtgctgagcgtgtggtggagccggacatgggactcagctaacgccgactctattatccacattggagcaatcttcgacgagagtgccaagaaagatgacgaagtgtttaggacagctgtgggcgatctcaaccagaatgaggaaatactgcagactgaaaaaattacttttagtgtaacctttgttgatggcaacaaccctttccaagcagtgcaagaagcctgcgaactcatgaaccaaggaattcttgcactcgtttccagcattggatgtacgagcgccgggtccctgcagtcgctggccgatgcaatgcatattccgcatctgtttattcaaagaagcacggctgggacccctcggtccggatgcggcctcacccgatccaacagaaatgatgactacactctgtctgtccgaccacctgtttaccttcatgatgtcatcctgcgagttgtgacagaatatgcctggcagaaattcattatcttttatgactcagaatatgatatccgaggcatacaggagtttctcgataaggtgtcccaacaaggcatggacgttgccctacagaaagtcgaaaacaatatcaataaaatgataactactttgtttgacaccatgcgcattgaggagttgaaccgttatcgcgacaccctgcgcagggcaatactcgtgatgaaccccgcgacagcaaagagttttataaccgaggtggttgagacaaatcttgtcgccttcgactgtcactggatcatcattaatgaggaaattaacgacgtggatgtgcaggagttggtcaggaggtcaataggaagactcacaataatacgccagacttttcccgtgccccaaaatatatctcagcgctgttttcgcggaaaccacaggatctcttcgaccttatgcgatcctaaggacccatttgctcagaatatggaaatctcaaatctctacatctacgataccgtgctattgcttgccaacgcctttcataaaaaactggaggacagaaagtggcactcaatggctagcctgtcgtgtatcaggaaaaattctaaaccctggcagggaggacgttccatgttggagaccatcaagaagggaggggtgtccggcctgacaggggaactggagttcggggagaatggcggtaatcctaatgtgcacttcgagatcctaggaaccaactacggtgaggagcttggacggggcgtgcgaaagcttgggtgctggaatccggtgactggcttaaacggttccctgacagataaaaaactcgaaaataatatgcgtggtgtggtgttgcgcgtagtgacagtgctcgaagaacccttcgtgatggtctcagaaaacgtgttggggaagcccaagaagtaccaggggtttagcatagacgtgctggacgccctttctaactatcttggattcaattatgaaatctacgtcgcccctgaccataaatacggatcacctcaagaagacggcacctggaacggcctcgtgggggaactggtgttcaagcgcgcagatatcgggattagtgccctcacaatcacccccgatagggagaatgttgtggacttcaccactagatatatggattactccgtgggcgtccttcttcgcagggcagagaagactgtggatatgttcgcctgtctcgctccctttgatctgtccctgtgggcctgtattgctggaactgtgctgcttgtagggctgctggtttacctgctcaattggttgaaccccccacgcttgcaaatgggatctatgacatccactaccctgtacaactcaatgtggttcgtttacggttctttcgtgcaacaaggaggagaagttccctatacaacactcgccactcgcatgatgatgggcgcttggtggttgtttgccctcatcgtgatctcatcttatacagctaatctggcggcttttcttacaattacacgaatcgaaagtagcatccagagccttcaagacctgtccaaacaaacggagattccctacgggacagtcttagattctgccgtctacgagcatgtgcgaatgaagggactgaacccttttgagcgtgatagcatgtacagccagatgtggagaatgattaatcggtccaatgggtctgaaaacaacgtgcttgagagccaggccggcatccagaaggtgaaatacggcaactatgcattcgtatgggatgctgcggtgttggaatatgtggccataaatgatcctgactgctccttttacacaataggcaacacggttgcagacagagggtatggaatagcattacagcatggttcgccgtatcgggacgtgttctcccagagaatcctggaattgcagcagaacggggatatggatattctaaaacacaaatggtggcctaagaacgggcagtgcgacttatactcctcagtggataccaagcaaaagggaggcgcgttggatataaagtctttcgcgggcgtgttctgcatcctggctgctggtattgttttgtcttgctttatcgctatgctggaaacctggtggaataaacggaaagggtctcgcgttccaagcaaagaggacgataaggagatcgatctggagcacctgcaccgtcgcgtcaatagtctctgcactgatgatgattcaccacataagcagttttcaactagttctatcgacctcaccccactggatatcgacaccctgcctaccaggcaggccctggagcaaattagcgatttcaggaatacgcatatcacaactacgactttcattcctgagcagatacaaacattgtcacgcacactttcagcaaaggccgccagcggatttacatttgggaatgtgccagaacacagaactggaccctttcggcaccgagcaccaaacggcgggttcttccgctcccccataaaaactatgtcatcgattccctaccagcccacacccactttgggcctgaatctgggaaacgaccccgatcgaggcacgagcatttag

SEQ ID NO: 118244 - DNA, 3024 bp, Artificial Sequence
  derived and/or modified sequence
atggaagtgttcccattcttgctagtacttagcgtatggtggtcccgaacgtgggattccgccaacgctgattccattattcatatcggagcaatcttcgacgaatcagccaaaaaagacgacgaggtgttccgaacagccgtgggggacctgaaccagaatgaggaaattctgcagaccgagaagatcaccttctccgtgacttttgtggatggaaacaatccctttcaggcagtacaagaggcttgtgaactgatgaatcaggggatcctggctttggtgagttctataggctgcacctccgcgggatcactgcagagtcttgcagatgctatgcacattcctcatttgttcatacaaagaagcacggccggaaccccaaggtccggctgtggacttactcggtcaaaccgcaatgacgactatacgctgagtgttagaccacccgtctatctccacgacgtgattctgcgagttgttacggaatacgcttggcagaaattcattatcttctacgacagtgagtacgatatccgaggcatacaagagtttctcgacaaagtaagtcaacaaggtatggatgtcgcgctgcagaaggttgagaacaacattaataaaatgataacaacactgtttgacacaatgcggatcgaggagctcaatagatatcgggacactttgagaagggcaatcctggtcatgaaccccgcaaccgcgaagtctttcatcaccgaggtagtcgaaacaaatctggtcgccttcgattgccactggattatcattaatgaggaaatcaacgatgtggacgttcaggagctagttcgtcgcagcatcggacggcttaccatcatcaggcaaacctttccggtgccacagaatattagccagagatgctttagaggtaatcacagaatcagtagtactctgtgcgaccccaaagatcctttcgcccagaacatggaaatcagtaacctctacatctacgatactgtcttgcttcttgccaatgcatttcacaagaaacttgaggaccgcaagtggcacagtatggccagcctctcctgtatcagaaagaacagcaagccatggcagggaggccgttccatgcttgagacgattaaaaaggggggagtgagcgggctcacaggcgaactcgagtttggcgagaacggtggaaatccgaatgttcattttgaaattcttggcacaaactacggggaggaactgggcaggggcgtgaggaagctcggctgctggaacccagtaacagggctaaatggctctctgactgacaagaaactggagaataacatgagaggcgtggtgctgcgagtcgttaccgtgcttgaggaacctttcgtgatggtgtctgaaaacgtcctcgggaagcccaaaaagtatcagggcttttccatcgacgtgctggacgccctctctaactacctcgggtttaactacgaaatttacgtagcacccgatcacaagtatggatcaccacaggaagatgggacctggaacggcttagtcggcgaattagtgtttaaaagagccgacattggtatctccgccctgaccattacccccgatcgcgaaaacgttgtggacttcaccactagatacatggattactctgtaggggtgctgctgaggagagcagagaagacagttgacatgttcgcctgcctggctccttttgacctctctctctgggcttgtattgcgggaactgtcctcttggtgggcctcctggtgtacctactgaactggcttaaccctcccagacttcagatgggatcgatgacatcaaccaccctctacaattccatgtggtttgtatacggtagttttgtccagcagggtggggaggttccctacactaccctagccactaggatgatgatgggtgcatggtggttgttcgccctgatcgtgatctcatcatatacagccaaccttgccgcttttctgactatcactcgaatcgaaagtagtatccagagtcttcaagatctttcgaagcagacagaaatcccttatgggaccgtactggactccgcagtctatgagcacgtgcgcatgaagggcctgaaccccttcgagcgggactccatgtactcccagatgtggcggatgatcaataggtcaaacggcagcgagaataacgtcttggaatctcaggcaggcatccagaaggtgaaatatggcaactacgcctttgtgtgggatgccgcagtattggaatacgtggctattaacgacccggattgctctttctatacaataggtaacacagtagccgatcggggttatggcattgcattacagcatgggtccccctatcgggatgttttttcccagaggatcctggagctgcagcagaatggcgatatggacatcctcaagcacaaatggtggccaaagaatgggcagtgcgacctctactcttccgtagacactaaacagaagggtggagcgctggatatcaagtccttcgctggcgtgttctgcatcctggccgctggcatcgtgctttcatgcttcatcgctatgctggagacgtggtggaataaacgcaagggctcacgagtgccttccaaagaggatgataaggagattgacctcgaacatttgcacaggcgtgtgaacagtctgtgtacagacgacgacagcccacataaacaattctctaccagctccattgacttgactcccctggatatagacaccctgccgactaggcaggccttggagcagatctctgacttccggaatacacatatcaccactaccacctttatcccagaacaaatccaaaccctgtcgcggactctcagcgctaaggcagcatcaggcttcaccttcggaaacgtacccgagcacagaacagggccatttcggcatagagcccctaacgggggtttcttccggtcaccaattaagacaatgtcgagtataccttaccagccaacacccaccttggggcttaatcttggtaatgatccggataggggcacatccatatag

SEQ ID NO: 118245 - DNA, 3024 bp, Artificial Sequence
  derived and/or modified sequence
atggaggtgttccccttcctgctggtgctgagcgtgtggtggagcagaacctgggacagcgccaacgccgacagcatcatccacatcggcgccatcttcgacgagagcgccaagaaggacgacgaggtgttcagaaccgccgtgggcgacctgaaccagaacgaggagatcctgcagaccgagaagatcaccttcagcgtgaccttcgtggacggcaacaaccccttccaggccgtgcaggaggcctgcgagctgatgaaccagggcatcctggccctggtgagcagcatcggctgcaccagcgccggcagcctgcagagcctggccgacgccatgcacatcccccacctgttcatccagagaagcaccgccggcacccccagaagcggctgcggcctgaccagaagcaacagaaacgacgactacaccctgagcgtgagaccccccgtgtacctgcacgacgtgatcctgagagtggtgaccgagtacgcctggcagaagttcatcatcttctacgacagcgagtacgacatcagaggcatccaggagttcctggacaaggtgagccagcagggcatggacgtggccctgcagaaggtggagaacaacatcaacaagatgatcaccaccctgttcgacaccatgagaatcgaggagctgaacagatacagagacaccctgagaagagccatcctggtgatgaaccccgccaccgccaagagcttcatcaccgaggtggtggagaccaacctggtggccttcgactgccactggatcatcatcaacgaggagatcaacgacgtggacgtgcaggagctggtgagaagaagcatcggcagactgaccatcatcagacagaccttccccgtgccccagaacatcagccagagatgcttcagaggcaaccacagaatcagcagcaccctgtgcgaccccaaggaccccttcgcccagaacatggagatcagcaacctgtacatctacgacaccgtgctgctgctggccaacgccttccacaagaagctggaggacagaaagtggcacagcatggccagcctgagctgcatcagaaagaacagcaagccctggcagggcggcagaagcatgctggagaccatcaagaagggcggcgtgagcggcctgaccggcgagctggagttcggcgagaacggcggcaaccccaacgtgcacttcgagatcctgggcaccaactacggcgaggagctgggcagaggcgtgagaaagctgggctgctggaaccccgtgaccggcctgaacggcagcctgaccgacaagaagctggagaacaacatgagaggcgtggtgctgagagtggtgaccgtgctggaggagcccttcgtgatggtgagcgagaacgtgctgggcaagcccaagaagtaccagggcttcagcatcgacgtgctggacgccctgagcaactacctgggcttcaactacgagatctacgtggcccccgaccacaagtacggcagcccccaggaggacggcacctggaacggcctggtgggcgagctggtgttcaagagagccgacatcggcatcagcgccctgaccatcacccccgacagagagaacgtggtggacttcaccaccagatacatggactacagcgtgggcgtgctgctgagaagagccgagaagaccgtggacatgttcgcctgcctggcccccttcgacctgagcctgtgggcctgcatcgccggcaccgtgctgctggtgggcctgctggtgtacctgctgaactggctgaacccccccagactgcagatgggcagcatgaccagcaccaccctgtacaacagcatgtggttcgtgtacggcagcttcgtgcagcagggcggcgaggtgccctacaccaccctggccaccagaatgatgatgggcgcctggtggctgttcgccctgatcgtgatcagcagctacaccgccaacctggccgccttcctgaccatcaccagaatcgagagcagcatccagagcctgcaggacctgagcaagcagaccgagatcccctacggcaccgtgctggacagcgccgtgtacgagcacgtgagaatgaagggcctgaaccccttcgagagagacagcatgtacagccagatgtggagaatgatcaacagaagcaacggcagcgagaacaacgtgctggagagccaggccggcatccagaaggtgaagtacggcaactacgccttcgtgtgggacgccgccgtgctggagtacgtggccatcaacgaccccgactgcagcttctacaccatcggcaacaccgtggccgacagaggctacggcatcgccctgcagcacggcagcccctacagagacgtgttcagccagagaatcctggagctgcagcagaacggcgacatggacatcctgaagcacaagtggtggcccaagaacggccagtgcgacctgtacagcagcgtggacaccaagcagaagggcggcgccctggacatcaagagcttcgccggcgtgttctgcatcctggccgccggcatcgtgctgagctgcttcatcgccatgctggagacctggtggaacaagagaaagggcagcagagtgcccagcaaggaggacgacaaggagatcgacctggagcacctgcacagaagagtgaacagcctgtgcaccgacgacgacagcccccacaagcagttcagcaccagcagcatcgacctgacccccctggacatcgacaccctgcccaccagacaggccctggagcagatcagcgacttcagaaacacccacatcaccaccaccaccttcatccccgagcagatccagaccctgagcagaaccctgagcgccaaggccgccagcggcttcaccttcggcaacgtgcccgagcacagaaccggccccttcagacacagagcccccaacggcggcttcttcagaagccccatcaagaccatgagcagcatcccctaccagcccacccccaccctgggcctgaacctgggcaacgaccccgacagaggcaccagcatctag

SEQ ID NO: 118246 - protein, 107 aa, Artificial Sequence
  derived and/or modified sequence
MARAALSAAPSNPRLLRVALLLLLLVAAGRRAAGASVATELRCQCLQTLQGIHPKNIQSVNVKSPGPHCAQTEVIATLKNGRKACLNPASPIVKKIIEKMLNSDKSN

SEQ ID NO: 118247 - DNA, 324 bp, Artificial Sequence
  derived and/or modified sequence
atggccagagctgccctgtccgcagcccctagcaatccgcgcctattgcgtgtggctctgttactcctgttactggtcgccgccgggcggagagcagcaggagccagtgtggcaactgagctcagatgccaatgtctgcagacactgcaagggattcatccgaaaaacatccaatctgtgaacgtgaaatccccaggtccccactgtgcccagaccgaggtaatcgcgacactaaagaatggccgtaaggcttgtttgaaccctgcctcaccgatcgtgaaaaagattatcgagaaaatgctgaatagcgataagagcaattag

SEQ ID NO: 118248 - DNA, 324 bp, Artificial Sequence
  derived and/or modified sequence
atggcccgggccgccctgtctgctgcccccagcaacccccggctgctgcgggtggccctgctgctgctgctgctggtggccgccggccggcgggctgctggggcctctgtggccacagagctgcgctgccagtgcctgcagaccctgcagggcatccaccccaagaacatccagagcgtgaatgtgaagagccctggcccccactgtgcccagacagaggtgattgccaccctgaagaatggaaggaaggcctgcctgaacccagccagccccatcgtgaagaagatcatcgagaagatgctgaacagcgacaagagcaactag

SEQ ID NO: 118249 - DNA, 324 bp, Artificial Sequence
  derived and/or modified sequence
atggcccgggccgccctgagcgccgcccccagcaacccccggctgctcagagtggccttactgcttctgctgctcgtagccgcggggagaagggcggctggcgcctctgttgccacagaactccgttgtcagtgtctccagactctgcagggcattcacccaaagaacatccagagtgtgaatgtgaaaagcccgggacctcattgtgcccagaccgaggtgattgccaccctgaagaatgggaggaaagcttgtttaaaccccgcgtcgccaatcgtcaagaagattatcgaaaagatgcttaactcagacaaatccaattag

SEQ ID NO: 118250 - DNA, 324 bp, Artificial Sequence
  derived and/or modified sequence
atggctagagccgctctaagcgccgctccaagtaatcccaggctgctgcgagtagctttgctgctcctgctcctggtggccgcaggcagaagggccgcaggagcctctgtcgccaccgagttaaggtgccaatgcctgcagaccttgcaagggatacatcctaagaacatccaatctgtgaacgttaaaagtccaggcccacactgcgcacagacagaggtgatagcgacgctgaaaaacggcagaaaagcatgcttgaaccctgcctctcctatcgtcaagaagatcattgagaagatgctgaactccgataagagcaactag

SEQ ID NO: 118251 - DNA, 1097 bp, Artificial Sequence
  derived and/or modified sequence
gccgcaggcacctcctcgccagctcttccgctcctctcacagccgccagacccgcctgctgagccccatggcccgcgctgctctctccgccgcccccagcaatccccggctcctgcgagtggcactgctgctcctgctcctggtagccgctggccggcgcgcagcaggagcgtccgtggccactgaactgcgctgccagtgcttgcagaccctgcagggaattcaccccaagaacatccaaagtgtgaacgtgaagtcccccggaccccactgcgcccaaaccgaagtcatagccacactcaagaatgggcggaaagcttgcctcaatcctgcatcccccatagttaagaaaatcatcgaaaagatgctgaacagtgacaaatccaactgaccagaagggaggaggaagctcactggtggctgttcctgaaggaggccctgcccttataggaacagaagaggaaagagagacacagctgcagaggccacctggattgtgcctaatgtgtttgagcatcgcttaggagaagtcttctatttatttatttattcattagttttgaagattctatgttaatattttaggtgtaaaataattaagggtatgattaactctacctgcacactgtcctattatattcattctttttgaaatgtcaaccccaagttagttcaatctggattcatatttaatttgaaggtagaatgttttcaaatgttctccagtcattatgttaatatttctgaggagcctgcaacatgccagccactgtgatagaggctggcggatccaagcaaatggccaatgagatcattgtgaaggcaggggaatgtatgtgcacatctgttttgtaactgtttagatgaatgtcagttgttatttattgaaatgatttcacagtgtgtggtcaacatttctcatgttgaaactttaagaactaaaatgttctaaatatcccttggacattttatgtctttcttgtaaggcatactgccttgtttaatggtagttttacagtgtttctggcttagaacaaaggggcttaattattgatgttttcatagagaatataaaaataaagcacttatagaaaaaa

SEQ ID NO: 118252 - DNA, 324 bp, Artificial Sequence
  derived and/or modified sequence
atggccagagccgccctgagcgccgcccccagcaaccccagactgctgagagtggccctgctgctgctgctgctggtggccgccggcagaagagccgccggcgccagcgtggccaccgagctgagatgccagtgcctgcagaccctgcagggcatccaccccaagaacatccagagcgtgaacgtgaagagccccggcccccactgcgcccagaccgaggtgatcgccaccctgaagaacggcagaaaggcctgcctgaaccccgccagccccatcgtgaagaagatcatcgagaagatgctgaacagcgacaagagcaactag

SEQ ID NO: 118253 - protein, 395 aa, Artificial Sequence
  derived and/or modified sequence
MDEEPERTKRWEGGYERTWEILKEDESGSLKATIEDILFKAKRKRVFEHHGQVRLGMMRHLYVVVDGSRTMEDQDLKPNRLTCTLKLLEYFVEEYFDQNPISQIGIIVTKSKRAEKLTELSGNPRKHITSLKKAVDMTCHGEPSLYNSLSIAMQTLKHMPGHTSREVLIIFSSLTTCDPSNIYDLIKTLKAAKIRVSVIGLSAEVRVCTVLARETGGTYHVILDESHYKELLTHHVSPPPASSSSECSLIRMGFPQHTIASLSDQDAKPSFSMAHLDGNTEPGLTLGGYFCPQCRAKYCELPVECKICGLTLVSAPHLARSYHHLFPLDAFQEIPLEEYNGERFCYGCQGELKDQHVYVCAVCQNVFCVDCDVFVHDSLHCCPGCIHKIPAPSGV

SEQ ID NO: 118254 - protein, 338 aa, Artificial Sequence
  derived and/or modified sequence
MRHLYVVVDGSRTMEDQDLKPNRLTCTLKLLEYFVEEYFDQNPISQIGIIVTKSKRAEKLTELSGNPRKHITSLKKAVDMTCHGEPSLYNSLSIAMQTLKHMPGHTSREVLIIFSSLTTCDPSNIYDLIKTLKAAKIRVSVIGLSAEVRVCTVLARETGGTYHVILDESHYKELLTHHVSPPPASSSSECSLIRMGFPQHTIASLSDQDAKPSFSMAHLDGNTEPGLTLGGYFCPQCRAKYCELPVECKICGLTLVSAPHLARSYHHLFPLDAFQEIPLEEYNGERFCYGCQGELKDQHVYVCAVCQNVFCVDCDVFVHDSLHCCPGCIHKIPAPSGV

SEQ ID NO: 118255 - DNA, 1188 bp, Artificial Sequence
  derived and/or modified sequence
atggacgaggagcccgagagaaccaagagatgggagggcggctacgagagaacctgggagatcctgaaggaggacgagagcggcagcctgaaggccaccatcgaggacatcctgttcaaggccaagagaaagagagtgttcgagcaccacggccaggtgagactgggcatgatgagacacctgtacgtggtggtggacggcagcagaaccatggaggaccaggacctgaagcccaacagactgacctgcaccctgaagctgctggagtacttcgtggaggagtacttcgaccagaaccccatcagccagatcggcatcatcgtgaccaagagcaagagagccgagaagctgaccgagctgagcggcaaccccagaaagcacatcaccagcctgaagaaggccgtggacatgacctgccacggcgagcccagcctgtacaacagcctgagcatcgccatgcagaccctgaagcacatgcccggccacaccagcagagaggtgctgatcatcttcagcagcctgaccacctgcgaccccagcaacatctacgacctgatcaagaccctgaaggccgccaagatcagagtgagcgtgatcggcctgagcgccgaggtgagagtgtgcaccgtgctggccagagagaccggcggcacctaccacgtgatcctggacgagagccactacaaggagctgctgacccaccacgtgagccccccccccgccagcagcagcagcgagtgcagcctgatcagaatgggcttcccccagcacaccatcgccagcctgagcgaccaggacgccaagcccagcttcagcatggcccacctggacggcaacaccgagcccggcctgaccctgggcggctacttctgcccccagtgcagagccaagtactgcgagctgcccgtggagtgcaagatctgcggcctgaccctggtgagcgccccccacctggccagaagctaccaccacctgttccccctggacgccttccaggagatccccctggaggagtacaacggcgagagattctgctacggctgccagggcgagctgaaggaccagcacgtgtacgtgtgcgccgtgtgccagaacgtgttctgcgtggactgcgacgtgttcgtgcacgacagcctgcactgctgccccggctgcatccacaagatccccgcccccagcggcgtgtag

SEQ ID NO: 118256 - DNA, 1188 bp, Artificial Sequence
  derived and/or modified sequence
atggatgaggagcctgagaggacaaagcgttgggagggaggctatgaaagaacatgggagatcttaaaagaggatgagtccggttcacttaaggccacaattgaagatatactctttaaggctaagaggaaaagggtcttcgagcaccacgggcaggtgaggcttggaatgatgcggcatctttatgtagttgtggacggatcacgcaccatggaggaccaggatttaaagccgaatcgcctgacctgtaccttgaagcttctcgaatactttgtggaagagtattttgaccaaaacccgatttcccaaatcggtattattgtcactaaaagcaaacgcgccgaaaagttgaccgaactctcggggaatccccgaaaacacattacctccttgaagaaagctgtggatatgacctgccatggcgagccctccctctacaacagcctgagcattgctatgcagactctcaagcacatgccgggccatacatcaagggaggtactgataatcttctcgtcgttgactacctgtgatccctcaaatatttacgatctgatcaagacattgaaggccgccaagattagagtgagcgtgatcggcctgagtgcagaggtccgagtttgcactgtgctggccagagagacagggggaacgtatcatgtcatcttggatgagagccattataaggagctgctgactcatcatgtctcgcccccccccgctagtagttcctccgagtgttccttgattagaatggggttcccccagcacaccatcgcgagtctcagtgatcaggacgcgaaaccctcattttctatggctcatctggatgggaacactgagccagggcttacactcggaggctacttctgtccacaatgccgcgccaaatattgtgagctgcctgtagagtgcaagatctgcggcctaacactggtctccgcacctcacctggctcggagctatcaccacctgttcccactcgatgcctttcaggaaattcccctcgaggagtacaacggggaacgcttttgttacggatgccagggagaattgaaagatcagcacgtgtacgtgtgtgctgtttgccagaacgtcttttgcgtggactgtgacgtatttgtgcacgactcgctgcattgctgtccggggtgcatccataagatcccggccccaagcggggtctag

SEQ ID NO: 118257 - DNA, 1188 bp, Artificial Sequence
  derived and/or modified sequence
atggatgaggagcctgagaggaccaagcgctgggagggcggctatgaaagaacctgggagatcctgaaggaggatgaaagtggcagcctgaaggccaccatcgaggacatcctcttcaaggccaagaggaagagggtgtttgagcaccacggccaggtgcggctgggcatgatgaggcacctgtatgtggtggtggatggcagcaggaccatggaggaccaggacctgaagcccaaccggctgacctgcaccctgaagctgctggagtactttgtggaggagtactttgaccagaaccccatcagccagatcggcatcatcgtgaccaagagcaagagagctgagaagctgacagagctgagcggcaaccccaggaagcacatcaccagcctgaagaaggctgtggacatgacctgccacggggagcccagcctgtacaacagcctgagcatcgccatgcagaccctgaagcacatgcctggccacaccagccgggaggtgctgatcatcttcagcagcctgaccacctgtgaccccagcaacatctatgacctgatcaagaccctgaaggccgccaagatccgggtgtctgtgattggcctgtctgctgaggtgcgggtgtgcaccgtgctggcccgggagactggaggcacctaccacgtgatcctggatgagagccactacaaggagctgctgacccaccacgtgagccccccaccagccagcagcagcagcgagtgcagcctcatccgcatgggcttcccccagcacaccatcgccagcctgagtgaccaggatgccaagcccagcttctccatggcccacctggatggcaacacagagcccggcctgaccctgggcggctacttctgcccccagtgccgggccaagtactgtgagctgcctgtggagtgcaagatctgtggcctgaccctggtgtctgccccccacctggcccggagctaccaccacctgttccccctggatgccttccaggagatccccctggaggagtacaacggggagcgcttctgctacggctgccagggcgagctgaaggaccagcacgtgtatgtgtgtgctgtgtgccagaatgtgttctgtgtggactgtgatgtgtttgtgcatgacagcctgcactgctgccccggctgcatccacaagatcccagcccccagcggcgtgtag

SEQ ID NO: 118258 - DNA, 1958 bp, Artificial Sequence
  derived and/or modified sequence
ggtgagtccgcgtgtggaagtctgtgaggcgcagaggtggggcaggccgtctggctagctaggcggctgggagcgttttcgtggcggggaacggaggttgaattgccctgcctgggctcatagggaaggaggatgtgaaggagcttgtgaaggcagaggaagattattgaataataaaatacagttttgaaaaaaatggatgaagaacctgaaagaactaagcgatgggaaggaggctatgaaagaacatgggagattcttaaagaagatgaatctggatcacttaaagctacaatagaagacattctattcaaggcaaagagaaaaagagtatttgagcaccatggacaagttcgacttggaatgatgcgccacctttatgtggtagtagatggatcaagaacaatggaagaccaagatttaaagcctaatagactgacgtgtactttaaagttgttggaatactttgtagaggaatattttgatcaaaatcctattagtcagattggaataattgtaactaagagtaaaagagctgaaaaattgactgaactttcaggaaacccaagaaaacatataacgtctttgaagaaagctgtggatatgacctgccatggagagccatctctttataattccctaagcatagctatgcagactctaaaacacatgcctggacatacaagtcgagaagtactaatcatctttagcagccttacaacttgcgatccatctaatatttatgatctaatcaagaccctaaaggcagctaaaattagagtatctgttattggattgtctgcagaagttcgcgtttgcactgtacttgctcgtgaaactggtggcacgtaccatgttattttagatgaaagccattacaaagagttgctcacacatcatgttagtcctcctcctgctagctcaagttctgaatgctcacttattcgtatgggatttcctcagcacaccattgcttctttatctgaccaggatgcaaaaccctctttcagcatggcgcatttggatggcaatactgagccagggcttacattaggaggctatttctgcccacagtgtcgggcaaagtactgtgagctacctgttgaatgtaaaatctgtggtcttactttggtgtctgctccccacttggcacggtcttaccatcatttgtttcctttggatgcttttcaagaaattcccctagaagaatataatggagaaagattttgttatggatgtcagggggaattgaaagaccaacatgtttatgtttgtgctgtgtgccaaaatgttttctgtgtggactgtgatgtttttgttcatgattctctacactgttgccctggctgtattcataagattccagctccttcaggtgtttgattccagcatgtagtatacattgtatgtgttaaaaagaaatttgcaactgtgaataaaaggacttctttagaagaagcttcatttaaaacatgaaaggataatctgacttaagaaactttttgctaagaaaaggtaatattttattaaattttaaatttgtgttgtcacagaaatacctgaaattcagtagtacttcattcaattaattttgttttctattattttgagttatactgttttcaaagtcattatgcagtatgtataaacttataagaattaaattgatgtgataattttatgtttttataattaaatatagaatctttatgatttatgttaattcattaatttagtgtaagaagaaagttaagtctgaatgtaaattcagtgtaagatgaaaatttatcaatacttatgaaattaggctgggcgctgtggctcacacctgtaatcccaacactttgggaggctgaggtgggcagatcacttgaggtcaggagttcgagaccagcctggccaacatggtgaaaccccgtcactactaaaaatacaaaaaataattagccgggcatggt

SEQ ID NO: 118259 - DNA, 1188 bp, Artificial Sequence
  derived and/or modified sequence
atggacgaggagcccgagcggaccaagcggtgggagggcggctacgaacgaacatgggagatcctgaaggaggacgagtccgggtccctaaaagcgacaattgaggatatcctgttcaaggccaagcgaaagagggtgtttgagcatcacggccaggtgagactggggatgatgcgccacttgtacgtcgttgtggatggctctaggactatggaagatcaggatctgaagccaaataggctgacttgcactctgaaacttctggaatattttgtggaagaatactttgatcagaatcctatttcccagattggcattatcgtcaccaagagcaaacgtgccgaaaagctcactgaactttctggcaaccctcggaaacacattacgtccttaaaaaaagctgtggatatgacttgccatggggagcctagcttgtacaattctcttagcatcgcaatgcagacattgaaacacatgcccggccataccagtcgagaagtgctcatcatctttagttcactgactacctgcgatcccagcaacatctatgacttaatcaagactctgaaggccgcgaaaattcgggtgtccgtaatcgggctctctgccgaggtaagggtatgcacagttctcgcgagagagaccggcgggacctaccacgtgattttagatgagtcccattataaagagcttctgacccaccacgtttctcctcctccagcctcttcctcatcggaatgtagtctaattcggatgggattcccacagcacacgatcgcgtccctttctgatcaggacgccaaaccatccttttcgatggcacacttggatggaaatacagagcccggactcacactgggtggctacttttgcccgcagtgcagggccaaatactgcgaactgccagtggaatgtaagatatgtggactgacactggtctctgcacctcatctggcaagaagctaccatcatctatttcccctcgacgccttccaggagattcctctggaggagtacaacggtgaaagattctgctacggctgccagggtgaattgaaggaccagcacgtgtatgtgtgtgccgtctgtcagaacgtgttctgcgtggattgtgacgtgtttgtgcatgactccctgcactgctgtcccggttgcatccacaagatacctgccccctcgggcgtatag

SEQ ID NO: 118260 - DNA, 1188 bp, Artificial Sequence
  derived and/or modified sequence
atggatgaggagccggagcgcaccaaaaggtgggaaggaggctacgagagaacctgggaaatcctgaaagaagatgaatcagggtcactcaaggctaccatcgaggatattctgtttaaggccaaacggaagagagtgttcgaacatcacggtcaggttaggttgggaatgatgcgtcatctatacgtcgtggttgatggatctaggactatggaagaccaagacctgaagcccaataggctgacgtgcacacttaagctgctcgagtacttcgtggaagagtactttgaccaaaatccgatctctcagatcggaatcatcgtgactaaaagcaagcgggctgagaaactcaccgaacttagcggaaacccccgaaagcacatcaccagcctaaaaaaggcggttgatatgacctgccacggcgaaccctcactctataattcgctaagcattgccatgcagacactgaaacatatgcccggacatacctccagggaggtccttatcatattttcctctctcacaacctgtgatccatccaacatttacgacctcatcaagaccctgaaggccgctaagatacgcgtgagcgtgataggactcagcgcagaagtgagagtgtgcacggtgctggcacgtgaaacaggaggcacatatcatgtcatcttggatgagtcccactacaaagagctgctgacccaccacgtttcccccccaccagcctcaagcagtagcgaatgcagccttatccggatggggtttccacagcatactatcgcaagcctatcagaccaagacgccaagccttcattctcaatggcccacctggacggcaacaccgaacccggactgacactgggcggttatttttgcccccagtgcagagctaagtactgcgaacttcctgtggagtgcaaaatttgcggcctgactctggtctcggctcctcacctggcccgatcttatcatcacctatttcctctcgacgccttccaagagatacctctggaggagtacaacggtgagcgcttctgttatggatgtcaaggcgaactcaaagaccagcacgtgtacgtgtgcgcggtatgtcaaaatgtgttttgcgtggattgtgacgtttttgtgcacgactctcttcattgctgtcctggttgtatccacaaaattccggcacctagcggcgtatag

SEQ ID NO: 118261 - DNA, 1188 bp, Artificial Sequence
  derived and/or modified sequence
atggatgaagaaccagaaagaaccaagcggtgggagggcggctatgaaaggacatgggaaattctgaaggaagacgagagcggatctttaaaagcgaccatagaagatatactgtttaaggccaagagaaaacgcgtcttcgaacatcatggacaagttcgccttgggatgatgagacacctttacgtagtggtggatggatcaagaacaatggaggaccaggatctgaaacctaatcggctgacttgcacgttaaagcttctcgagtactttgttgaggaatacttcgatcaaaacccgattagccagataggcataattgtgacgaaatctaagagagcagagaagctgaccgaactgtcgggcaacccgaggaaacacataacgtcgcttaagaaggccgtagacatgacctgtcacggcgaacccagcttgtataacagtctgtctatcgccatgcagacactgaagcacatgcccggacacactagcagagaggtgctaatcattttttctagcctcacaacgtgcgatccctctaacatctatgacctgatcaaaacccttaaagcggcaaaaattagagtgtcagtgataggactgagtgcagaggtgagggtgtgcacagtgctagctcgggagacaggtggcacgtatcatgttatcttggatgagagtcattataaagaactgctcacccatcatgtgagtcctcctcctgctagtagctcctctgagtgcagcctgataagaatgggattcccacaacatactattgcatccctgagcgaccaggacgcgaagccatcattcagtatggcccacctggacggtaatacggagcctggactgacattggggggttatttttgcccgcagtgccgggccaagtattgcgaactgcctgtggagtgtaagatctgtggattgaccctggtcagcgcccctcacctggctaggagctatcaccatttgtttcccttggacgcgtttcaggaaatcccgctggaagagtataatggggaacggttctgctacggctgccaaggtgagttgaaggatcaacatgtatacgtctgtgctgtttgccaaaatgtcttttgtgtagattgcgacgtattcgtgcacgattctcttcactgctgtcccgggtgtattcacaagataccggcaccttccggagtatag

SEQ ID NO: 118262 - DNA, 1188 bp, Artificial Sequence
  derived and/or modified sequence
atggacgaagaacctgaaaggacaaagcggtgggagggcggttatgaaagaacatgggaaattcttaaagaggacgaatccggtagcctgaaggcaactattgaagatattctgttcaaagcgaaaagaaagcgagtcttcgaacatcacggacaggtgagactcggtatgatgcgccacttgtacgtggttgtggatggatcccgaaccatggaagaccaggatcttaagcctaaccgattgacatgtaccctaaaactgctggagtattttgtcgaagagtacttcgaccagaatcccatctcacagattggaatcatcgtgactaagtcgaagcgggccgagaaactgaccgagctatccggcaatcctcgcaaacacattacttccttaaagaaggccgtggacatgacctgccacggtgagccttcactatacaactccctgtctattgcaatgcagacacttaagcacatgcccggacacactagtagagaagtcctcattatcttctcaagtttgacaacttgtgatccttccaacatttatgacttaattaagaccctgaaggccgccaagattcgggtaagcgtgattggactctcggccgaggtaagagtgtgcacagtgttagcccgggaaacgggaggaacctaccatgtcatcctcgacgagtctcattacaaagagttattgacccaccatgtgagcccgccccccgcttccagctcctcagaatgttccttaatccgcatgggcttcccccaacataccatcgccagtctctcagatcaagacgcaaagcccagcttctccatggcacatctggatggcaataccgaacccggcctgaccctgggcgggtatttctgcccacagtgtagggccaaatattgtgaactcccagtcgaatgtaaaatctgcggcctaacgctggtgtccgcgcctcacttagcccggtcctaccaccacctatttcccctagacgcatttcaagaaattcccctggaggaatacaatggtgaaaggttctgttacgggtgccagggggaactgaaggaccagcatgtttacgtctgcgccgtttgccaaaacgtgttctgcgtggactgcgatgtgttcgtacacgattcactgcattgttgccccggttgtattcataagatccccgcacctagcggggtatag

SEQ ID NO: 118263 - DNA, 1188 bp, Artificial Sequence
  derived and/or modified sequence
atggacgaggagcccgagcgaaccaagcgatgggaaggtggttatgaacgcacttgggagatcttaaaggaggacgagtccggcagtctgaaggctaccatcgaggacatcctgtttaaagccaagcggaagcgcgttttcgaacaccatggacaggtgcgtcttgggatgatgcggcacctgtacgtcgtggtggatgggtcacgtaccatggaggaccaagaccttaagccaaaccgactaacatgcacactcaaactcttggaatactttgtggaggagtatttcgatcagaatccaatctcacagattgggattattgttacaaagtcaaagcgggcggagaagctgaccgagctatccggcaatccacggaagcacatcacatcgctgaaaaaggcagtcgatatgacctgccacggtgaacccagtctgtacaactccctttctattgctatgcagacgcttaagcacatgccaggacatacttccagagaggtgctgattatcttttcctcactgaccacttgtgacccatcaaacatctatgatctaatcaagaccttaaaagctgccaaaatccgggtgagtgtgattggcctcagcgctgaagtgcgtgtgtgcaccgtgctggctcgtgaaaccggtggcacatatcacgtcattctcgacgagtcacactacaaggagctgctcacgcatcatgtgtctccaccacctgcatcatcatcatccgagtgttcccttattaggatgggatttccacagcacaccatcgccagtctgtcagatcaagatgctaaaccttcattctcgatggctcatctggacggaaataccgaacctggtttaacactgggtggctatttttgcccacaatgcagggccaagtattgcgaactgcctgtggaatgcaagatctgcggactcacactggtctctgccccacatctggcgagatcctatcaccatttatttccactggacgcattccaggagatccccctggaagagtacaatggagaacgtttctgctatggatgccagggggagctgaaagatcagcatgtttatgtgtgtgcagtctgtcaaaacgttttctgtgtggattgcgatgtcttcgttcacgattccctccactgctgtcccggctgcatccacaagattcctgctccctccggagtatag

SEQ ID NO: 118264 - DNA, 2049 bp, Artificial Sequence
  derived and/or modified sequence
ctagctaggcggctgggagcgttttcgtggcggggaacggaggttgaattgccctgcctgggctcatagggaaggaggatgtgaaggagcttgtgaaggcagaggaagattattgaataataaaatacagttttgaaaaaaatggatgaagaacctgaaagaactaagcgatgggaaggaggctatgaaagaacatgggagattcttaaagaagatgaatctggatcacttaaagctacaatagaagacattctattcaaggcaaagagaaaaagagtatttgagcaccatggacaagttcgacttggaatgatgcgccacctttatgtggtagtagatggatcaagaacaatggaagaccaagatttaaagcctaatagactgacgtgtactttaaagttgttggaatactttgtagaggaatattttgatcaaaatcctattagtcagattggaataattgtaactaagagtaaaagagctgaaaaattgactgaactttcaggaaacccaagaaaacatataacgtctttgaagaaagctgtggatatgacctgccatggagagccatctctttataattccctaagcatagctatgcagactctaaaacacatgcctggacatacaagtcgagaagtactaatcatctttagcagccttacaacttgcgatccatctaatatttatgatctaatcaagaccctaaaggcagctaaaattagagtatctgttattggattgtctgcagaagttcgcgtttgcactgtacttgctcgtgaaactggtggcacgtaccatgttattttagatgaaagccattacaaagagttgctcacacatcatgttagtcctcctcctgctagctcaagttctgaatgctcacttattcgtatgggatttcctcagcacaccattgcttctttatctgaccaggatgcaaaaccctctttcagcatggcgcatttggatggcaatactgagccagggcttacattaggaggctatttctgcccacagtgtcgggcaaagtactgtgagctacctgttgagtgtaaaatctgtggtcttactttggtgtctgctccccacttggcacggtcttaccatcatttgtttcctttggatgcttttcaagaaattcccctagaagaatataatggagaaagattttgttatggatgtcagggggaattgaaagaccaacatgtttatgtttgtgctgtgtgccaaaatgttttctgtgtggactgtgatgtttttgttcatgattctctacactgttgccctggctgtattcataagattccagctccttcaggtgtttgattccagcatgtagtatacattgtatgtgttaaaaagaaatttgcaactgtgaataaaaggacttctttagaagaagcttcatttaaaacatgaaaggataatctgacttaagaaactttttgctaagaaaaggtaatattttattaaattttaaatttgtgttgtcacagaaatacctgaaattcagtagtacttcattcaattaattttgttttctattattttgagttatactgttttcaaagtcattatgcagtatgtataaacttataagaattaaattgatgtgataattttatgtttttataattaaatatagaatctttatgatttatgttaattcattaatttagtgtaagaagaaagttaagtctgaatgtaaattcagtgtaagatgaaaatttatcaatacttatgaaattaggctgggcgctgtggctcacacctgtaatcccaacactttgggaggctgaggtgggcagatcacctgaggtcaggagttcgagaccagcctggccaacatggtgaaaccccgtcactactaaaaatacaaaaaataattagccgggcatggtggttcacgcctggagtcccagctacttgggaggctgaggcaggagaatcgcttgaacccaggaggcggaggttgcagtgagccaagattgtgccactgcactccaccctagagtgagactccatctcaaaaaaaaaaaaagttat

SEQ ID NO: 118265 - DNA, 2174 bp, Artificial Sequence
  derived and/or modified sequence
ggcgcagaggtggggcaggccgtctggctagctaggcggctgggagcgttttcgtggcggggaacggaggttgaattgccctgcctgggctcatagggaaggaggatgtgaaggagcttgtgaaggcagaggaaggctggagtgcagtggcacaaccttggctcgctccagtgtctacctgccaggttcaagtgattctcctgcctcagcctcccgagtagctgggattacagattattgaataataaaatacagttttgaaaaaaatggatgaagaacctgaaagaactaagcgatgggaaggaggctatgaaagaacatgggagattcttaaagaagatgaatctggatcacttaaagctacaatagaagacattctattcaaggcaaagagaaaaagagtatttgagcaccatggacaagttcgacttggaatgatgcgccacctttatgtggtagtagatggatcaagaacaatggaagaccaagatttaaagcctaatagactgacgtgtactttaaagttgttggaatactttgtagaggaatattttgatcaaaatcctattagtcagattggaataattgtaactaagagtaaaagagctgaaaaattgactgaactttcaggaaacccaagaaaacatataacgtctttgaagaaagctgtggatatgacctgccatggagagccatctctttataattccctaagcatagctatgcagactctaaaacacatgcctggacatacaagtcgagaagtactaatcatctttagcagccttacaacttgcgatccatctaatatttatgatctaatcaagaccctaaaggcagctaaaattagagtatctgttattggattgtctgcagaagttcgcgtttgcactgtacttgctcgtgaaactggtggcacgtaccatgttattttagatgaaagccattacaaagagttgctcacacatcatgttagtcctcctcctgctagctcaagttctgaatgctcacttattcgtatgggatttcctcagcacaccattgcttctttatctgaccaggatgcaaaaccctctttcagcatggcgcatttggatggcaatactgagccagggcttacattaggaggctatttctgcccacagtgtcgggcaaagtactgtgagctacctgttgagtgtaaaatctgtggtcttactttggtgtctgctccccacttggcacggtcttaccatcatttgtttcctttggatgcttttcaagaaattcccctagaagaatataatggagaaagattttgttatggatgtcagggggaattgaaagaccaacatgtttatgtttgtgctgtgtgccaaaatgttttctgtgtggactgtgatgtttttgttcatgattctctacactgttgccctggctgtattcataagattccagctccttcaggtgtttgattccagcatgtagtatacattgtatgtgttaaaaagaaatttgcaactgtgaataaaaggacttctttagaagaagcttcatttaaaacatgaaaggataatctgacttaagaaactttttgctaagaaaaggtaatattttattaaattttaaatttgtgttgtcacagaaatacctgaaattcagtagtacttcattcaattaattttgttttctattattttgagttatactgttttcaaagtcattatgcagtatgtataaacttataagaattaaattgatgtgataattttatgtttttataattaaatatagaatctttatgatttatgttaattcattaatttagtgtaagaagaaagttaagtctgaatgtaaattcagtgtaagatgaaaatttatcaatacttatgaaattaggctgggcgctgtggctcacacctgtaatcccaacactttgggaggctgaggtgggcagatcacctgaggtcaggagttcgagaccagcctggccaacatggtgaaaccccgtcactactaaaaatacaaaaaataattagccgggcatggtggttcacgcctggagtcccagctacttgggaggctgaggcaggagaatcgcttgaacccaggaggcggaggttgcagtgagccaagattgtgccactgcactccaccctagagtgagactccatctcaaaaaaaaaaaaagttat

SEQ ID NO: 118266 - DNA, 1994 bp, Artificial Sequence
  derived and/or modified sequence
gaacggaggttgaattgccctgcctgggctcatagggaaggaggatgtgaaggagcttgtgaaggcagaggaaggctggagcgcagcggcgcgatctcggctcactgcaacctccacctcccgggttcaagcgattctccttcctcagcctcccgagtagctggaactacagattattgaataataaaatacagttttgaaaaaaatggatgaagaacctgaaagaactaagcgatgggaaggaggctatgaaagaacatgggagattcttaaagaagatgaatctggatcacttaaagctacaatagaagacattctattcaaggcaaagagaaaaagagtatttgagcaccatggacaagttcgacttggaatgatgcgccacctttatgtggtagtagatggatcaagaacaatggaagaccaagatttaaagcctaatagactgacgtgtactttaaagttgttggaatactttgtagaggaatattttgatcaaaatcctattagtcagattggaataattgtaactaagagtaaaagagctgaaaaattgactgaactttcaggaaacccaagaaaacatataacgtctttgaagaaagctgtggatatgacctgccatggagagccatctctttataattccctaagcatagctatgcagactctaaaacacatgcctggacatacaagtcgagaagtactaatcatctttagcagccttacaacttgcgatccatctaatatttatgatctaatcaagaccctaaaggcagctaaaattagagtatctgttattggattgtctgcagaagttcgcgtttgcactgtacttgctcgtgaaactggtggcacgtaccatgttattttagatgaaagccattacaaagagttgctcacacatcatgttagtcctcctcctgctagctcaagttctgaatgctcacttattcgtatgggatttcctcagcacaccattgcttctttatctgaccaggatgcaaaaccctctttcagcatggcgcatttggatggcaatactgagccagggcttacattaggaggctatttctgcccacagtgtcgggcaaagtactgtgagctacctgttgagtgtaaaatctgtggtcttactttggtgtctgctccccacttggcacggtcttaccatcatttgtttcctttggatgcttttcaagaaattcccctagaagaatataatggagaaagattttgttatggatgtcagggggaattgaaagaccaacatgtttatgtttgtgctgtgtgccaaaatgttttctgtgtggactgtgatgtttttgttcatgattctctacactgttgccctggctgtattcataagattccagctccttcaggtgtttgattccagcatgtagtatacattgtatgtgttaaaaagaaatttgcaactgtgaataaaaggacttctttagaagaagcttcatttaaaacatgaaaggataatctgacttaagaaactttttgctaagaaaaggtaatattttattaaattttaaatttgtgttgtcacagaaatacctgaaattcagtagtacttcattcaattaattttgttttctattattttgagttatactgttttcaaagtcattatgcagtatgtataaacttataagaattaaattgatgtgataattttatgtttttataattaaatatagaatctttatgatttatgttaattcattaatttagtgtaagaagaaagttaagtctgaatgtaaattcagtgtaagatgaaaatttatcaatacttatgaaattaggctgggcgctgtggctcacacctgtaatcccaacactttgggaggctgaggtgggcagatcacctgaggtcaggagttcgagaccagcctggccaacatggtgaaaccccgtcactactaaaaatacaaaaaataattagccgggcatggtggttcacgcctggagtcccagctact

SEQ ID NO: 118267 - DNA, 1188 bp, Artificial Sequence
  derived and/or modified sequence
atggacgaggagcccgagcggaccaagcggtgggagggcggctacgagaggacatgggagatcttgaaggaagatgaaagtggctcactcaaagccaccatcgaggatatcctgttcaaagcgaagcgcaagcgggtgttcgaacatcacggtcaggtgagactgggcatgatgcggcatctgtatgtcgtggtggacgggagtcgtaccatggaggatcaagatctcaagcctaaccgtttgacttgcaccctcaagcttttagaatactttgtggaggaatacttcgatcaaaaccctatcagccagattggcattatcgtcaccaagagtaagcgcgccgagaaactgaccgagctttcaggtaacccaaggaagcatatcactagcctgaaaaaggctgtggacatgacttgtcacggcgagcccagcttatataactcactgtcgatcgccatgcaaacccttaaacacatgccgggccatacatctagagaagttctgatcatttttagcagtctgaccacctgtgatcctagcaatatctacgatctgattaagactctgaaggccgccaagatcagagtgagtgtgatcgggctgagcgcggaagtgcgggtgtgcaccgttctcgcccgggaaaccggggggacctaccacgtcatcttagacgagtcacactataaggagctgctgacccaccatgtgtcgcctcccccagcatcaagcagttcagagtgttcactgattaggatgggcttccctcagcacaccattgccagcctgagcgatcaggatgccaaaccttcattctccatggctcatctggacggtaacacagagcccggcctcactctgggaggctatttttgtccacagtgtcgcgctaagtattgcgaattaccagtggaatgcaaaatctgtggcctcacacttgttagtgctccccatttagcgagatcatatcaccatctgttccctctcgacgccttccaggagattcccctggaggagtataacggcgaacggttctgctatggctgtcagggagagcttaaggaccagcacgtttacgtgtgcgccgtatgccaaaatgtcttttgcgttgattgcgacgtcttcgtgcatgatagccttcattgctgtcccggatgtattcacaaaatccctgcccccagtggcgtctag

SEQ ID NO: 118268 - DNA, 1188 bp, Artificial Sequence
  derived and/or modified sequence
atggacgaggagcccgagcggaccaagcggtgggagggcggctacgagcgcacctgggagatcctaaaggaagacgagagcggctctctcaaagccaccatagaggatattctgttcaaggcaaaacgcaaacgcgtgttcgaacatcacgggcaggtgcgcctcgggatgatgaggcacctatatgtcgtggtggacggctctaggacaatggaagaccaggatctcaaacctaacaggctgacatgtactctgaaactcctggagtactttgtggaggagtatttcgaccagaaccccattagtcaaatcggaattatagtgactaagtccaagcgggcagagaagttgacggagctgagcgggaacccacgcaagcacatcaccagtttaaagaaggccgtagacatgacatgccatggcgagcctagcctgtataactctctttctatcgcgatgcagactcttaagcatatgccagggcatacatcgagagaagtgctgatcattttctcatcgctgacaacatgcgacccatcgaatatttacgatctcatcaaaaccctcaaagccgcaaagatcagagtgtccgtgattggtctcagtgcggaagtgcgtgtctgtaccgttctcgcaagggagaccggcggaacttaccacgtgattctggatgaaagtcattacaaagaattgttaactcatcacgtcagtccgccacctgcttccagcagcagcgagtgcagcctgatccgcatggggttcccacaacacacgatcgcatcacttagtgaccaggatgcgaaaccgtccttttcaatggcccacttggacggcaacaccgaacctggacttactctgggcgggtatttttgccctcagtgcagagccaagtactgtgagctgcccgtcgagtgcaagatttgtggattaaccctggtgtctgcgccgcatttagcccgtagctaccaccacctcttccccctggacgctttccaagagattcccctggaggaatataatggggagcggttctgttacgggtgtcagggcgagcttaaggatcagcatgtctacgtgtgtgctgtgtgtcagaacgttttttgcgtcgactgtgacgtcttcgtgcacgattccttgcattgttgtccaggctgcatccataagatccccgctccctccggcgtgtag

SEQ ID NO: 118269 - DNA, 1188 bp, Artificial Sequence
  derived and/or modified sequence
atggacgaggagcccgagcggaccaagcggtgggagggcggctacgagcgcacgtgggagattctcaaagaagacgagtctggtagcctgaaggcaaccatcgaggatatattgttcaaggcaaaaaggaaacgggtgttcgagcatcacggccaggtgcggcttggcatgatgcggcacctctatgtggtggtggatgggagccgtactatggaggaccaggacctcaaacccaatcggctaacatgcactcttaagcttcttgagtacttcgtcgaagagtacttcgatcagaacccaattagccaaattggcatcattgtgacaaagtctaagagagctgaaaaacttactgagctttctgggaaccctagaaagcacattacaagtctaaagaaggccgtggatatgacatgtcacggtgaaccatcattgtataactccctctcaattgccatgcaaaccttgaagcatatgccgggtcacacatctcgtgaagttctaatcatcttttcaagccttacgacatgcgacccatctaacatctacgacctgattaaaaccctgaaagcagccaaaattcgggtgtctgtgattggcctttccgctgaggtcagagtatgcactgtcttggcccgtgagacaggggggacgtatcacgtgatcttggatgaatcgcactacaaggagttgctcacacatcatgtgtcccccccccccgcctcatcgtctagcgaatgtagtctgatcaggatgggctttccgcaacacactatcgcgtcactgtcggatcaggatgctaagccctccttcagtatggcacatctggacggcaacacagaaccagggctgacactcggtggttatttttgccctcagtgcagggccaagtactgtgaactaccagtggaatgcaaaatctgcggcctgactctagtctcagcgccgcacttggctcgcagttaccatcacttgttcccacttgacgcgtttcaggagatcccattggaagagtacaacggtgaacggttctgctacggctgccaaggcgagctgaaggaccagcatgtgtacgtctgtgcggtctgccagaacgtcttctgcgtggattgtgatgtgttcgtccatgactccctccactgctgtcccggctgcatccacaaaatccctgctccaagtggcgtatag

SEQ ID NO: 118270 - DNA, 1188 bp, Artificial Sequence
  derived and/or modified sequence
atggatgaggaacctgaaagaactaagcgatgggagggcggttacgagagaacctgggaaattcttaaggaggacgagagcgggagcctgaaggcaacgattgaggacatcctttttaaggcgaagagaaaacgtgttttcgagcatcacggccaggtccgtctgggcatgatgcgccatttgtatgtggtggtggacgggtcccggactatggaagatcaggatctgaagcccaacaggcttacctgcaccctcaagctgctagaatacttcgttgaagagtactttgatcaaaatcccataagtcaaatcggcatcattgttaccaagagcaaaagagcggaaaaactcactgaactgtccgggaatcccaggaaacatattacgtctctgaagaaggccgtagatatgacctgtcatggcgaaccttctctatataattctctgagcattgcgatgcaaacccttaaacatatgcccggacacactagtcgcgaggtgctcattatatttagttcactgacgacctgtgacccatctaatatatacgatttgatcaagactttaaaggcagcgaagatcagggttagcgtgatcggcctgagcgctgaagtcagagtctgcaccgtactcgcacgggagaccggcggaacctaccatgtaatactggacgaatcccactacaaagagttgctgacacaccacgtttcaccaccccctgctagttcctcatcagagtgttccctgatccgcatgggattcccacaacacactattgcatctctctctgaccaggacgcaaaaccatcctttagcatggctcacctggacgggaatactgagcctggcctaacgctgggtgggtacttttgtccgcagtgccgtgccaagtactgtgagctgcccgtcgagtgtaagatctgtggtttgactttggtctccgcaccacatctggccaggagttaccatcacttatttcctctcgatgcctttcaggaaattccgttggaggaatacaatggggaacgattctgttatggatgccagggggaactgaaggaccagcatgtgtacgtgtgcgctgtgtgccagaacgtcttctgcgtggactgtgacgtgtttgtgcacgattctctccattgctgtcctgggtgtattcacaagatacccgctccctcaggagtttag

SEQ ID NO: 118271 - DNA, 1188 bp, Artificial Sequence
  derived and/or modified sequence
atggatgaagagcccgagcgcaccaagcggtgggaggggggatacgaacgaacctgggagatcctcaaagaggacgaatcaggaagcctgaaggcaacgatcgaggatatcctgttcaaggcaaaaaggaaacgagttttcgagcatcacggtcaggttagactgggaatgatgcgccacctgtatgtagtcgtagatgggtcaagaacaatggaagaccaagacttgaaacctaaccgactgacttgtacactgaagcttttagagtattttgtggaggagtacttcgatcagaatcctatctcccagatcggcattatagtcacgaaatcaaagagagcagaaaagttgactgagctcagcgggaacccccgtaagcatatcacgagtctgaagaaagcagttgatatgacatgccacggtgaaccatccctgtacaattccctgtccatagctatgcagacgctgaaacacatgcccggacatacttcacgcgaggtactgattatcttctcaagtctgactacatgcgatcccagcaacatttacgatctgataaaaacactgaaggcagccaagattcgcgtctctgttatcggcctgtctgcagaggtgcgggtctgcacggtgctagctcgcgagacaggcggaacttaccatgttattcttgatgagtctcattacaaagaactgctcacccatcacgttagcccacctcccgctagcagctcaagtgagtgttctctgatccggatgggcttccctcagcacacaattgcctctctatctgatcaggatgcgaagccctccttctctatggctcatctcgatgggaataccgagcccggtttaactctaggcggatatttctgcccacaatgcagggcaaagtactgcgaattacccgtggagtgcaagatctgcggtttaaccctcgtttcagcgcctcatctcgctagatcgtatcatcacctgtttcccctggacgcttttcaagagatacccctggaggagtataacggggagaggttttgctatggctgtcagggggagctcaaagatcaacacgtatatgtgtgcgccgtgtgccagaacgtcttctgcgtagactgtgatgtgttcgttcatgattccctccactgctgtccagggtgcatccacaaaatacccgcaccctcaggggtgtag

SEQ ID NO: 118272 - DNA, 1188 bp, Artificial Sequence
  derived and/or modified sequence
atggacgaggagcctgaacggaccaaacggtgggagggcggatatgagcgcacatgggaaattctgaaagaggacgaaagcgggagcttgaaggccacgatagaggacattctcttcaaggccaagaggaaacgcgtcttcgaacatcacgggcaggtacgtctcggcatgatgcggcatctttatgtggtggtcgatggtagcagaacaatggaggatcaggacctcaagcccaaccgcctgacctgcactttaaagcttttggagtacttcgtggaggagtattttgatcagaaccctattagtcaaatcgggattattgtgactaaaagcaaacgagccgagaagttgaccgagctgagtggcaaccctagaaaacatattacatctttgaagaaggctgtggacatgacttgccacggcgagccttcactgtacaactccctgagtatcgctatgcaaacattgaaacacatgcccggacacacaagccgcgaggtgctgattatattctcatccctgacgacgtgcgatcctagcaatatttacgacctaatcaaaaccttgaaggctgcaaaaatacgtgtgtcagtaattggtctttctgctgaggttcgagtttgcaccgtgctggcaagagagactggtggcacttatcacgttattctcgatgagagtcattacaaggagcttctaacccaccatgtgagccctccccctgctagttcttcctcagaatgtagcttgatcaggatgggattcccccagcatacaatcgcaagcctgtcggaccaggacgccaagcctagcttctccatggcgcaccttgacggaaacacggagcctggacttaccctaggcggatatttctgccctcagtgtcgcgctaaatattgtgaattgcctgtcgaatgtaagatttgcggccttacactggtatcagctccacaccttgcccgatcctatcaccaccttttcccactagacgcttttcaggagatacctctcgaggaatacaatggagagaggttctgctacggttgccagggggagctcaaggatcaacatgtctatgtttgtgccgtgtgccagaacgtcttttgtgttgattgtgatgtattcgtccacgacagcctccactgttgccccggttgcatacacaagattccagccccatctggtgtgtag

SEQ ID NO: 118273 - protein, 267 aa, Artificial Sequence
  derived and/or modified sequence
MVLGNSHLFMNRSNKLAVIASHIQESRFLYPGKNGRLGDFFGDPGNPPEFNPSGSKDGKYELLTSANEVIVEEIKDLMTKSDIKGQHTETLLAGSLAKALCYIHRMNKEVKDNQEMKSRILVIKAAEDSALQYMNFMNVIFAAQKQNILIDACVLDSDSGLLQQACDITGGLYLKVPQMPSLLQYLLWVFLPDQDQRSQLILPPPVHVDYRAACFCHRNLIEIGYVCSVCLSIFCNFSPICTTCETAFKISLPPVLKAKKKKLKVSA

SEQ ID NO: 118274 - protein, 258 aa, Artificial Sequence [sequence omitted]

SEQ ID NO: 118275 - protein, 308 aa, Artificial Sequence
  derived and/or modified sequence
MVSDEDELNLLVIVVDANPIWWGKQALKESQFTLSKCIDAVMVLGNSHLFMNRSNKLAVIASHIQESRFLYPGKNGRLGDFFGDPGNPPEFNPSGSKDGKYELLTSANEVIVEEIKDLMTKSDIKGQHTETLLAGSLAKALCYIHRMNKEVKDNQEMKSRILVIKAAEDSALQYMNFMNVIFAAQKQNILIDACVLDSDSGLLQQACDITGGLYLKVPQMPSLLQYLLWVFLPDQDQRSQLILPPPVHVDYRAACFCHRNLIEIGYVCSVCLSIFCNFSPICTTCETAFKISLPPVLKAKKKKLKVSA

SEQ ID NO: 118276 - DNA, 927 bp, Artificial Sequence
  derived and/or modified sequence
atggtttccgacgaggatgaacttaatctactcgtgatcgtggtcgacgctaaccccatttggtgggggaaacaggcacttaaagagtctcaatttacactgagtaagtgcatcgatgcggtgatggtgctagggaacagccacttatttatgaacaggagcaacaaattggctgtgattgccagccatattcaggagtctagattcctgtatcctggaaagaacggacgccttggtgactttttcggcgaccctggtaatccaccagagttcaatccatcagggagcaaagatggcaagtacgaattattaacaagtgctaacgaggtcatagttgaagagatcaaggaccttatgactaagtccgacattaaaggacagcatacagagacgctgttggccgggtctctcgcgaaggctctttgctatatacacagaatgaacaaagaagtcaaggataaccaagagatgaaatcgcgtatactcgtcattaaggccgccgaggattccgccttacagtacatgaatttcatgaatgtaatttttgcagctcaaaaacagaacattttgatcgatgcctgtgtgctagatagtgactcagggttgttgcagcaggcttgcgacattaccggcggcctgtatctgaaagtgccacagatgccgtctcttttgcagtatctgctctgggtgttcctgcccgaccaggatcagcgttcccagctcattctacccccacctgtgcatgtggactaccgcgcggcttgtttttgccacagaaatctaattgagataggctacgtatgttccgtgtgtctctccatcttctgtaactttagccccatctgcaccacatgcgagaccgcctttaaaatatccttgcccccagtgttaaaggccaagaagaaaaagctgaaggtatcagcttag

SEQ ID NO: 118277 - DNA, 927 bp, Artificial Sequence
  derived and/or modified sequence
atggtgtctgatgaagatgagctgaacctgctggtgattgtggtggatgccaaccccatctggtggggcaagcaggccctgaaggagagccagttcaccctgagcaagtgcattgatgctgtgatggtgctgggcaacagccacctgttcatgaacagaagcaacaagctggccgtcatcgccagccacatccaggagagccgcttcctgtacccaggcaagaatggccgcctgggggacttcttcggggaccccggcaaccccccagagttcaaccccagcggcagcaaggatggcaagtatgagctgctgaccagcgccaatgaggtgattgtggaggagatcaaggacctgatgaccaagagtgacatcaagggccagcacacagagaccctgctggccggcagcctggccaaggccctgtgctacatccacaggatgaacaaggaggtgaaggacaaccaggagatgaagagccgcatcctggtgatcaaggctgctgaggacagcgccctgcagtacatgaacttcatgaatgtcatctttgctgcccagaagcagaacatcctgattgatgcctgtgtgctggacagcgacagcggcctgctgcagcaggcctgtgacatcaccggcggcctgtacctgaaggtgccccagatgcccagcctgctgcagtacctgctgtgggtgttcctgcctgaccaggaccagaggagccagctgatcctgcccccacctgtgcacgtggactacagagctgcctgcttctgccacaggaacctgattgagatcggctacgtgtgcagcgtgtgcctgagcatcttctgcaacttcagccccatctgcaccacctgtgaaacagccttcaagatcagcctgccccctgtgctgaaggccaagaagaagaagctgaaggtgtctgcctag

SEQ ID NO: 118278 - DNA, 927 bp, Artificial Sequence
  derived and/or modified sequence
atggtgagcgacgaggacgagctgaacctgctggtgatcgtggtggacgcaaaccctatctggtggggtaaacaggccttgaaagaaagccagttcacgttgtctaagtgtattgacgcagtgatggtactgggcaactcgcatctatttatgaatagaagtaacaagcttgccgtgatcgcatctcacattcaagagtcacgcttcctttacccgggcaagaatggcagacttggggacttttttggagatcctggaaatccccctgaatttaatccctccggcagcaaggacggtaagtatgaactgctgacatccgcaaacgaggtgatcgttgaggaaattaaggacctgatgacaaagagtgacatcaaagggcaacatacagagactctgcttgccggaagtctggcgaaggcattatgctatattcaccggatgaataaggaggtgaaagacaaccaggaaatgaaaagccgcatcttggtcattaaagctgcagaggactcagcccttcagtacatgaactttatgaacgttatattcgccgctcagaaacagaatattttaatcgatgcctgcgtcctggattcagatagtggtttgttgcagcaagcgtgtgacattactggtggactctacctgaaggtacctcagatgcctagtctgcttcaatacctcctgtgggttttcttacctgatcaggaccagaggagccagcttatcttgcctccccctgttcatgtagactatcgcgcagcctgcttttgccatcggaatcttatcgagatagggtacgtgtgttccgtgtgcttgagcatattttgcaacttctccccaatttgcactacgtgcgaaactgcgtttaaaatctcactccctcctgtgcttaaggctaagaagaagaagctaaaggtgtctgcctag

SEQ ID NO: 118279 - DNA, 927 bp, Artificial Sequence
  derived and/or modified sequence
atggtcagcgatgaagatgaattaaacctgctcgtcatcgtcgtggatgccaaccccatctggtggggcaagcaagccctgaaagaatcccagttcacattgtccaagtgcatcgacgcggtgatggtgctgggaaattcccatttatttatgaaccgctcaaacaaactggccgtgattgcatcacacatccaggagagccgatttttgtatcccggtaaaaacggacgactgggcgacttctttggcgatcccggaaatccccctgagtttaacccgtccggctccaaggacgggaagtatgagctgctaactagtgcaaacgaagttattgtggaggagattaaagatctaatgaccaagagtgacatcaaggggcagcataccgaaacgctccttgccggaagcctggctaaggcattgtgttacatacaccgtatgaacaaggaagtgaaggacaaccaggagatgaaaagtcgtatccttgtgatcaaggccgctgaagattctgccctgcagtatatgaattttatgaacgtcatcttcgctgctcagaaacagaatattctgatcgacgcatgtgtactggactccgactcagggctcctgcagcaggcatgcgatatcactgggggactgtacctgaaagtccctcagatgcccagtttgctgcagtatctcctttgggtattcttgcccgaccaagaccagcggtctcagctgatcctgcctccaccagtgcatgtcgactacagagcagcgtgtttttgtcaccgaaatctgatcgaaattggttatgtctgctccgtgtgtctaagcatcttttgtaacttttctcctatctgcactacatgcgagacggcattcaagattagtttaccacccgtgctgaaagccaaaaaaaagaagctcaaggtaagcgcctag

SEQ ID NO: 118280 - DNA, 1472 bp, Artificial Sequence
  derived and/or modified sequence
acttgctctgcgctgaggtgctgggacagccatggtttcagacgttcactttatccaaatgcatagatgccgtgatggtgctgggaaattcgcatttattcatgaatcgttccaacaaacttgctgtgatagcaagtcacattcaagaaagccgattcttatatcctggaaagaatggcagacttggagacttcttcggagaccctggcaaccctcctgaatttaatccctctgggagtaaagatggaaaatacgaacttttaacctcagcaaatgaagttattgttgaagagattaaagatctaatgaccaaaagtgacataaagggtcaacatacagaaactttgctggcaggatccctggccaaagccctttgctacattcatagaatgaacaaggaagttaaagacaatcaggaaatgaaatcaaggatattggtgattaaggctgcagaagacagtgcgttgcagtatatgaacttcatgaatgtcatctttgcagcacagaaacagaatattttgattgatgcctgtgttttagactccgactcagggctcctccaacaggcttgtgacatcacgggaggactgtacctgaaggtgcctcagatgccttctcttctgcagtatttgctgtgggtgtttcttcccgatcaagatcagagatctcagttaatcctcccacccccagttcatgttgactacagggctgcttgcttctgtcatcgaaatctcattgaaattggttatgtctgttctgtgtgtttgtcaatattctgcaatttcagccccatttgtactacgtgcgagacagcctttaaaatttctctgcctccagtgctgaaagccaagaaaaagaaactgaaagtgtctgcctgaggataaaatattttccccatcttttagagctgttaatagaaattatatagcagattctttgttgggaagactgaaaaaaataaagataggtataggataatttttaatatggtgaccttacagaaaatatttcccaaacatccttttcatcctgtgcttctggaggactgatttgtttgagggaatcattctatgcattatatcctaaaatattctatgactggtttctgtccatgtttgtggctttcatttttttaatgggatgactattagtcaaagtcagcttgtcatgactcatcataggctttctaacctactccctgaatccgggtcctcattgtgaaatgcatgccatacgaaatttgaacgtagctttggaaaaagggactatttgtggagtaatggcattaatcaacatagaacatcttatttgaatcaacagttaacttcagtagtcatgtgaataaaattcttattgtctaaattgagacagcctcagatatttgcagatatttactttttgtctgatatcagtacatatttggacaaagtcatctaaataatagtttgtcaccaaataactacaaaatctca

SEQ ID NO: 118281 - DNA, 2319 bp, Artificial Sequence
  derived and/or modified sequence
aagatgaattgaatcttctggttattgtagttgatgccaacccaatttggtggggaaagcaagcattaaaggaatctcagttcactttatccaaatgcatagatgccgtgatggtgctgggaaattcgcatttattcatgaatcgttccaacaaacttgctgtgatagcaagtcacattcaagaaagccgattcttatatcctggaaagaatggcagacttggagacttcttcggagaccctggcaaccctcctgaatttaatccctctgggagtaaagatggaaaatacgaacttttaacctcagcaaatgaagttattgttgaagagattaaagatctaatgaccaaaagtgacataaagggtcaacatacagaaactttgctggcaggatccctggccaaagccctttgctacattcatagaatgaacaaggaagttaaagacaatcaggaaatgaaatcaaggatattggtgattaaggctgcagaagacagtgcgttgcagtatatgaacttcatgaatgtcatctttgcagcacagaaacagaatattttgattgatgcctgtgttttagactccgactcagggctcctccaacaggcttgtgacatcacgggaggactgtacctgaaggtgcctcagatgccttctcttctgcagtatttgctgtgggtgtttcttcccgatcaagatcagagatctcagttaatcctcccacccccagttcatgttgactacagggctgcttgcttctgtcatcgaaatctcattgaaattggttatgtctgttctgtgtgtttgtcaatattctgcaatttcagccccatttgtactacgtgcgagacagcctttaaaatttctctgcctccagtgctgaaagccaagaaaaagaaactgaaagtgtctgcctgaggataaaatattttccccatcttttagagctgttaatagaaattatatagcagattctttgttgggaagactgaaaaaaataaagataggtataggataatttttaatatggtgaccttacagaaaatatttcccaaacatccttttcatcctgtgcttctggaggactgatttgtttgagggaatcattctatgcattatatcctaaaatattctatgactggtttctgtccatgtttgtggctttcatttttttaatgggatgactattagtcaaagtcagcttgtcatgactcatcataggctttctaacctactccctgaatccgggtcctcattgtgaaatgcatgccatacgaaatttgaacgtagctttggaaaaagggactatttgtggagtaatggcattaatcaacatagaacatcttatttgaatcaacagttaacttcagtagtcatgtgaataaaattcttattgtctaaattgagacagcctcagatatttgcagatatttactttttgtctgatatcagtacatatttggacaaagtcatctaaataatagtttgtcaccaaataactacaaaatctcattttaaatgagtaaggagaacgtgtacagaagcaaattttcttcaaaatagttgtgggaagagcttatatgtgaaagcttatgactggttttgagggagaacttactggagaaaatggactctatgttaagtatggttttcagatagaattctttccttttttaatgaggaaaaaaaatccacattaatattgaaactgcacctgtaatcccagcactttgggaggctgaggacagaggattgcttgagcccaggagttcgagagcagcctgggcagcaaagtgagaccccatctctactaaaaatttaaatgtatttattaaaactgttctctagaagctttggactgaatcccaaaagtgtttataagttcaaaagcaaaagtatttgtaatttcaacaacaaaaaatgtatttctttatgtaatcttgaaattattaaaagtccttttagcttctagcacatatttgtacaaagagtttaaggaatggtggctggtttggtttgttttttaaaaatgtttactgacgaggccgggcgtggtggctcacccctgcaatcccagcactttgggaggccgaggcaggcagatcacaaggtcaggagttcaagatcagcctggccagtatggtgaaaccctgtctctactaaaaatagaaaaattagccatgcgaagtagcaggtgcctgtagttccagctactcgggaggctgaggcaagagaattgcttgaatccaggaggcagaggttgcagtgagccaagatagcgcctctgtactccagcctgggtgacagagcgagactctgtatc

SEQ ID NO: 118282 - DNA, 2655 bp, Artificial Sequence
  derived and/or modified sequence
acttgctctgcgctgaggtgctgggacagccatggtttcagacgaagatgaattgaatcttctggttattgtagttgatgccaacccaatttggtggggaaagcaagcattaaaggaatctcagttcactttatccaaatgcatagatgccgtgatggtgctgggaaattcgcatttattcatgaatcgttccaacaaacttgctgtgatagcaagtcacattcaagaaagccgattcttatatcctggaaagaatggcagacttggagacttcttcggagaccctggcaaccctcctgaatttaatccctctgggagtaaagatggaaaatacgaacttttaacctcagcaaatgaagttattgttgaagagattaaagatctaatgaccaaaagtgacataaagggtcaacatacagaaactttgctggcaggatccctggccaaagccctttgctacattcatagaatgaacaaggaagttaaagacaatcaggaaatgaaatcaaggatattggtgattaaggctgcagaagacagtgcgttgcagtatatgaacttcatgaatgtcatctttgcagcacagaaacagaatattttgattgatgcctgtgttttagactccgactcagggctcctccaacaggcttgtgacatcacgggaggactgtacctgaaggtgcctcagatgccttctcttctgcagtatttgctgtgggtgtttcttcccgatcaagatcagagatctcagttaatcctcccacccccagttcatgttgactacagggctgcttgcttctgtcatcgaaatctcattgaaattggttatgtctgttctgtgtgtttgtcaatattctgcaatttcagccccatttgtactacgtgcgagacagcctttaaaatttctctgcctccagtgctgaaagccaagaaaaagaaactgaaagtgtctgcctgaggataaaatattttccccatcttttagagctgttaatagaaattatatagcagattctttgttgggaagactgaaaaaaataaagataggtataggataatttttaatatggtgaccttacagaaaatatttcccaaacatccttttcatcctgtgcttctggaggactgatttgtttgagggaatcattctatgcattatatcctaaaatattctatgactggtttctgtccatgtttgtggctttcatttttttaatgggatgactattagtcaaagtcagcttgtcatgactcatcataggctttctaacctactccctgaatccgggtcctcattgtgaaatgcatgccatacgaaatttgaacgtagctttggaaaaagggactatttgtggagtaatggcattaatcaacatagaacatcttatttgaatcaacagttaacttcagtagtcatgtgaataaaattcttattgtctaaattgagacagcctcagatatttgcagatatttactttttgtctgatatcagtacatatttggacaaagtcatctaaataatagtttgtcaccaaataactacaaaatctcattttaaatgagtaaggagaacgtgtacagaagcaaattttcttcaaaatagttgtgggaagagcttatatgtgaaagcttatgactggttttgagggagaacttactggagaaaatggactctatgttaagtatggttttcagatagaattctttccttttttaatgaggaaaaaaaatccacattaatattgaaactgcacctgtaatcccagcactttgggaggctgaggacagaggattgcttgagcccaggagttcgagagcagcctgggcagcaaagtgagaccccatctctactaaaaatttaaatgtatttattaaaactgttctctagaagctttggactgaatcccaaaagtgtttataagttcaaaagcaaaagtatttgtaatttcaacaacaaaaaatgtatttctttatgtaatcttgaaattattaaaagtccttttagcttctagcacatatttgtacaaagagtttaaggaatggtggctggtttggtttgttttttaaaaatgtttactgacgaggccgggcgtggtggctcacccctgcaatcccagcactttgggaggccgaggcaggcagatcacaaggtcaggagttcaagatcagcctggccagtatggtgaaaccctgtctctactaaaaatagaaaaattagccatgcgaagtagcaggtgcctgtagttccagctactcgggaggctgaggcaagagaattgcttgaatccaggaggcagaggttgcagtgagccaagatagcgcctctgtactccagcctgggtgacagagcgagactctgtatcaaaaaaaaaaaagatcgggcacgttggctcacgcctgtaatcccagcactttgggaggccaaggtgggtggatcacgaggtcaggagtgatcaggctgggtttctgttttgttttgttttgtgagacagagtctcgctctgttgcccaggctggggtgcagtggtgcaagctcggctctctgcaagctctgtctcctgggttcacgccattctcctgcctcagcctcccaagtagctgggattactactctactgaacccatgaggcagaaatttgagaccatcctgcccaa

SEQ ID NO: 118283 - DNA, 927 bp, Artificial Sequence
  derived and/or modified sequence
atggtgagcgacgaggacgagctgaacctgctggtgatcgtggtggacgccaaccccatctggtggggcaagcaggccctgaaggagagccagttcaccctgagcaagtgcatcgacgccgtgatggtgctgggcaacagccacctgttcatgaacagaagcaacaagctggccgtgatcgccagccacatccaggagagcagattcctgtaccccggcaagaacggcagactgggcgacttcttcggcgaccccggcaacccccccgagttcaaccccagcggcagcaaggacggcaagtacgagctgctgaccagcgccaacgaggtgatcgtggaggagatcaaggacctgatgaccaagagcgacatcaagggccagcacaccgagaccctgctggccggcagcctggccaaggccctgtgctacatccacagaatgaacaaggaggtgaaggacaaccaggagatgaagagcagaatcctggtgatcaaggccgccgaggacagcgccctgcagtacatgaacttcatgaacgtgatcttcgccgcccagaagcagaacatcctgatcgacgcctgcgtgctggacagcgacagcggcctgctgcagcaggcctgcgacatcaccggcggcctgtacctgaaggtgccccagatgcccagcctgctgcagtacctgctgtgggtgttcctgcccgaccaggaccagagaagccagctgatcctgcccccccccgtgcacgtggactacagagccgcctgcttctgccacagaaacctgatcgagatcggctacgtgtgcagcgtgtgcctgagcatcttctgcaacttcagccccatctgcaccacctgcgagaccgccttcaagatcagcctgccccccgtgctgaaggccaagaagaagaagctgaaggtgagcgcctag

SEQ ID NO: 118284 - protein, 462 aa, Artificial Sequence
  derived and/or modified sequence
MESTPSRGLNRVHLQCRNLQEFLGGLSPGVLDRLYGHPATCLAVFRELPSLAKNWVMRMLFLEQPLPQAAVALWVKKEFSKAQEESTGLLSGLRIWHTQLLPGGLQGLILNPIFRQNLRIALLGGGKAWSDDTSQLGPDKHARDVPSLDKYAEERWEVVLHFMVGSPSAAVSQDLAQLLSQAGLMKSTEPGEPPCITSAGFQFLLLDTPAQLWYFMLQYLQTAQSRGMDLVEILSFLFQLSFSTLGKDYSVEGMSDSLLNFLQHLREFGLVFQRKRKSRRYYPTRLAINLSSGVSGAGGTVHQPGFIVVETNYRLYAYTESELQIALIALFSEMLYRFPNMVVAQVTRESVQQAIASGITAQQIIHFLRTRAHPVMLKQTPVLPPTITDQIRLWELERDRLRFTEGVLYNQFLSQVDFELLLAHARELGVLVFENSAKRLMVVTPAGHSDVKRFWKRQKHSS

SEQ ID NO: 118285 - protein, 138 aa, Artificial Sequence
  derived and/or modified sequence
MESTPSRGLNRVHLQCRNLQEFLGGLSPGVLDRLYGHPATCLAVFRELPSLAKNWVMRMLFLEQPLPQAAVALWVKKEFSKAQEESTGLLSGLRIWHTQLLPGGLQGLILNPIFRQNLRIALLGGTGITGVSHCAWPG

SEQ ID NO: 118286 - protein, 220 aa, Artificial Sequence
  derived and/or modified sequence
MRMLFLEQPLPQAAVALWVKKEFSKAQEESTGLLSGLRIWHTQLLPGGLQGLILNPIFRQNLRIALLGGGKAWSDDTSQLGPDKHARDVPSLDKYAEERWEVVLHFMVGSPSAAVSQDLAQLLSQAGLMKSTEPGEPPCITSAGFQFLLLDTPAQLWYFMLQYLQTAQSRGMDLVEILSFLFQLSFSTLGKDYSVEGMSDSLLNFLQHLREFGLVFQRKV

SEQ ID NO: 118287 - DNA, 1389 bp, Artificial Sequence
  derived and/or modified sequence
atggagtcgaccccatccagggggctgaatagggtccaccttcaatgcaggaacctgcaggaattcctgggcgggctaagtcctggcgtcttggatagactatacggacatcctgctacttgtctggctgttttccgcgaacttccaagcctggccaagaactgggttatgagaatgctcttcctggagcagccattaccgcaagccgccgtggcactgtgggtgaagaaggaattctctaaggcccaggaggagtctacaggcctgctcagtggtttgaggatctggcacacccagctgctgcccggggggctgcaggggctcattcttaatcctattttccggcaaaatctgaggatagctttgctggggggcggaaaggcgtggagtgacgatacttcccagttgggaccggacaagcacgcccgagacgttccgtcacttgacaagtacgccgaggaaagatgggaggtggtgttgcattttatggttggctctcccagcgccgctgtatcccaggaccttgcacaactactgtcgcaagcggggctcatgaagtctacagagcccggggagcccccttgtattacgagcgctggcttccagttcctgctcttagacacacctgcacagctctggtatttcatgctgcagtacctgcaaaccgctcagagccgtgggatggatctggtggaaatcttgtccttcctttttcagttgtccttcagcactctgggcaaggactatagcgtcgaaggcatgagcgactccctattaaactttctgcaacacctcagagagttcggactcgtttttcagagaaaaagaaaatcccggcgatactatcccactaggctggccattaacctatcttccggcgtctccggggcaggcggcaccgtgcatcagcccgggttcatcgtggttgaaacaaattacagactctatgcttatactgagagcgagctgcagattgctctcatagcattgttcagcgaaatgctataccggttcccgaatatggtggtagcccaagtgacccgtgaatctgtacaacaagccattgcgtcaggaattacagcacagcagattattcactttcttagaacacgtgcccatcccgtcatgctgaaacaaactcccgtcttgccgcctaccatcactgaccagatcaggttatgggagctggaaagggatagacttcgcttcaccgagggagtgctctacaaccagtttttgtcccaggtcgattttgaacttcttctggcgcacgcccgagagctgggcgtactcgtctttgaaaatagtgccaaacgcttgatggtggtgactcctgctgggcatagcgatgtcaagcgcttttggaaacggcaaaagcacagttcatag

SEQ ID NO: 118288 - DNA, 1389 bp, Artificial Sequence
  derived and/or modified sequence
atggagagcactcccagtagaggattgaacagagtgcatctacagtgccgaaatctgcaggagttcctcgggggactttctcccggggtccttgataggctgtatgggcatccagcaacatgccttgcggtgttccgggagctcccaagcctggccaagaattgggtgatgcgcatgctctttcttgaacagccgctaccccaggccgccgtggctctatgggtgaaaaaggaattttctaaagcccaggaagaaagcacagggcttttgtctggcctccggatttggcatacgcagctccttccaggagggctccagggcctaattctgaatcctatcttcagacagaatctccgcatcgctctgttgggaggcggaaaagcttggtccgacgacacatctcaattgggccctgacaagcatgcccgcgatgtgcccagtctggacaagtatgcggaggagaggtgggaagtcgtcctgcatttcatggttgggagccccagtgcagccgtcagccaggatctggcacagctcctgtcccaggcaggccttatgaaatccacagagcccggagaaccaccgtgtataacatccgcaggctttcaattcctcttacttgatactccggcccaattgtggtatttcatgttgcagtatctccagacagctcaaagccggggtatggacctcgtggagatacttagcttcctgtttcagttaagcttctcaactctgggaaaggattactccgtggaagggatgtccgattccctgttaaattttttgcagcaccttagagaattcgggcttgtgttccaaaggaagcgcaagagccggcgatactatcctacacgccttgccattaacctttccagcggagtttccggcgccgggggcaccgtccaccagccagggttcattgtggtagaaacgaattaccggctctacgcttacacagagtccgagttgcagatagccttaattgccttgtttagcgaaatgctgtaccggtttcccaacatggtcgtcgcacaggttactcgtgagtctgtgcagcaggccatcgcttctggtatcaccgcccaacaaattatccattttcttagaacacgggcgcatcccgtcatgcttaagcagactcccgtgctgccgccaaccattactgaccaaatacgtttgtgggaattggagcgagaccggctgcgcttcacagagggtgtgctctataatcagttcctctcccaagttgatttcgagcttctcctcgcccatgcacgggaactcggggtgcttgttttcgagaactctgccaaacgactcatggtagtcacgccagcaggccatagcgacgtgaagcgattctggaagaggcagaagcacagctcgtag

SEQ ID NO: 118289 - DNA, 1389 bp, Artificial Sequence
  derived and/or modified sequence
atggaatcaacccctagccgggggttgaatagagtgcacttacagtgccgcaatttgcaggagtttctaggaggcctgtcccctggcgttctggatagattgtatgggcaccccgcaacatgcctggccgtctttcgggaactgccgagtttggccaaaaattgggtaatgcggatgctgttcctggagcagcccctgccacaggctgctgtcgccctatgggtaaaaaaggaattctctaaggcccaggaggaaagtacagggctgctgtctggattacggatctggcatacacagctgctacctggcgggctgcagggactgatcctgaaccctatttttagacagaacctgcggatcgcactactcggaggaggcaaggcctggtctgatgacacgagccaactggggcctgataagcatgctagggacgtgccctccctggataagtatgctgaagagcgatgggaggtagtcttacactttatggtgggaagcccaagtgccgctgtgtcccaggatttggctcaacttctctcacaggcagggctaatgaagtcgaccgagccaggcgagcctccctgcatcacatcagctgggtttcaattcctgttactggacacccctgcgcaactctggtacttcatgctgcagtacctacagactgctcaatcacggggtatggacttagtggaaattctcagttttctcttccagctttcttttagcacactcggtaaggattactcagtggagggaatgtccgacagcctactgaactttctccagcacctgagagaattcggcctggttttccagcggaagcgaaaatctcggagatactatccaaccaggttagcaattaacctgagctcaggcgtaagtggtgcaggggggaccgtgcatcagccaggtttcatcgttgtggaaacaaattacagactctatgcctacacggagagtgaactccagattgctttaattgcgctgttttcagagatgctttacaggttccctaatatggtcgttgcacaggtgacacgggaaagtgtccaacaggctattgccagcgggattaccgctcagcaaataatccattttttgaggacacgcgcacatcccgtcatgctgaagcaaacccccgtgcttccacccacaatcacagaccagattaggctgtgggagctagagcgcgataggctcaggttcaccgaaggagttctgtacaaccagttcttgtctcaggtcgattttgaactcctgcttgcacatgctagagagctcggtgtactagtgttcgagaacagcgccaagaggctaatggtggtgaccccagccggccactctgatgtcaagaggttctggaagcgtcaaaaacactcctcttag

SEQ ID NO: 118290 - DNA, 1389 bp, Artificial Sequence
  derived and/or modified sequence
atggagagtaccccttcgcgcggccttaatcgcgtgcaccttcagtgccgaaacctgcaagaattcctgggggggctcagcccgggcgtgctggacaggctgtacggccaccccgctacctgcttagcggtgtttcgggagctccccagcctagctaagaactgggtgatgaggatgctcttcttggagcaaccccttccccaggccgctgtggctctgtgggttaagaaagagtttagcaaggcacaggaggaaagcacgggcctcctgagcgggcttcggatttggcacacccaacttctgccagggggattacaaggactgatccttaatcccatatttagacagaacttgaggattgccttactggggggtggaaaggcatggtccgatgatacgtctcagctgggccctgacaaacacgctcgcgacgtgccgtctctggataagtatgccgaggagcgctgggaggtagttcttcacttcatggtgggcagcccatctgccgcagtgagccaagatctggcacagctgctatcccaggccgggctgatgaagagcacggaacccggggagcctccttgcatcactagcgccggctttcagtttctcctgcttgatactccagcccaattgtggtattttatgctgcagtatttacagaccgctcaatcacgcggaatggatctggtggagattcttagcttcctcttccagctgagcttctccacgcttggcaaagactatagcgtcgaaggcatgagcgattctttactcaatttcctgcagcacttgagagagttcggactggtgttccaaagaaagaggaagagtagacggtactatcccaccaggctcgcaataaatttaagtagcggcgtttctggcgcaggaggtacagttcaccagcccggcttcatcgtcgtcgagaccaactatagactgtatgcctatacggagagtgaactccaaatcgccctgattgctctgtttagtgaaatgctgtaccgctttccgaacatggtcgttgctcaagttacccgtgagtccgtccagcaagccatcgcctcaggcattaccgctcagcagatcattcactttctgcgaactcgagcgcacccggtcatgctcaaacagacccccgtgttgcctccaacaatcacagaccagattcgcctttgggagctggagcgcgataggcttagatttactgaaggcgtgctctataaccagttcctgtcacaggtggactttgagctactgctcgcccatgccagggagctgggagtgttggtgttcgaaaatagcgctaaaagactcatggttgtgacaccagccgggcattccgatgtcaaacgcttctggaagaggcagaaacactcttcgtag

SEQ ID NO: 118291 - DNA, 1389 bp, Artificial Sequence
  derived and/or modified sequence
atggagagtacgccatcacggggacttaaccgggtccaccttcagtgtcgaaatctacaagaatttctggggggcctgtcacccggggttctcgatcggctgtatgggcacccagctacttgcctcgctgtatttcgggagttgccctctctggcgaagaattgggtgatgcgcatgctgtttcttgaacagcccctgccgcaagccgccgttgctctgtgggtcaagaaagagttctcaaaagctcaggaagaaagcaccggcctgctgagcggtctaagaatttggcacacacagctcctgccgggcggacttcagggtctgatcctgaatcccatatttaggcagaatctccgcatcgccctgctcggcggcgggaaggcctggtccgacgatacaagccaactgggacccgacaaacatgcccgagatgttccttctttagacaagtacgccgaagaacggtgggaagtcgtgcttcacttcatggtgggttcaccctctgccgccgtttcacaggacctggcccaattgctaagccaggccgggcttatgaaatcaaccgagcctggagaacccccctgcattacgtccgccggtttccagtttctactgttggatactccagcccagctttggtactttatgctccagtacttacagacggcgcaaagccgaggcatggacctggtcgagatcctctccttcctgtttcaactcagcttctcaacactcggcaaagactacagcgtggaagggatgtcggatagccttctgaactttttgcagcacctgagggagttcggcctcgtgttccaacgtaagcgtaaaagtagaagatactacccgacacggcttgcaattaacctctcttcaggcgtgagcggtgctggcggaacagtgcaccagcccggcttcatagtagtggaaaccaattacaggctgtacgcatataccgagagcgagctccagatcgccctgattgctcttttctctgagatgctatatcggtttccaaacatggtcgtcgcccaggtcacacgggaaagcgtccaacaagcaatcgcgagtggcatcaccgcccagcaaatcattcacttcctgcgaacccgggcccatcctgtgatgctgaagcagacccccgttctccccccaactattaccgaccagatcaggctctgggagctggagcgtgatagattacgcttcacggagggagttctgtacaatcagtttttaagccaagttgatttcgagctgctgctggctcatgcccgggaactcggtgtgctggtgtttgaaaacagcgctaaacgactgatggtcgtcacacctgctggacatagtgacgttaagaggttttggaagcgacagaagcacagctcctag

SEQ ID NO: 118292 - DNA, 417 bp, Artificial Sequence
  derived and/or modified sequence
atggagagtactccctcacgcggactgaaccgagtgcatctccagtgccggaatttacaggaatttctcggcgggctctccccaggagtgctggatcggctttatggacatcctgccacttgcttagcagttttccgcgaactaccatctctggctaagaattgggtaatgaggatgttgttccttgaacagcccctcccacaagcggctgtggccctctgggtcaagaaggaattcagcaaagcgcaggaagaaagtacgggcttacttagcggacttagaatatggcacacgcaactgctcccagggggtctccaaggattgatcctgaacccaattttccggcaaaacctgcgaatcgccctgctagggggtacaggaatcactggcgtgagccattgcgcctggccaggctag

SEQ ID NO: 118293 - DNA, 1389 bp, Artificial Sequence
  derived and/or modified sequence
atggaatcaacaccatctagagggttaaatagagtgcacctccagtgtcgtaacttgcaagagttcctcggcggcctgagccctggcgtccttgaccgtctttacggccatccagccacatgccttgctgtgtttagggagttgcctagcctcgcgaaaaattgggtgatgaggatgttgtttctggaacaaccactgccacaggcagccgtggctctgtgggtcaaaaaagagttcagcaaagctcaggaagagtctaccggactcctgagcggtcttagaatttggcacactcagttgttacctgggggcctgcagggcctgatcctgaaccccatatttagacaaaacctgcggattgccctgctggggggcggaaaggcatggtctgacgacaccagtcaactggggccagacaagcatgcccgggacgtgccttccctggacaaatatgctgaggagcgctgggaggttgtgctccatttcatggtggggagtccgtcagccgctgtaagccaggatcttgcccaattactgtcccaagccgggctcatgaaaagcactgagccaggcgagcctccttgtattacctccgctggattccagtttctcctgctggatacacccgcccagctgtggtacttcatgctgcagtacctccagaccgctcagtccaggggtatggacctggtcgagattctgagctttctgttccagctcagctttagcacattaggtaaagattactcagtagaaggaatgtccgattcgctcctcaactttcttcaacacctaagggaattcggacttgtattccagaggaaacggaagagccggcgttactacccaactcggctggcaatcaatctctcaagtggcgtgtcaggggcgggtggaacggttcaccagccaggattcatcgtggtcgaaacaaattacaggctgtacgcctataccgagtccgagcttcagatcgctttgatcgccctttttagcgagatgctgtatagatttccgaatatggtcgttgcccaggtaaccagggaatctgttcagcaggccattgcctccggcattaccgcccagcaaatcattcatttccttcgaacacgcgcacatccagttatgttgaagcagaccccagtgctgcccccgacaattacagaccagatcaggttatgggagctcgagagagatcgcctccgctttaccgaaggggtgctgtataatcaattcttgtcccaggtggatttcgagctgttgctcgcgcatgcgagagagctcggcgtgttggttttcgagaactcagctaaaagactgatggtggtaacccctgcaggtcatagcgatgtgaaacgtttctggaagagacagaagcacagctcctag

SEQ ID NO: 118294 - DNA, 417 bp, Artificial Sequence
  derived and/or modified sequence
atggagagcactccctcaaggggccttaatcgcgtgcacctacagtgtcggaatctgcaggagttcctgggcggccttagccccggggtcttagacagactgtatggtcacccagccacgtgcttggctgtcttccgggagctgccttctttggcaaagaactgggtaatgcgtatgttgtttttggagcaacctctgccgcaggcagcagtggcactgtgggttaagaaggaattttccaaagcccaggaagagagcaccgggctgttatcaggactgagaatttggcacactcagctgcttcccggaggactccagggactcatcctcaaccctatcttccgccaaaacctaaggatagcacttctgggcggtacaggaatcactggcgtcagtcactgcgcttggccagggtag

SEQ ID NO: 118295 - DNA, 1389 bp, Artificial Sequence
  derived and/or modified sequence
atggagtcgaccccttccaggggcctcaatagggtgcatttgcagtgtagaaacctgcaggaatttttggggggcctttccccaggagttctggaccgactgtacggtcacccagcgacttgtctagctgtgtttcgggagctaccgtcattggctaagaattgggtgatgcgtatgctgttcttggagcagccccttccacaggctgccgtcgcactgtgggtgaagaaagaattctctaaagcccaagaggagagtaccgggttactatccgggctgaggatctggcacacgcaactcctgcctggtggcctgcagggacttatacttaaccccattttccgtcagaacctccgcatcgcattgttgggaggggggaaggcgtggtccgatgataccagccagctgggccccgataagcatgctagagacgtccccagtctggacaaatacgctgaagagcgttgggaagtggtgctgcatttcatggtgggcagcccaagcgcagctgtttctcaagacctcgctcagctcctttctcaggccggccttatgaagtccacagagcctggggagcctccttgtatcactagcgctggattccagttcctcctacttgacacccccgctcagctttggtatttcatgctgcaatacttgcagaccgctcagagccgaggaatggacctcgtggagattctctctttcctgttccagctgagtttttccacactgggtaaagattatagtgtggagggcatgagcgacagccttcttaacttcctgcaacacctccgtgaattcggcctggtgtttcagaggaagcgcaaatctcggcggtactatccgacccgcctggccataaacctcagctccggcgtgtcgggggctggagggaccgtgcaccagccaggcttcattgttgtcgaaaccaactataggctgtatgcttacacggagagcgaactgcagatcgcgttaatcgctcttttctccgaaatgctctataggtttccaaatatggtggtagcacaggtgacaagggagtccgtgcagcaagctatcgcaagcggaattactgcccagcagatcatccattttctgagaacccgcgcccaccctgtcatgctgaaacagacacctgtgttaccccctaccataaccgaccagattaggctctgggaattggaaagggaccggcttcgcttcaccgagggagttctgtacaaccagtttctctctcaggttgacttcgaacttttgcttgctcatgctagagagctgggcgtgctagtcttcgagaattcagctaaaagattaatggttgtgacgcctgcgggccacagtgatgtgaaacgattttggaaaaggcaaaaacattcaagttag

SEQ ID NO: 118296 - DNA, 417 bp, Artificial Sequence
  derived and/or modified sequence
atggagtcgacccccagccgtggacttaatagagtccatctgcagtgcaggaatctccaggagttcctcggaggcctcagccctggggttctcgacagactgtacggacacccagccacgtgcctggccgttttcagggaattgccatctctagcaaagaactgggtcatgagaatgctatttctggaacaaccactgccccaggccgccgttgctctgtgggtcaagaaggagttctcaaaagcccaggaggagtccaccgggttgctgtcgggattaaggatctggcatacccaactgttgccaggcggactgcagggactcattctgaaccctatttttcggcaaaatctccgcatcgctttacttggaggcacaggcataacaggcgtgtcccattgtgcgtggcctggatag

SEQ ID NO: 118297 - DNA, 1389 bp, Artificial Sequence
  derived and/or modified sequence
atggaatccacgcccagcagaggtctcaatcgagtccacctgcagtgcaggaatctccaggaattccttggtggtctgtcccctggggtactcgaccggctctatgggcacccagctacctgcttggcagttttccgcgaactaccatcattggccaaaaactgggtgatgcgcatgctcttcctggagcagccactgccacaggccgccgtggcgttgtgggtgaaaaaagaattcagtaaggcccaggaggaatctactggcctcctttcaggcctgaggatttggcatacacaactgctacctgggggtttacaagggctaatcctgaatcctatattccgccagaaccttcgcatagcacttctcggtgggggcaaagcttggtccgacgacacaagtcagctgggtccggacaagcacgctcgggacgtgcccagccttgacaaatacgctgaagagaggtgggaggttgtcctccacttcatggttggcagcccctctgctgccgtctcgcaggatctcgctcagctcctaagccaagcaggtctcatgaagtcaacagagcctggggagcctccttgtatcacctctgccgggttccagttcctgctgcttgacacccctgcgcagctgtggtattttatgcttcagtatttacagactgcacagagccggggcatggatcttgtagaaatcctctctttcctcttccagttgtccttttccacacttggtaaagattattcagtggagggcatgtccgactctctgttgaacttcctgcagcatctgagggagttcggcctcgtcttccaaagaaaacgcaaaagtcgacggtactaccccactcggctggctatcaacctgtcaagtggcgtttctggagctggtgggactgtgcatcagcctggattcattgttgtggagaccaactatagactctacgcctacacagagtccgagttacagatcgcactgatcgctctcttttccgagatgctgtacagattccctaacatggtggtggcccaggtgacacgtgagtccgtacagcaggcaatcgcctccggcatcaccgcccagcagattatccacttcctgaggacccgcgcgcaccctgtaatgctgaagcagacccctgtcttacctccaaccattactgaccagattcggctttgggagctcgaacgcgaccgcttgcgtttcactgagggtgtgctctacaatcagtttctgtcacaggtcgattttgagttgcttctggcgcatgcccgcgagttgggggtgttagtgttcgagaatagcgcaaagagacttatggtggtgaccccggcgggacattccgatgtcaaaaggttctggaaacgtcagaaacactctagctag

SEQ ID NO: 118298 - DNA, 1389 bp, Artificial Sequence
  derived and/or modified sequence
atggaatctacccctagtcgggggctaaatcgggtgcatctgcagtgtcgcaatctccaggaattcctgggcggcctgagcccgggcgtcctggataggctctatgggcaccctgctacctgcttggctgtatttcgcgaacttccttcattagcgaagaactgggtcatgaggatgctgtttctggaacaacctttgccacaggctgctgtggctctctgggtcaagaaggagtttagcaaggcacaggaggaatccaccggcttattatctggcctgcgcatttggcacacgcagttgttgcctgggggcctgcaaggtttgatccttaatcccattttccgacagaatctcaggattgctctgcttgggggtggaaaagcgtggtcagatgatacctctcagctgggcccagataagcatgcgcgtgatgtccctagcctggacaagtatgccgaggagagatgggaggtcgttttacacttcatggtgggttcccccagtgccgccgtgtcccaggatctggctcagctcctctcccaggccggactaatgaaaagcaccgaacctggggagcccccttgcattacatctgccggctttcagtttttgctgctcgatacccccgcccagctgtggtattttatgttgcagtacctacagaccgcacaatcccgtggcatggatctggtagaaattctttcttttctattccagttaagtttttccacgctggggaaggactattccgtggaaggtatgtctgactctctgttgaattttctccagcatctccgggaatttggcctggtcttccagcggaaacgaaaaagtcggcgctattatccaacaaggctggcaatcaacttgtcatctggggtgtcaggggccgggggaactgtgcaccagcccggtttcatagtcgtggagaccaactatcgcctctatgcttacacggagagcgagctacagatcgcactgatcgctctgttctcagagatgctttatcgctttcctaatatggtggttgcgcaggtcaccagggagtccgtacagcaagccattgcgtctggcataacagcacagcagattatccatttcctgagaactagggcgcatccagttatgttgaagcagacccctgttctgccacccacaattactgaccagatcagattatgggagctcgaacgcgaccgccttagatttacagagggggtcctttataaccagtttctgtcacaggtggatttcgagctcctcttagcacatgcccgcgaactaggtgtgttggtgtttgaaaacagcgcgaagaggctgatggttgtgacccctgctggacattccgacgttaaacgcttttggaagcggcagaaacacagctcctag

SEQ ID NO: 118299 - DNA, 1389 bp, Artificial Sequence
  derived and/or modified sequence
atggaaagtaccccttcgagaggtctgaacagagtacacttgcagtgtcgcaatctgcaagagtttctcggtgggctgtcacccggggtgttggataggttatacgggcatccagctacatgcctcgcagtctttcgagagcttccttcccttgcaaaaaattgggtgatgagaatgctgttcctcgagcaacccttgccgcaggccgcagtggccctctgggtgaagaaggagttttcaaaggcccaagaggagtctactggactcctgtccggcctgcgaatctggcacacccaactgctgccgggcggacttcagggcttgatccttaatcccattttccggcaaaacctcaggatcgctctcttagggggaggaaaagcctggtcagatgatacgtcccagctggggccagacaaacacgccagagatgtgcccagcctcgacaagtatgcagaggaaaggtgggaagtggtgctgcacttcatggtggggagcccgagtgcagctgtttcacaggatttggctcagcttctgtctcaggccgggctgatgaagagcaccgagccaggcgaaccaccctgcatcacatcagcaggcttccagtttctgcttttagatacaccagctcagctgtggtatttcatgctccaatacctacaaaccgcccaatcgagaggtatggaccttgtcgagatcttgagcttcttgttccagttgtcattttcgacgttaggcaaagactatagcgtggagggcatgtcggactcactccttaacttcctgcaacatttaagggaatttggccttgtgttccagaggaagcgcaagagccgacgttattacccaactcgtttggccattaacctatctagcggcgtgtccggcgctggagggaccgtgcaccagcctgggtttatagttgtggaaaccaactatagactctatgcttacaccgagtcagagctccagatagcactcattgcacttttcagtgaaatgttgtaccggtttccgaatatggttgtggcgcaggtgacacgcgagtcagtgcagcaggcgattgcatccgggataactgcccagcagataatacacttcctccgcactagggctcatcctgtcatgctgaaacaaacacctgtcttacctcccaccatcaccgatcagatccggctgtgggaactagagagggatcgccttcgatttacagagggagtgctgtacaaccagttcctgagccaagtggacttcgagcttctgctcgcgcacgcaagagagctcggcgtcctcgtgtttgagaacagcgctaaaagactgatggtggttacccccgcgggccacagtgacgtgaaaagattctggaagaggcagaagcactcttcctag

SEQ ID NO: 118300 - DNA, 1389 bp, Artificial Sequence
  derived and/or modified sequence
atggaatctacaccgagccgcggcctcaaccgagtccacctgcaatgcagaaacctgcaagaattcctgggcggactgagtccgggcgtgctggaccgactgtacggtcatcccgctacctgtcttgcggtctttcgggaactcccctcgctggcaaagaactgggtcatgcggatgctgttccttgagcaacccctgccacaggctgcagtggccctctgggtgaagaaagaattctccaaggctcaggaagagagcaccggcctactctccgggcttagaatttggcatacacagttgttgccgggtgggctgcagggcctgatcctgaacccaatctttaggcagaacctcaggatcgccctgctgggcggggggaaagcatggagtgacgatacaagtcaactgggcccagacaagcacgcccgggatgtgcccagcctagataaatatgcagaagaaagatgggaagtcgttctacacttcatggtcggatctccctccgctgccgtttcgcaggatctggctcagctgctgagccaggcagggctcatgaagtccacagaacctggggaaccgccttgcatcacaagcgcaggcttccagttcctcctgctggataccccagctcagctctggtattttatgctccagtatctacagaccgcccagtcaagaggtatggatctcgtggaaatcttgtcttttctgttccaactgtccttctcaactctaggaaaggactacagcgtcgaaggtatgtcagattctttgcttaacttcctacaacacttgagggagtttggcttggtgtttcagcgcaaacggaaaagtcgcagatattatccaactcgccttgcaattaacctcagctccggggtgtccggggctggtggcacggtgcaccagcccggattcatcgtagtggagactaactatcgtttatacgcttatacagaaagtgagcttcagatagctctgattgccctcttcagcgagatgctgtatcggtttcctaatatggtggtggcccaggtgactcgtgagtctgttcaacaagccattgcttccggtattaccgcacagcaaattattcatttcctccgcacgcgggcgcatcccgtcatgctgaaacagacacccgtactaccccccactattactgatcagatcagattgtgggagctcgaaagggataggctcagattcaccgagggtgtcttatacaaccagttcctgtcacaggtggatttcgaactgctgctggctcacgctcgggagttaggagtgttggtgtttgagaatagcgccaagagactgatggttgtgaccccagccgggcatagtgatgtgaagcgcttctggaagaggcagaagcactctagctag

SEQ ID NO: 118301 - DNA, 417 bp, Artificial Sequence
  derived and/or modified sequence
atggagagcacgccctccagaggactgaaccgcgtgcatctgcagtgtaggaacttacaggaatttctcggaggtctgagcccgggcgtgctggataggctgtacggacaccccgccacatgcctcgccgtctttcgagagctgcccagcctagccaaaaactgggtgatgaggatgctgttcctggagcagcctctcccccaagccgccgtggccctgtgggtaaagaaagagttttcaaaagcacaggaagaaagcacaggcttgctgagcgggttgaggatctggcatacccagctgctgcctggggggctccagggcctcatcctgaaccctatctttcgccagaacttgcggatcgcccttctgggtggaaccggcattaccggcgtctcacattgcgcatggccggggtag

SEQ ID NO: 118302 - DNA, 417 bp, Artificial Sequence
  derived and/or modified sequence
atggagagcactccatcgcgcggcctcaatagggtgcacctgcagtgcagaaacctacaggagtttctcggcggactaagtcccggcgtgctggaccgcctctacggacatccagccacttgcctcgcggtgtttcgtgagctcccctctcttgcaaagaactgggtaatgagaatgctcttcctggagcagcccttgccccaggccgctgtcgctctttgggttaagaaagagttttcgaaagcccaggaagagagtaccgggctgcttagtggactgcggatttggcacacccaactgctgcccggtggcctgcaaggacttatcctgaatcccatcttccgacaaaacctccggatcgctctcctggggggaactggtatcacaggggtctcacattgtgcatggccggggtag

SEQ ID NO: 118303 - DNA, 417 bp, Artificial Sequence
  derived and/or modified sequence
atggaatccaccccatcaagaggactgaaccgcgtccacctccagtgcagaaaccttcaggagtttttgggcggtttgtcgccgggtgtgttagataggctgtacggccaccctgccacatgcctcgcagtgttcagggagctcccatcactcgccaaaaattgggttatgcgaatgttatttttggagcagccgctccctcaggccgctgtggccctgtgggtgaaaaaggaattcagcaaggcccaggaggagagcacaggactgctgtcaggcctcaggatctggcacacacaactgctgccaggggggctgcagggcctgattcttaaccccatctttcgccaaaaccttagaatcgccctcttgggggggacgggcattaccggtgtgtcacactgcgcctggcctggctag

SEQ ID NO: 118304 - DNA, 1389 bp, Artificial Sequence
  derived and/or modified sequence
atggagagcactccctcccggggtctgaatcgggtgcacctgcagtgtcgaaatttgcaggaatttctgggtggcctaagccctggggtattggataggctctacggtcacccggccacctgtctggcggtcttcagagaactcccctctctggccaagaactgggtcatgagaatgctctttttagagcaacccctgccccaggcggcggtggcactctgggtaaagaaggaattctccaaggctcaagaggaatcgaccggtttattgagcggccttaggatttggcatacacagctgctgccaggcggcctccaggggctgattctgaatccaattttcaggcagaacctccgaatcgctttattgggcggaggcaaagcgtggtccgatgatacatcccaattagggccagataaacatgcccgagacgtcccttctctagataagtatgccgaggagagatgggaggtagtcctgcacttcatggtgggcagcccgagcgcagcagtctcgcaagacctggcacaactgctgagccaagcgggtctcatgaagagtaccgaacctggcgagccgccatgcatcactagcgctggcttccaatttctcctgctggacacacccgcccaattgtggtactttatgctacagtatctgcagacagcccagtctaggggcatggacttggtggaaattctctcattcctgtttcagctcagctttagcaccttagggaaagattactcagtcgaagggatgtcagactcactgctcaacttccttcagcacttgagggagttcggcttggttttccagcggaaacggaaatctagacggtactacccgactcgcctcgccataaacctcagctctggggtctcaggagcaggaggtaccgtgcaccaacctgggtttatcgtggtggagaccaactaccgcctatacgcatataccgaaagcgaacttcaaatagcactaatagcgctattcagcgaaatgctgtatagattccctaacatggtagtggcccaggtaacaagagagagcgtgcagcaggcgattgcttccggaataaccgcccagcagataatccactttctgcgaactcgtgcccacccagtcatgctgaaacaaaccccagtgctgccaccgaccattaccgatcagattagattatgggaactggagcgcgataggttaaggttcaccgaaggtgttctatacaatcagttcctctctcaggtcgacttcgaactactcctcgcccatgctagagaattgggggtacttgtcttcgagaactccgctaaaaggctaatggtggttactccagccggccactccgacgtgaaaaggttctggaagaggcagaaacattccagttag

SEQ ID NO: 118305 - DNA, 663 bp, Artificial Sequence
  derived and/or modified sequence
atgagaatgctatttttagagcagccactaccacaggcggccgtggctctgtgggtcaaaaaggaattcagcaaggctcaggaggaatctaccggattactttccgggctgcgcatctggcacacccaactgctgccaggagggctccaaggtctgatactgaatcctattttcagacaaaaccttcgcatcgccctattgggaggaggcaaagcttggtcagacgacacgagccagcttggccctgacaaacatgctcgggatgtgcctagcttggacaaatacgcagaggagcgatgggaggtggtacttcacttcatggtagggagcccttcggcggccgtgtctcaagacctagctcagctgctaagccaagctggattgatgaagagcacagagcctggggagccaccatgtataaccagcgcggggttccagttcctgcttctcgatacaccagcccagctttggtatttcatgctacagtacttacagacagcccaaagccgcggcatggacttagtggagatacttagctttttattccagctctcattcagcaccctcggaaaagattattccgtggaaggaatgtctgactctctgcttaattttttacagcacctaagggagttcgggttggttttccaacgcaaggtgtag

SEQ ID NO: 118306 - DNA, 663 bp, Artificial Sequence
  derived and/or modified sequence
atgcgaatgctttttttggaacagccgctaccacaggctgccgtcgcattatgggtgaaaaaggagttcagcaaggcccaagaggagagcaccggtctcctctcgggactgcggatttggcacacccagctcttaccgggagggctgcaggggttaattctgaacccgatattcaggcagaaccttagaatcgctctcctgggcggggggaaggcctggtccgacgatacctcacagctgggaccagacaagcatgctagggacgtgcccagcctggacaagtacgccgaggagagatgggaggtcgtgctccacttcatggtaggatctccttctgccgcggtgtcccaggatctcgctcagctgctgtcccaggccggcctaatgaagtcaaccgagccgggggaaccgccctgtatcacaagcgccgggtttcaatttctgttgctcgacacacccgcacaactgtggtatttcatgctccagtatctgcagacagcccagagtcgcgggatggacttggtcgagattctcagcttcttgttccaactctctttctcaaccctaggtaaggactactcggtagaggggatgtctgactccctactgaactttctccagcatctccgtgagttcggactggtcttccagcgaaaagtgtag

SEQ ID NO: 118307 - DNA, 663 bp, Artificial Sequence
  derived and/or modified sequence
atgcggatgttgttcttagagcagccacttcctcaggcagctgttgctctctgggtgaagaaagaattcagtaaggctcaggaggaaagcactggcctactcagtggtctgcgtatatggcacacgcagctccttcctgggggactccagggactgattctgaatcctatcttcagacaaaatttgcgaatcgccctgctgggtgggggcaaggcctggagtgacgataccagccagttgggtccagacaaacacgctcgagatgtgccatctctcgataagtatgctgaggaacgatgggaagtcgtgctccatttcatggttggttcaccttccgccgctgtatcccaggatctggcccagctgctcagccaggcagggctgatgaagagcacagagcctggagagccaccctgcatcacttccgctggctttcagttcctgctcctggacacaccagcccaactgtggtatttcatgttgcagtacttacagaccgcccagtccaggggcatggatctggtggagattctgtcctttctgttccaactgtcattttccacattggggaaagactactcagtggaaggtatgtccgatagcctactgaacttcctgcaacatcttagggagtttgggcttgtgtttcagagaaaggtgtag

SEQ ID NO: 118308 - DNA, 663 bp, Artificial Sequence
  derived and/or modified sequence
atgaggatgctgtttctcgagcagccactccctcaggccgctgtggctctttgggtaaaaaaggaattcagtaaggcacaagaagaatctaccgggttactgtctgggctgcggatatggcacacacagcttctccccggaggcctccaagggctcattctgaaccccatttttcggcagaatctgagaattgccttgttgggaggcggcaaggcctggagtgacgacacctcacaactcggccctgacaaacacgcacgtgatgtgccctctttggataagtatgcagaggaaagatgggaagtggttttgcactttatggtaggatctccgagtgctgctgtgtcacaggacctggcgcagctgctctcccaagcgggcctgatgaagtcaaccgaacccggcgagccaccctgtataacatccgcgggattccagtttcttttgctagatactccagcccagctttggtattttatgctgcagtacctgcagactgcacagtctcgaggaatggatctggtcgagattctgtcctttctctttcagctctcatttagcactctgggaaaggactattcagtagaggggatgagcgactctctgctcaattttctgcagcacctgagggagtttggcctggtgtttcagagaaaagtctag

SEQ ID NO: 118309 - DNA, 663 bp, Artificial Sequence
  derived and/or modified sequence
atgcggatgctgttcctcgagcagcctctgccccaagccgctgtggcactgtgggtgaagaaggaattctcaaaagcacaagaggaatctacagggttgctgtccgggctgaggatatggcacactcagcttctgccgggcggactgcagggtctcatcctcaatcccatctttaggcagaatcttaggattgcactgctgggaggcggcaaagcttggtcagatgatacctcccaattggggcctgataagcacgccagggacgtgccaagcctggataagtacgcggaggagaggtgggaagtggttctccattttatggtcggctccccgtcagcggccgtatcgcaggacctagctcagctgctgtctcaagctggccttatgaagtcaacagagcccggagagcccccttgcatcacttcggcgggctttcagtttctactgctagacacccccgcacagctgtggtactttatgctccagtatctccaaacagcccagagcaggggcatggacctggtggagatcttgtcgttcctgtttcagctgagcttctcaacactgggcaaggactactccgtggagggaatgagtgattcactgcttaactttctccagcatctgcgcgagttcgggcttgtgttccaacggaaggtttag

SEQ ID NO: 118310 - DNA, 663 bp, Artificial Sequence
  derived and/or modified sequence
atgaggatgctatttctggagcagcctcttcctcaggcagccgtagccctctgggtgaagaaggagttctccaaagcacaggaggagtcaaccggcttgctgagcggccttcggatatggcatacccaacttcttcccggaggactccaaggtctgattctcaacccaatcttccgacaaaatctccgcatcgcacttttgggaggaggcaaggcctggtctgacgatactagtcagttgggacctgacaagcacgctagggacgtccctagtctggacaagtacgcagaggagaggtgggaagtggtgctccatttcatggtcggctcaccttccgctgctgtctctcaggatcttgctcagctgctcagccaggcaggtctgatgaaatcaaccgagcctggagagcccccttgcataacctctgcagggttccagttcctcctactcgatacaccagcacagctctggtactttatgctacaatatctacagaccgctcagagtcgtggaatggatctcgtggagattctgagctttctgttccagctgtccttcagtacattgggaaaggattactctgtcgagggtatgagcgactcactacttaattttctacaacacttgcgggaattcgggcttgttttccagcgcaaggtgtag

SEQ ID NO: 118311 - DNA, 1735 bp, Artificial Sequence
  derived and/or modified sequence
attctcatcctcttcacttttccactcctccccttacctcccttctcttctgaattctccattctgggctcttgcctgtgaaatctttctttgctttccccatcttttcctcgcattttttcaccatctttccctcaatctccaggagccaatgcgagactttggctccgattaagcgacggcccgagactcggggtgcgcgaggaggatcgacagagtggtgatggagagcaccccttcaaggggactgaaccgagtacacctacaatgcaggaatctgcaggaattcttagggggcctgagccctggggtattggaccgattgtatgggcaccctgccacatgtctggctgtcttcagggagctcccatccttggctaagaactgggtgatgcggatgctctttctggagcagcctttgccacaggctgctgtagctctgtgggtaaagaaggaattcagcaaggctcaggaggaaagtacagggctgctgagcggcctccggatctggcacacacagctgctcccaggcgggctccagggcctcatcctcaaccccattttccgccagaacctccgcattgcccttctgggtggggggaaggcctggtctgatgacacaagtcagctgggaccagacaagcatgcccgggacgttccctcccttgacaagtacgccgaggagcgatgggaggtggtcttgcacttcatggtgggctcccccagtgcagctgtcagccaggacttggctcagctcctcagccaggctgggctcatgaagagtactgaacctggagagccgccctgcattacttccgctggcttccagttcctgttgctggacaccccggctcagctctggtactttatgttgcagtatttgcagacagcccagagccggggcatggacctggtagagattctctccttcctcttccagctcagcttctctactctgggcaaggattactctgtggaaggtatgagtgattctctgttgaacttcctgcaacatctgcgtgagtttgggcttgttttccagaggaagaggaaatctcggcgttactaccccacacgcctggccatcaatctctcatcaggtgtctctggagctgggggcactgtgcatcagccaggtttcattgtcgtggaaaccaattaccgactgtatgcctacacggagtcggagctgcagattgccctcattgccctcttctctgagatgctctatcggttccccaacatggtggtggcgcaggtgacccgggagagtgtgcagcaggcaatcgccagtggcatcacagcccagcagataatccatttcctaaggacaagagcccacccagtgatgctcaaacagacacctgtgctgccccccaccatcaccgaccagatccggctctgggagctggaaagggacagactccggttcactgagggtgtcctgtataaccagttcctgtcgcaagtggactttgagctgctgctggcccacgcgcgggagctgggcgtgctcgtgttcgagaactcggccaagcggctcatggtggtgaccccggccgggcacagcgacgtcaagcgcttttggaagcggcagaaacatagctcctgagagcgcgggacttggacacggacctcggcgggcgggactgggcggggcggggcatcagaactcaggtgttttttatttacgcgtcagggcttttcttgtttaataaagttatgatagctagca

SEQ ID NO: 118312 - DNA, 1673 bp, Artificial Sequence
  derived and/or modified sequence
ctcccttctcttctgaattctccattctgggctcttgcctgtgaaatctttctttgctttccccatcttttcctcgcattttttcaccatctttccctcaatctccaggagccaatgcgagactttggctccgattaagcgacggcccgagactcggggtgatggagagcaccccttcaaggggactgaaccgagtacacctacaatgcaggaatctgcaggaattcttagggggcctgagccctggggtattggaccgattgtatgggcaccctgccacatgtctggctgtcttcagggagctcccatccttggctaagaactgggtgatgcggatgctctttctggagcagcctttgccacaggctgctgtagctctgtgggtaaagaaggaattcagcaaggctcaggaggaaagtacagggctgctgagcggcctccggatctggcacacacagctgctcccaggcgggctccagggcctcatcctcaaccccattttccgccagaacctccgcattgcccttctgggtggggggaaggcctggtctgatgacacaagtcagctgggaccagacaagcatgcccgggacgttccctcccttgacaagtacgccgaggagcgatgggaggtggtcttgcacttcatggtgggctcccccagtgcagctgtcagccaggacttggctcagctcctcagccaggctgggctcatgaagagtactgaacctggagagccgccctgcattacttccgctggcttccagttcctgttgctggacaccccggctcagctctggtactttatgttgcagtatttgcagacagcccagagccggggcatggacctggtagagattctctccttcctcttccagctcagcttctctactctgggcaaggattactctgtggaaggtatgagtgattctctgttgaacttcctgcaacatctgcgtgagtttgggcttgttttccagaggaagaggaaatctcggcgttactaccccacacgcctggccatcaatctctcatcaggtgtctctggagctgggggcactgtgcatcagccaggtttcattgtcgtggaaaccaattaccgactgtatgcctacacggagtcggagctgcagattgccctcattgccctcttctctgagatgctctatcggttccccaacatggtggtggcgcaggtgacccgggagagtgtgcagcaggcaatcgccagtggcatcacagcccagcagataatccatttcctaaggacaagagcccacccagtgatgctcaaacagacacctgtgctgccccccaccatcaccgaccagatccggctctgggagctggaaagggacagactccggttcactgagggtgtcctgtataaccagttcctgtcgcaagtggactttgagctgctgctggcccacgcgcgggagctgggcgtgctcgtgttcgagaactcggccaagcggctcatggtggtgaccccggccgggcacagcgacgtcaagcgcttttggaagcggcagaaacatagctcctgagagcgcgggacttggacacggacctcggcgggcgggactgggcggggcggggcatcagaactcaggtgttttttatttacgcgtcagggcttttcttgtttaataaagttatgatagctagca

SEQ ID NO: 118313 - DNA, 598 bp, Artificial Sequence
  derived and/or modified sequence
cccttctcttctgaattctccattctgggctcttgcctgtgaaatctttctttgctttccccatcttttcctcgcattttttcaccatctttccctcaatctccaggagccaatgcgagactttggctccgattaagcgacggcccgagactcggggtgcgcgaggaggatcgacagagtggtgatggagagcaccccttcaaggggactgaaccgagtacacctacaatgcaggaatctgcaggaattcttagggggcctgagccctggggtattggaccgattgtatgggcaccctgccacatgtctggctgtcttcagggagctcccatccttggctaagaactgggtgatgcggatgctctttctggagcagcctttgccacaggctgctgtagctctgtgggtaaagaaggaattcagcaaggctcaggaggaaagtacagggctgctgagcggcctccggatctggcacacacagctgctcccaggcgggctccagggcctcatcctcaaccccattttccgccagaacctccgcattgcccttctgggtggtacagggattacaggtgtgagccactgcgcctggccaggg

SEQ ID NO: 118314 - DNA, 1673 bp, Artificial Sequence
  derived and/or modified sequence
ctcccttctcttctgaattttccattctgggctcttgcctgtgaaatctttctttgctttccccatcttttcctcgcattttttcaccatctttccctcaatctccaggagccaatgcgagactttggctccgattaagcgacggcccgagactcggggtgatggagagcaccccttcaaggggactgaaccgagtacacctacaatgcaggaatctgcaggaattcttagggggcctgagccctggggtattggaccgattgtatgggcaccctgccacatgtctggctgtcttcagggagctcccatccttggctaagaactgggtgatgcggatgctctttctggagcagcctttgccacaggctgctgtagctctgtgggtaaagaaggaattcagcaaggctcaggaggaaagtacagggctgctgagcggcctccggatctggcacacacagctgctcccaggcgggctccagggcctcatcctcaaccccattttccgccagaacctccgcattgcccttctgggtggggggaaggcctggtctgatgacacaagtcagctgggaccagacaagcatgcccgggacgttccctcccttgacaagtacgccgaggagcgatgggaggtggtcttgcacttcatggtgggctcccccagtgcagctgtcagccaggacttggctcagctcctcagccaggctgggctcatgaagagtactgaacctggagagccgccctgcattacttccgctggcttccagttcctgttgctggacaccccggctcagctctggtactttatgttgcagtatttgcagacagcccagagccggggcatggacctggtagagattctctccttcctcttccagctcagcttctctactctgggcaaggattactctgtggaaggtatgagtgattctctgttgaacttcctgcaacatctgcgtgagtttgggcttgttttccagaggaagaggaaatctcggcgttactaccccacacgcctggccatcaatctctcatcaggtgtctctggagctgggggcactgtgcatcagccaggtttcattgtcgtggaaaccaattaccgactgtatgcctacacggagtcggagctgcagattgccctcattgccctcttctctgagatgctctatcggttccccaacatggtggtggcgcaggtgacccgggagagtgtgcagcaggcaatcgccagtggcatcacagcccagcagataatccatttcctaaggacaagagcccacccagtgatgctcaaacagacacctgtgctgccccccaccatcaccgaccagatccggctctgggagctggaaagggacagactccggttcactgagggtgtcctgtataaccagttcctgtcgcaagtggactttgagctgctgctggcccacgcgcgggagctgggcgtgctcgtgttcgagaactcggccaagcggctcatggtggtgaccccggccgggcacagcgacgtcaagcgcttttggaagcggcagaaacatagctcctgagagcgcgggacttggacacggacctcggcgggcgggactgggcggggcggggcatcagaactcaggtgttttttatttacgcgtcagggcttttcttgtttaataaagttatgatagctagca

SEQ ID NO: 118315 - DNA, 598 bp, Artificial Sequence
  derived and/or modified sequence
cccttctcttctgaattctccattctgggctctttcctgtgaaatctttctttgctttccccatcttttcctcgcattttttcaccatctttccctcaatctccaggagccaatgcgagactttggctccgattaagcgacggcccgagacttggggtgcgcgaggaggatcgacagagtggtgatggagagcaccccttcaaggggactgaaccgagtacacctacaatgcaggaatctgcaggaattcttagggggcctgagccctggggtattggaccgattgtatgggcaccctgccacatgtctggctgtcttcagggagctcccatccttggctaagaactgggtgatgcggatgctctttctggagcagcctttgccacaggctgctgtagctctgtgggtaaagaaggaattcagcaaggctcaggaggaaagtacagggctgctgagcggcctccggatctggcacacccagctgctcccaggcgggctccagggcctcatcctcaaccccattttccgccagaacctccgcattgcccttctgggtggtacagggattacaggtgtgagccactgcgcctggccaggg

SEQ ID NO: 118316 - DNA, 1735 bp, Artificial Sequence
  derived and/or modified sequence
attctcatcctcttcacttttccactcctccccttacctcccttctcttctgaattttccattctgggctcttgcctgtgaaatctttctttgctttccccatcttttcctcgcattttttcaccatctttccctcaatctccaggagccaatgcgagactttggctccgattaagcgacggcccgagactcggggtgcgcgaggaggatcgacagagtggtgatggagagcaccccttcaaggggactgaaccgagtacacctacaatgcaggaatctgcaggaattcttagggggcctgagccctggggtattggaccgattgtatgggcaccctgccacatgtctggctgtcttcagggagctcccatccttggctaagaactgggtgatgcggatgctctttctggagcagcctttgccacaggctgctgtagctctgtgggtaaagaaggaattcagcaaggctcaggaggaaagtacagggctgctgagcggcctccggatctggcacacacagctgctcccaggcgggctccagggcctcatcctcaaccccattttccgccagaacctccgcattgcccttctgggtggggggaaggcctggtctgatgacacaagtcagctgggaccagacaagcatgcccgggacgttccctcccttgacaagtacgccgaggagcgatgggaggtggtcttgcacttcatggtgggctcccccagtgcagctgtcagccaggacttggctcagctcctcagccaggctgggctcatgaagagtactgaacctggagagccgccctgcattacttccgctggcttccagttcctgttgctggacaccccggctcagctctggtactttatgttgcagtatttgcagacagcccagagccggggcatggacctggtagagattctctccttcctcttccagctcagcttctctactctgggcaaggattactctgtggaaggtatgagtgattctctgttgaacttcctgcaacatctgcgtgagtttgggcttgttttccagaggaagaggaaatctcggcgttactaccccacacgcctggccatcaatctctcatcaggtgtctctggagctgggggcactgtgcatcagccaggtttcattgtcgtggaaaccaattaccgactgtatgcctacacggagtcggagctgcagattgccctcattgccctcttctctgagatgctctatcggttccccaacatggtggtggcgcaggtgacccgggagagtgtgcagcaggcaatcgccagtggcatcacagcccagcagataatccatttcctaaggacaagagcccacccagtgatgctcaaacagacacctgtgctgccccccaccatcaccgaccagatccggctctgggagctggaaagggacagactccggttcactgagggtgtcctgtataaccagttcctgtcgcaagtggactttgagctgctgctggcccacgcgcgggagctgggcgtgctcgtgttcgagaactcggccaagcggctcatggtggtgaccccggccgggcacagcgacgtcaagcgcttttggaagcggcagaaacatagctcctgagagcgcgggacttggacacggacctcggcgggcgggactgggcggggcggggcatcagaactcaggtgttttttatttacgcgtcagggcttttcttgtttaataaagttatgatagctagca

SEQ ID NO: 118317 - DNA, 1673 bp, Artificial Sequence
  derived and/or modified sequence
ctcccttctcttctgaattctccattctgggctctttcctgtgaaatctttctttgctttccccatcttttcctcgcattttttcaccatctttccctcaatctccaggagccaatgcgagactttggctccgattaagcgacggcccgagacttggggtgatggagagcaccccttcaaggggactgaaccgagtacacctacaatgcaggaatctgcaggaattcttagggggcctgagccctggggtattggaccgattgtatgggcaccctgccacatgtctggctgtcttcagggagctcccatccttggctaagaactgggtgatgcggatgctctttctggagcagcctttgccacaggctgctgtagctctgtgggtaaagaaggaattcagcaaggctcaggaggaaagtacagggctgctgagcggcctccggatctggcacacccagctgctcccaggcgggctccagggcctcatcctcaaccccattttccgccagaacctccgcattgcccttctgggtggggggaaggcctggtctgatgacacaagtcagctgggaccagacaagcatgcccgggacgttccctcccttgacaagtacgccgaggagcgatgggaggtggtcttgcacttcatggtgggctcccccagtgcagctgtcagccaggacttggctcagctcctcagccaggctgggctcatgaagagtactgaacctggagagccgccctgcattacttccgctggcttccagttcctgttgctggacaccccggctcagctctggtactttatgttgcagtatttgcagacagcccagagccggggcatggacctggtagagattctctccttcctcttccagctcagcttctctactctgggcaaggattactctgtggaaggtatgagtgattctctgttgaacttcctgcaacatctgcgtgagtttgggcttgttttccagaggaagaggaaatctcggcgttactaccccacacgcctggccatcaatctctcatcaggtgtctctggagctgggggcactgtgcatcagccaggtttcattgtcgtggaaaccaattaccgactgtatgcctacacggagtcggagctgcagattgccctcattgccctcttctctgagatgctctatcggttccccaacatggtggtggcgcaggtgacccgggagagtgtgcagcaggcaatcgccagtggcatcacagcccagcagataatccatttcctaaggacaagagcccacccagtgatgctcaaacagacacctgtgctgccccccaccatcaccgaccagatccggctctgggagctggaaagggacagactccggttcactgagggtgtcctgtataaccagttcctgtcgcaagtggactttgagctgctgctggcccacgcgcgggagctgggcgtgctcgtgttcgagaactcggccaagcggctcatggtggtgaccccggccgggcacagcgacgtcaagcgcttttggaagcggcagaaacatagctcctgagagcgcgggacttggacacggacctcggcgggcgggactgggcggggcggggcatcagaactcaggtgttttttatttacgcgtcagggcttttcttgtttaataaagttatgatagctagca

SEQ ID NO: 118318 - DNA, 1735 bp, Artificial Sequence
  derived and/or modified sequence
attctcatcctcttcacttttccactcctccccttacctcccttctcttctgaattctccattctgggctctttcctgtgaaatctttctttgctttccccatcttttcctcgcattttttcaccatctttccctcaatctccaggagccaatgcgagactttggctccgattaagcgacggcccgagacttggggtgcgcgaggaggatcgacagagtggtgatggagagcaccccttcaaggggactgaaccgagtacacctacaatgcaggaatctgcaggaattcttagggggcctgagccctggggtattggaccgattgtatgggcaccctgccacatgtctggctgtcttcagggagctcccatccttggctaagaactgggtgatgcggatgctctttctggagcagcctttgccacaggctgctgtagctctgtgggtaaagaaggaattcagcaaggctcaggaggaaagtacagggctgctgagcggcctccggatctggcacacccagctgctcccaggcgggctccagggcctcatcctcaaccccattttccgccagaacctccgcattgcccttctgggtggggggaaggcctggtctgatgacacaagtcagctgggaccagacaagcatgcccgggacgttccctcccttgacaagtacgccgaggagcgatgggaggtggtcttgcacttcatggtgggctcccccagtgcagctgtcagccaggacttggctcagctcctcagccaggctgggctcatgaagagtactgaacctggagagccgccctgcattacttccgctggcttccagttcctgttgctggacaccccggctcagctctggtactttatgttgcagtatttgcagacagcccagagccggggcatggacctggtagagattctctccttcctcttccagctcagcttctctactctgggcaaggattactctgtggaaggtatgagtgattctctgttgaacttcctgcaacatctgcgtgagtttgggcttgttttccagaggaagaggaaatctcggcgttactaccccacacgcctggccatcaatctctcatcaggtgtctctggagctgggggcactgtgcatcagccaggtttcattgtcgtggaaaccaattaccgactgtatgcctacacggagtcggagctgcagattgccctcattgccctcttctctgagatgctctatcggttccccaacatggtggtggcgcaggtgacccgggagagtgtgcagcaggcaatcgccagtggcatcacagcccagcagataatccatttcctaaggacaagagcccacccagtgatgctcaaacagacacctgtgctgccccccaccatcaccgaccagatccggctctgggagctggaaagggacagactccggttcactgagggtgtcctgtataaccagttcctgtcgcaagtggactttgagctgctgctggcccacgcgcgggagctgggcgtgctcgtgttcgagaactcggccaagcggctcatggtggtgaccccggccgggcacagcgacgtcaagcgcttttggaagcggcagaaacatagctcctgagagcgcgggacttggacacggacctcggcgggcgggactgggcggggcggggcatcagaactcaggtgttttttatttacgcgtcagggcttttcttgtttaataaagttatgatagctagca

SEQ ID NO: 118319 - DNA, 598 bp, Artificial Sequence
  derived and/or modified sequence
cccttctcttctgaattttccattctgggctcttgcctgtgaaatctttctttgctttccccatcttttcctcgcattttttcaccatctttccctcaatctccaggagccaatgcgagactttggctccgattaagcgacggcccgagactcggggtgcgcgaggaggatcgacagagtggtgatggagagcaccccttcaaggggactgaaccgagtacacctacaatgcaggaatctgcaggaattcttagggggcctgagccctggggtattggaccgattgtatgggcaccctgccacatgtctggctgtcttcagggagctcccatccttggctaagaactgggtgatgcggatgctctttctggagcagcctttgccacaggctgctgtagctctgtgggtaaagaaggaattcagcaaggctcaggaggaaagtacagggctgctgagcggcctccggatctggcacacacagctgctcccaggcgggctccagggcctcatcctcaaccccattttccgccagaacctccgcattgcccttctgggtggtacagggattacaggtgtgagccactgcgcctggccaggg

SEQ ID NO: 118320 - DNA, 1232 bp, Artificial Sequence
  derived and/or modified sequence
actcctccccttacctcccttctcttctgaattctccattctgggctcttgcctgtgaaatctttctttgctttccccatcttttcctcgcattttttcaccatctttccctcaatctccaggagccaatgcgagactttggctccgattaagcgacggcccgagactcggggtgcgcgaggaggatcgacagagtgggagctcccatccttggctaagaactgggtgatgcggatgctctttctggagcagcctttgccacaggctgctgtagctctgtgggtaaagaaggaattcagcaaggctcaggaggaaagtacagggctgctgagcggcctccggatctggcacacacagctgctcccaggcgggctccagggcctcatcctcaaccccattttccgccagaacctccgcattgcccttctgggtggggggaaggcctggtctgatgacacaagtcagctgggaccagacaagcatgcccgggacgttccctcccttgacaagtacgccgaggagcgatgggaggtggtcttgcacttcatggtgggctcccccagtgcagctgtcagccaggacttggctcagctcctcagccaggctgggctcatgaagagtactgaacctggagagccgccctgcattacttccgctggcttccagttcctgttgctggacaccccggctcagctctggtactttatgttgcagtatttgcagacagcccagagccggggcatggacctggtagagattctctccttcctcttccagctcagcttctctactctgggcaaggattactctgtggaaggtatgagtgattctctgttgaacttcctgcaacatctgcgtgagtttgggcttgttttccagaggaaggtatgagcgcctagataagtggcttccagggaagaaacagggtggtgtgttgcctttgcctttaaaaaggagtggggtcttggggcagtagcaggaagcagttgccagaactgaatacttgggtctctcgggggagagaagttgggggttgaggttctgcatcttgggagggatctgatatttcaggcaggaagatgtaaggcagtgacttctgagacaaggcatctgcctttctattcttttcagaggaaatctcggcgttactaccccacacgcctggccatcaatctctcatcaggtgtctctggagctgggggcactgtgcatcagccaggtttcattgtcgt

SEQ ID NO: 118321 - DNA, 1232 bp, Artificial Sequence
  derived and/or modified sequence
actcctccccttacctcccttctcttctgaattttccattctgggctcttgcctgtgaaatctttctttgctttccccatcttttcctcgcattttttcaccatctttccctcaatctccaggagccaatgcgagactttggctccgattaagcgacggcccgagactcggggtgcgcgaggaggatcgacagagtgggagctcccatccttggctaagaactgggtgatgcggatgctctttctggagcagcctttgccacaggctgctgtagctctgtgggtaaagaaggaattcagcaaggctcaggaggaaagtacagggctgctgagcggcctccggatctggcacacacagctgctcccaggcgggctccagggcctcatcctcaaccccattttccgccagaacctccgcattgcccttctgggtggggggaaggcctggtctgatgacacaagtcagctgggaccagacaagcatgcccgggacgttccctcccttgacaagtacgccgaggagcgatgggaggtggtcttgcacttcatggtgggctcccccagtgcagctgtcagccaggacttggctcagctcctcagccaggctgggctcatgaagagtactgaacctggagagccgccctgcattacttccgctggcttccagttcctgttgctggacaccccggctcagctctggtactttatgttgcagtatttgcagacagcccagagccggggcatggacctggtagagattctctccttcctcttccagctcagcttctctactctgggcaaggattactctgtggaaggtatgagtgattctctgttgaacttcctgcaacatctgcgtgagtttgggcttgttttccagaggaaggtatgagcgcctagataagtggcttccagggaagaaacagggtggtgtgttgcctttgcctttaaaaaggagtggggtcttggggcagtagcaggaagcagttgccagaactgaatacttgggtctctcgggggagagaagttgggggttgaggttctgcatcttgggagggatctgatatttcaggcaggaagatgtaaggcagtgacttctgagacaaggcatctgcctttctattcttttcagaggaaatctcggcgttactaccccacacgcctggccatcaatctctcatcaggtgtctctggagctgggggcactgtgcatcagccaggtttcattgtcgt

SEQ ID NO: 118322 - DNA, 1232 bp, Artificial Sequence
  derived and/or modified sequence
actcctccccttacctcccttctcttctgaattctccattctgggctcttgcctgtgaaatctttctttgctttccccatcttttcctcgcattttttcaccatctttccctcaatctccaggagccaatgcgagactttggctccgattaagcgacggcccgagactcggggtgcgcgaggaggatcgacagagtgggagctcccatccttggctaagaactgggtgatgcggatgctctttctggagcagcctttgccacaggctgctgtagctctgtgggtaaagaaggaattcagcaaggctcaggaggaaagtacagggctgctgagcggcctccggatctggcacacacagctgctcccaggcgggctccagggcctcatcctcaaccccattttccgccagaacctccgcattgcccttctgggtggggggaaggcctggtctgatgacacaagtcagctgggaccagacaagcatgcccgggacgttccctcccttgacaagtacgccgaggagcgatgggaggtggtcttgcacttcatggtgggctcccccagtgcagctgtcagccaggacttggctcagctcctcagccaggctgggctcatgaagagtactgaacctggagagccgccctgcattacttccgctggcttccagttcctgttgctggacaccccggctcagctctggtactttatgttgcagtatttgcagacagcccagagccggggcatggacctggtagagattctctccttcctcttccagctcagcttctctactctgggcaaggattactctgtggaaggtatgagtgattctctgttgaacttcctgcaacatctgcgtgagtttgggcttgttttccagaggaaggtatgagcgcctagataagtggcttccagggaagaaacagggtggtgtgttgcctttgcctttaaaaaggagtggggtcttggggcagtagtaggaagcagttgccagaactgaatacttgggtctctcgggggagagaagttgggggttgaggttctgcatcttgggagggatctgatatttcaggcaggaagatgtaaggcagtgacttctgagacaaggcatctgcctttctattcttttcagaggaaatctcggcgttactaccccacacgcctggccatcaatctctcatcaggtgtctctggagctgggggcactgtgcatcagccaggtttcattgtcgt

SEQ ID NO: 118323 - DNA, 1232 bp, Artificial Sequence
  derived and/or modified sequence
actcctccccttacctcccttctcttctgaattctccattctgggctctttcctgtgaaatctttctttgctttccccatcttttcctcgcattttttcaccatctttccctcaatctccaggagccaatgcgagactttggctccgattaagcgacggcccgagacttggggtgcgcgaggaggatcgacagagtgggagctcccatccttggctaagaactgggtgatgcggatgctctttctggagcagcctttgccacaggctgctgtagctctgtgggtaaagaaggaattcagcaaggctcaggaggaaagtacagggctgctgagcggcctccggatctggcacacccagctgctcccaggcgggctccagggcctcatcctcaaccccattttccgccagaacctccgcattgcccttctgggtggggggaaggcctggtctgatgacacaagtcagctgggaccagacaagcatgcccgggacgttccctcccttgacaagtacgccgaggagcgatgggaggtggtcttgcacttcatggtgggctcccccagtgcagctgtcagccaggacttggctcagctcctcagccaggctgggctcatgaagagtactgaacctggagagccgccctgcattacttccgctggcttccagttcctgttgctggacaccccggctcagctctggtactttatgttgcagtatttgcagacagcccagagccggggcatggacctggtagagattctctccttcctcttccagctcagcttctctactctgggcaaggattactctgtggaaggtatgagtgattctctgttgaacttcctgcaacatctgcgtgagtttgggcttgttttccagaggaaggtatgagcgcctagataagtggcttccagggaagaaacagggtggtgtgttgcctttgcctttaaaaaggagtggggtcttggggcagtagcaggaagcagttgccagaactgaatacttgggtctctcgggggagagaagttgggggttgaggttctgcatcttgggagggatctgatatttcaggcaggaagatgtaaggcagtgacttctgagacaaggcatctgcctttctattcttttcagaggaaatctcggcgttactaccccacacgcctggccatcaatctctcatcaggtgtctctggagctgggggcactgtgcatcagccaggtttcattgtcgt

SEQ ID NO: 118324 - DNA, 1389 bp, Artificial Sequence
  derived and/or modified sequence
atggagagcacccccagccggggcctgaacagagtgcacctgcagtgcaggaacctgcaggagttcctgggcggcctgagccctggggtgctggaccggctgtatggccacccagccacctgcctggccgtgttccgggagctgcccagcctggccaagaactgggtgatgaggatgctgttcctggagcagcccctgccccaggccgctgtggccctgtgggtgaagaaggagttcagcaaggcccaggaggagagcacaggcctgctgagcggcctgcgcatctggcacacccagctgctgcccggcggcctgcagggcctcatcctgaaccccatcttccggcagaacctgcgcatcgccctgctgggcggcggcaaggcctggagcgatgacaccagccagctgggccctgacaagcacgccagagatgtgcccagcctggacaagtatgcagaggagcgctgggaggtggtgctgcacttcatggtgggcagccccagcgctgctgtgtcccaggacctggcccagctgctgagccaggccggcctgatgaagagcacagagcccggggagcccccctgcatcaccagcgctggcttccagttcctgctgctggacaccccagcccagctgtggtacttcatgctgcagtacctgcagacagcccagagccggggcatggacctggtggagatcctgtccttcctgttccagctgtccttcagcaccctgggcaaggactacagcgtggagggcatgtctgacagcctgctgaacttcctgcagcacctgcgggagtttggcctggtgttccagaggaagaggaagagccgccgctactaccccacccggctggccatcaacctgagcagcggcgtgtctggagctgggggcaccgtgcaccagcccggcttcatcgtggtggagaccaactaccgcctgtatgcctacacagaaagtgagctgcagatcgccctgattgccctcttcagcgagatgctgtaccgcttccccaacatggtggtggcccaggtgacccgggagagcgtgcagcaggccatcgccagcggcatcacagcccagcagatcatccacttcctgcggacccgggcccaccctgtgatgctgaagcagacccctgtgctgccccccaccatcacagaccagatccggctgtgggagctggagcgggaccggctgcgcttcacagagggcgtgctgtacaaccagttcctgagccaggtggactttgagctgctgctggcccacgcccgggagctgggcgtgctggtgtttgagaacagcgccaagaggctgatggtggtgaccccagctggccacagtgatgtgaagcgcttctggaagaggcagaagcacagcagctag

SEQ ID NO: 118325 - DNA, 417 bp, Artificial Sequence
  derived and/or modified sequence
atggagagcacccccagccggggcctgaacagagtgcacctgcagtgcaggaacctgcaggagttcctgggcggcctgagccctggggtgctggaccggctgtatggccacccagccacctgcctggccgtgttccgggagctgcccagcctggccaagaactgggtgatgaggatgctgttcctggagcagcccctgccccaggccgctgtggccctgtgggtgaagaaggagttcagcaaggcccaggaggagagcacaggcctgctgagcggcctgcgcatctggcacacccagctgctgcccggcggcctgcagggcctcatcctgaaccccatcttccggcagaacctgcgcatcgccctgctgggcggcaccggcatcactggagtgagccactgtgcctggccaggatag

SEQ ID NO: 118326 - DNA, 663 bp, Artificial Sequence
  derived and/or modified sequence
atgaggatgctgttcctggagcagcccctgccccaggccgctgtggccctgtgggtgaagaaggagttcagcaaggcccaggaggagagcacaggcctgctgagcggcctgcgcatctggcacacccagctgctgcccggcggcctgcagggcctcatcctgaaccccatcttccggcagaacctgcgcatcgccctgctgggcggcggcaaggcctggagcgatgacaccagccagctgggccctgacaagcacgccagagatgtgcccagcctggacaagtatgcagaggagcgctgggaggtggtgctgcacttcatggtgggcagccccagcgctgctgtgtcccaggacctggcccagctgctgagccaggccggcctgatgaagagcacagagcccggggagcccccctgcatcaccagcgctggcttccagttcctgctgctggacaccccagcccagctgtggtacttcatgctgcagtacctgcagacagcccagagccggggcatggacctggtggagatcctgtccttcctgttccagctgtccttcagcaccctgggcaaggactacagcgtggagggcatgtctgacagcctgctgaacttcctgcagcacctgcgggagtttggcctggtgttccagaggaaggtgtag

SEQ ID NO: 118327 - DNA, 1389 bp, Artificial Sequence
  derived and/or modified sequence
atggagagcacccccagccggggcctgaaccgggtgcacctgcagtgtagaaacctgcaggagtttcttggagggttatcccccggcgtactggataggttgtacggccaccccgctacttgtttggcggttttccgcgagttgccgtccctggcgaaaaactgggtgatgcgcatgctcttcctcgaacagccccttccccaggccgccgtcgcgttgtgggtgaagaaagaatttagtaaggctcaagaggagagcactggacttttgtcagggctgagaatctggcacactcagctgttgccgggcggtctgcagggtctcatcctgaaccctatcttcaggcagaacctgcgcatcgctttacttggtggaggaaaagcctggtcagatgacacttcgcaactgggtccagataaacacgctcgcgatgtgccatccttagataaatacgccgaggaacggtgggaggtggtcctccacttcatggtgggctcaccgtctgccgctgtgagccaagatctggcgcaacttctatcacaggccggcttgatgaaatctactgaacccggcgaacctccatgtattacaagcgccggattccagttcctgttgcttgatacccccgcccagctctggtacttcatgttacagtacttgcaaacagctcagagcagaggcatggaccttgtggagatcctcagcttcctgttccagctgtcctttagcacgctggggaaggattattctgtggaaggcatgagcgattctctgttaaacttcctgcagcatcttagagaattcggccttgtgtttcagcggaaacgcaagtcaaggaggtactatcctacaagacttgcaattaacttgtcttccggagtaagcggcgccggcggtaccgtccaccaaccaggtttcattgtggtggagacaaactacaggctgtacgcttacacggagagcgaacttcagatcgccctgatcgcactcttcagcgagatgttgtatagattccccaatatggtcgtggctcaggtgactcgagaatccgtgcagcaggcgatagcctcaggcatcaccgcacagcagatcattcacttcttgagaacacgggcacaccctgtcatgctgaagcagacccctgtcctgcctccgactataaccgaccagatacgtttgtgggaattagagagggatcgccttcgattcacagagggggtgctgtacaaccagtttctgtcccaggtcgacttcgaactccttcttgctcacgcccgcgaactcggagtgctcgtgttcgaaaattccgcaaaaaggctgatggtcgtcaccccagcagggcactccgatgtcaagaggttttggaaacggcaaaagcactcatcctag

SEQ ID NO: 118328 - DNA, 1389 bp, Artificial Sequence
  derived and/or modified sequence
atggagagcacccccagccggggcctgaaccgggtgcacctgcagtgtcggaacttacaggagttcttgggaggcttgtccccaggcgtcttggaccgcctttacgggcatcccgcaacctgtcttgctgtattccgtgaacttcctagcctcgcaaagaactgggtaatgcgaatgttgtttttagaacagcctctgccgcaggcagccgtcgccctgtgggtgaaaaaggagttctctaaggctcaagaggagtccaccggactgctgtcagggctcaggatatggcatacccagcttctgccaggcggcctacaagggctaattctgaaccccatatttcgccagaatctgcgcattgctttacttggcggcgggaaggcatggtccgatgacacttcccaactggggccagacaagcacgccagagatgtgcctagcctggacaaatacgccgaggaaagatgggaggtggtgctgcatttcatggtgggaagcccttctgccgctgtatcacaggatttagcccagttactgtcccaggctggcctgatgaagtctacagaaccgggggagcctccctgtatcacatctgccggcttccagtttctcttactggatacccccgcgcagctgtggtatttcatgctccagtacctacagaccgctcaaagtcggggtatggacttggtcgagatactgtcattcctgtttcagctgtcctttagcacattgggtaaagactatagtgtggagggaatgagcgactcactcctgaattttctacaacacctcagagagtttggccttgtgttccagaggaagaggaagtccagacgctattacccaaccaggctggcgatcaatctgtctagtggggtctccggggcggggggcaccgtccatcagcccgggttcatcgtggttgaaaccaattaccgactgtacgcctatacagagagcgaattgcaaattgctctgatcgccctcttttccgagatgctttataggttccctaacatggtggttgcgcaggtaacacgcgaatctgtgcagcaggcaattgcatccggtatcactgcacaacagataattcatttcctccggactcgggctcatccagtgatgttaaaacagacacccgtcttgcctccaaccatcaccgaccagattagactgtgggagcttgagcgggaccggctccgcttcaccgaaggcgtactctataaccagttcctgagccaggtcgacttcgagcttcttttggcccatgcgagggagctcggtgttttagtgttcgagaactccgccaaaaggcttatggtggtaaccccagcaggccatagcgatgtgaagagattttggaaaagacaaaagcacagcagttag

SEQ ID NO: 118329 - DNA, 1389 bp, Artificial Sequence
  derived and/or modified sequence
atggagagcacccccagccggggcctgaaccgggtgcacctgcagtgtcggaacctgcaggaatttctcggcggcctgtcgcctggagtcttagaccggctttatggccatcctgccacctgtctggcggtgttcagagagcttcctagcctggcaaaaaattgggtgatgcgcatgctgttcttggagcagcccctcccacaggccgcagtggctctatgggtgaaaaaggagttctccaaagcacaggaggagagcaccgggttactcagcggactgcgaatctggcacacccaactgctgcccggagggctccaaggtctcatcttgaaccctatcttcaggcagaatctacggattgcactgctcggcggagggaaggcttggtctgacgatacctcgcagctcggacccgacaagcacgccagggacgtgccatccctggacaaatacgcggaagagcgatgggaagtggtcttgcattttatggtaggctcgccttccgcagccgtgtcacaggatcttgcacagctcctcagccaggccgggctcatgaagtctaccgagccaggagaacctccctgtatcacctccgccgggtttcagttcctgttgcttgacaccccagcccagctgtggtactttatgttacaatacctgcagacagctcagagccgcgggatggacctggttgagattctgagctttctgtttcagctttcgttttctacgctgggaaaagattatagcgtcgaggggatgtctgattctcttttaaattttctgcaacatttgcgtgagttcggattagtattccagcggaagcgtaagtcccgcagatattaccccacacgccttgccattaacctgagctccggggtaagtggtgctgggggcactgttcatcagccgggtttcatcgtggttgaaaccaactacaggttgtacgcttatactgagagcgagttacagatcgcactaattgccctcttctccgagatgctctaccgcttccccaatatggtggtcgcccaggtgactcgggaaagcgtgcagcaggcgattgcgtcagggattactgcgcaacagataattcacttcctcaggacaagggctcaccccgtgatgttgaagcagactccagtcctgcccccaacgatcaccgaccagatcagactgtgggaactggaaagagatcgtctgcggtttaccgaaggcgtcctctacaaccaattcttatcacaagtggactttgagctgctcctggctcatgcaagagagttaggtgtgctggtgtttgaaaatagcgccaagaggctgatggtggtgacccccgcgggacattctgatgtgaaacgcttctggaagcgccagaagcacagttcttag

SEQ ID NO: 118330 - DNA, 1389 bp, Artificial Sequence
  derived and/or modified sequence
atggagagcacccccagccggggcctgaaccgggtgcacctgcagtgtagaaacctacaagagttccttggcggcctgtcccccggagtcctggatcggctctacggacaccctgccacttgcctggccgtatttcgtgaacttccatctcttgcaaaaaactgggttatgagaatgctgttcttggagcagcccctcccacaagctgccgttgccctgtgggtgaaaaaagagttttccaaggctcaggaagagagcaccggtttgctgtccggactacgcatctggcacactcagcttttgcccggcggcctccagggcctgatactcaaccctatctttcgccagaacctgcgcatcgcattactggggggcggtaaagcatggtccgatgacactagtcagctgggccctgataagcacgccagggacgtgccatctctggataagtatgccgaggagaggtgggaagtcgtgctccacttcatggtgggttcgccctccgccgcggtttcacaggacctggcacagctgctgagccaggcgggactaatgaagagtacggagcctggagaacccccttgcatcacgagtgccggcttccagtttttgctattggatactccagctcaactctggtacttcatgctgcaatatctgcagacagcccagagtcgaggcatggatctcgtggaaattctctcctttcttttccagctcagtttcagcaccctggggaaagattattccgtcgagggcatgtcagatagcctgctcaatttcctccaacacctccgggagttcggtttagtgttccagagaaagaggaagtctaggagatactatcccacacgcctggccatcaacctatcatccggtgtctcaggggcaggaggaaccgtgcatcagcctgggttcatcgtcgttgagaccaattatagactctacgcctacaccgagtccgagttacagattgctctgattgccctcttctcagagatgctgtaccgtttccctaacatggtggttgcgcaggttacccgggagtccgtgcagcaggctattgcaagcgggatcaccgcccagcagatcattcacttccttcggacccgggcccaccccgtgatgcttaagcagacccctgtcctacctcctacgattacagaccagattagactctgggaattggagagggacagactgcggttcaccgagggagtgctttacaaccaatttctatcgcaggtcgactttgaattgctgcttgcccatgctagagagttaggtgtccttgtcttcgaaaattcagctaagaggctgatggtcgtgacgccagcgggacactcagacgtgaagagattctggaagagacaaaagcatagttcatag

SEQ ID NO: 118331 - DNA, 1389 bp, Artificial Sequence
  derived and/or modified sequence
atggagagcacccccagccggggcctgaaccgggtgcacctgcagtgccgaaacctgcaggaattcctgggaggactgagccccggcgtcctcgatcgcctatacggacatcctgctacctgcctggccgtgtttagagagctgccttccttggccaagaactgggtgatgcggatgctgtttctagagcagcctctgccacaggccgccgtggctctttgggtgaagaaagagttctctaaggcacaggaggagagtactgggctattatcaggcctgcgaatttggcatacgcaactgctgcccgggggactgcaagggctcatactgaaccccatcttcaggcagaaccttcggatcgcattgctgggaggcggtaaagcctggagtgacgacaccagtcaattaggtccggataagcatgcccgggatgtgccctccctggataaatacgctgaagaaagatgggaggtcgtgctgcatttcatggtagggtctcccagcgccgccgtgtctcaggatcttgcccagctgctgtcacaagcaggactcatgaagtcaaccgaaccaggcgagccaccgtgcatcactagtgctggctttcagtttcttctgttggacaccccagcacagctctggtatttcatgctgcagtacctacagacagctcagtcacggggtatggatctggtggagatcctttctttcctgttccagttgagcttctcaaccctgggtaaggactactccgtggagggtatgagcgactcacttctgaattttctgcaacatctgcgagaattcggacttgtttttcagagaaagcgtaaatctaggagatactatccaaccagactcgcaatcaacctttctagtggagtttctggcgccggaggcactgtccaccaaccaggcttcattgtggtggaaacgaattatagactgtatgcatacacagagtccgagctgcaaattgccctaatcgcactcttttccgaaatgttatatcggtttcctaatatggtagtggcacaggtaacaagggagagtgtgcagcaggctattgcatctggcattacagcgcaacaaatcatccactttctcaggactcgggcacaccctgttatgctgaaacagacaccagtactgcccccgacaattactgatcagattcggctgtgggaactcgagcgggaccggctgcggttcacagaaggggtgctgtacaatcagttcctctctcaggttgactttgagctgctcttggctcacgcacgagagttgggcgttctggtgtttgaaaacagtgccaagcgtctcatggtggtgacccccgccggccactcggatgtcaaaagattctggaagcggcagaaacattcaagctag

SEQ ID NO: 118332 - DNA, 417 bp, Artificial Sequence
  derived and/or modified sequence
atggagagcacccccagccggggcctgaaccgggtgcacctgcagtgccgtaatcttcaagagttccttgggggtctgtcacctggtgtccttgatagactctatggccatcctgctacttgcctggctgtgttccgagagctcccgtcgcttgccaaaaattgggtgatgcggatgctttttctggagcagccactcccacaagccgctgtggcattatgggttaaaaaggaattctctaaagctcaggaggaaagcactggactcctgtctggcctaaggatttggcacacccagctgcttcctggtgggctgcagggtttaatactcaaccctatctttcggcagaatcttagaatcgcactgttgggtgggacaggcatcacaggggtgtcccactgtgcctggcctggctag

SEQ ID NO: 118333 - DNA, 1389 bp, Artificial Sequence
  derived and/or modified sequence
atggagagcacccccagccggggcctgaaccgggtgcacctgcagtgtagaaaccttcaggaattcttaggaggcctctcacccggcgtgctggaccgcctctacggacatcccgctacttgcttggccgtcttcagagagctgccgagcctagctaaaaactgggttatgagaatgctattcttggagcagccactcccacaggccgctgtggcgctgtgggttaagaaggagttcagtaaggcgcaagaagagtctaccggtcttttgtcagggctgagaatatggcacacccagttgctgccagggggattacaaggactgatactcaatccaatttttaggcagaacctgagaatcgctctgcttgggggaggtaaagcctggagtgacgacacctcgcagctcggccctgataagcacgcccgtgacgtgccgagtctcgacaagtatgccgaagagcgctgggaagtagttctgcattttatggttggttcccccagcgcagccgtcagtcaggacctcgcacagctgctgagccaggccgggctgatgaagagtaccgaacccggagaacccccctgcatcacatccgctggcttccagttcctactgctggacactcctgcccagctctggtatttcatgctgcagtatcttcaaactgcacagtctagaggcatggacctggtcgagatcctgtctttcctctttcagctgagtttttccacattagggaaagattactctgtcgagggtatgagcgattccttgttgaactttcttcagcaccttagggaatttgggctcgtgtttcagcgcaagagaaaaagtcggcgatattatccgactagacttgccattaacctctcgtccggggtctccggcgcggggggcaccgtgcaccagccagggtttattgtcgtggaaactaattatcgcctgtatgcgtatacagaatctgagctgcagatcgcccttattgctttgttcagcgagatgctgtatcgcttcccaaacatggtggttgctcaggtgaccagggaatcggtgcagcaggcaatcgcaagtggtattacagcccaacagatcatccactttcttcgaaccagagcccatcccgtgatgctgaaacagacgcccgtccttcctcctaccattactgaccaaatccgactctgggagttggagcgcgaccggctcagatttacggagggagtactgtacaaccagtttttatctcaggtcgactttgaactgttactagcacatgcacgggaactgggcgttttggtttttgagaacagtgctaaacggctaatggtggtcactcccgccggacacagcgacgttaaaagattctggaaacggcagaagcacagctcttag

SEQ ID NO: 118334 - DNA, 417 bp, Artificial Sequence
  derived and/or modified sequence
atggagagcacccccagccggggcctgaaccgggtgcacctgcagtgtcgtaacctccaggagttcctcggcggtctatcacccggggttcttgacaggctgtatggacaccccgccacttgcctagccgtgttcagagagctaccttccctggctaaaaactgggtcatgcgtatgttatttctggagcaaccattgccacaggccgcagttgcactctgggtgaagaaagaattttccaaggcccaggaggagagcacaggtctcttgagcggcctacggatctggcatacccagctacttcctggcggtcttcaggggctgattttgaatcctatctttcgccaaaacctgagaatcgcacttctcggcggcacagggatcactggggttagtcactgcgcttggccaggctag

SEQ ID NO: 118335 - DNA, 1389 bp, Artificial Sequence
  derived and/or modified sequence
atggagagcacccccagccggggcctgaaccgggtgcacctgcagtgtcgaaacttgcaggagtttctgggtggcctgtcccctggggtcctggacagactctacgggcatcccgcaacatgtttggccgtgtttagagagcttccaagtctggccaaaaattgggtcatgagaatgctgttcttggagcaaccactgcctcaggcagccgtggcattgtgggtcaagaaagaattcagcaaggcccaggaagaatctactggtttactgtcaggcttacgcatatggcacactcagttattaccagggggcctacagggcctgatcctgaatccaatattcagacaaaatctgaggatcgcactgctcggtggagggaaggcttggtcagacgatacttctcaactcggaccagacaaacacgcaagagatgtcccctcactggacaagtatgctgaagagagatgggaggtggtcctgcatttcatggtgggatccccgagcgccgcggtgtcccaagatctggcgcagcttctgtcacaggctggactgatgaaatctactgagcctggcgaacctccttgcattacaagcgcggggttccaattcctgcttctggacacccccgcccagttatggtactttatgctgcaatatctccagacggctcagagtcgggggatggacctggtggagatactcagctttttgtttcagttgtctttttccactctcggtaaggattactcagtcgagggcatgtcagattcactgctcaattttttacaacaccttcgcgagttcggactggtctttcaaaggaagcggaaatccagaagatattatccaacaagactggccataaacctgtccagcggcgtttccggggctgggggcacagtgcaccagcccggcttcattgtcgtggagactaattaccggttgtatgcctatacagaatccgagttgcagattgctttgatcgcacttttcagcgaaatgttgtaccgctttcctaacatggtcgtggcgcaggtgactagagaatctgttcagcaggccatcgcttcaggcatcactgcccagcagatcatccacttcctgcggaccagagcccatcctgtcatgttgaagcagacaccagtgctcccacctacaatcaccgatcaaatcaggctgtgggaattagagagagacaggctcaggttcaccgaaggcgtgttatataaccagtttctgtcccaagtagactttgaactccttctcgcgcatgcgcgagaattaggcgtattggtgttcgagaattctgcaaagcggcttatggtggttacacctgctgggcacagcgacgtgaagagattctggaagcgacagaaacactcctcttag

SEQ ID NO: 118336 - DNA, 417 bp, Artificial Sequence
  derived and/or modified sequence
atggagagcacccccagccggggcctgaaccgggtgcacctgcagtgtcgcaacttgcaggaatttctgggaggcctatcgccaggcgtgctggatagactgtacgggcaccctgcaacatgtctcgccgtttttcgcgagcttcctagccttgctaagaactgggtcatgcggatgcttttcctagagcagccattgccccaggccgccgtcgcactgtgggtgaaaaaggagttctcaaaggcacaagaggaaagtactggcctactgagcggacttaggatttggcatactcagctgctgccgggcggcctacagggactaattctaaatcccatcttcaggcagaatctccgcatcgccctacttgggggcactggtataacaggggtgagccattgtgcttggcccggctag

SEQ ID NO: 118337 - DNA, 1389 bp, Artificial Sequence
  derived and/or modified sequence
atggagagcacccccagccggggcctgaaccgggtgcacctgcagtgccgtaacctgcaggagttcctgggcggcctatctcctggcgtcctggacaggttgtacggacacccagccacctgtctggcagtttttagagagcttcctagcctggccaagaactgggtgatgcgcatgctgttcctggagcaacctctaccccaggctgcagtagccctctgggtgaaaaaagaattctccaaagcccaagaggaatctaccggcctgctgtccggcctcaggatttggcacacgcagcttttaccggggggtctgcagggtttaatcttaaacccaatcttccgacagaatcttcgcatagccctgctcggcgggggaaaagcctggtctgacgataccagccagctgggtccggacaaacacgctcgggacgtgcctagcctcgataagtacgccgaggagcgttgggaagtggtgctgcactttatggttggcagcccgagtgcagctgtgtcacaggaccttgcccaactgctgtctcaggccggcctcatgaaatctacagaacctggcgagccaccttgtattacttcggcaggcttccagtttctgttgctggacacacctgctcaattatggtacttcatgctccagtacctgcagactgcacagtctcgcgggatggatctggtcgaaatcttgtcattcctgtttcagttgagctttagcacactggggaaggattacagtgtcgagggcatgtcagatagtctcctcaatttccttcagcaccttcgagagttcggcttggtcttccagcgcaagagaaagtcgcggaggtattacccgacccgtctcgcaattaaccttagctccggagtctcaggcgccggaggaactgtgcaccagccggggttcatcgtcgtagagactaattacaggctgtatgcatatactgaaagtgagttacaaatcgcattaattgctctgttctctgagatgctgtatcggtttccaaacatggtggtggcacaagtcacccgggagagtgtgcagcaggccatagcctccggtattacagcccagcaaatcatacacttcctgagaactagggcccacccagtcatgctcaagcaaactccagtgctcccacccacgatcactgatcagattagactttgggagctggaaagagatcggttgaggttcacagaaggcgtgctgtacaatcagtttcttagccaagtggatttcgaactcttgttggctcatgcccgggagctgggcgtcctggtcttcgaaaattccgctaaaaggctcatggtcgtgacacccgccggccattctgatgtcaagcggttttggaagaggcaaaagcactcctcatag

SEQ ID NO: 118338 - DNA, 1389 bp, Artificial Sequence
  derived and/or modified sequence
atggagagcacccccagccggggcctgaaccgggtgcacctgcagtgccgcaacctccaggagttcttagggggtttgtccccgggagttctggaccggctttatggtcatccagccacgtgtctggcagtgttccgcgagctaccatcactggcgaagaactgggtgatgagaatgcttttcctcgagcagcctcttccgcaagccgcagtggccctgtgggtgaaaaaggagttctcgaaggcacaagaagagtctacagggttgctttctggcctgcggatctggcacacccaacttttgcccgggggccttcagggcctgatcctgaatcctatcttcaggcagaacttgaggatcgctctcctggggggaggcaaagcctggtctgacgacacttcccagctagggccagataaacatgcaagagacgttcctagtcttgacaagtacgccgaggaaagatgggaggtggtgctccatttcatggtcggttcaccttcggccgctgtgagccaggatctcgctcagctgctaagccaggcgggcttgatgaagtctactgaacctggcgaacctccctgtattaccagcgccgggttccagttcctccttctggacacacccgctcagctgtggtatttcatgcttcagtacttacagacagcacagagccgaggcatggacttagtcgagattctcagcttcctgttccagctcagtttcagcacccttggaaaagactatagtgtggaggggatgtcagatagcctgctgaatttcttgcagcacttgagagaattcggcctagtgttccagcgcaagcgcaagtccaggcgttactaccccacccggctcgcaatcaatttgtctagcggagtctctggggcagggggcactgttcaccaaccgggcttcattgtagtggaaactaattacagactctatgcatacactgagtcagaactgcagattgctctaattgctcttttctctgagatgctgtatcggtttcctaatatggtcgtcgcacaggtgactagagagtctgtgcagcaggccatagctagcgggataacagcgcaacagatcatacatttcttgcgcacccgcgctcatcccgtcatgctgaagcagacccctgtgctccctcctaccatcaccgatcaaattaggctctgggagctcgagcgtgaccgactgcgctttacagaaggagtcctgtacaaccagttcttgtcacaggtggattttgaactcctgctggcgcacgcacgggagctgggggtactcgtctttgagaactcggccaagcggctgatggtggtgacccccgctggacacagtgatgtgaaacgcttttggaaacgacaaaagcattcgtcttag

SEQ ID NO: 118339 - DNA, 1389 bp, Artificial Sequence
  derived and/or modified sequence
atggagagcacccccagccggggcctgaaccgggtgcacctgcagtgtcggaatcttcaggagtttctcggtggactgtcgccgggcgtcctggatcgcttgtacggacatcctgctacctgtctagcggtgttccgggagctacccagtttggcaaagaactgggtaatgagaatgctattcctagagcagccactgccacaggccgctgtcgcactgtgggtaaaaaaggagttctccaaagctcaggaagaatctacaggactgctttccgggctgagaatttggcatacacaactgctcccaggagggctccaggggctcatcctgaatccgatttttcgccagaatctgaggatcgccctcctcggaggtggtaaggcctggtccgacgatacctctcagctcggacctgacaagcatgcacgggatgtgccttccctagacaaatacgccgaagaaaggtgggaggtagtgctacacttcatggtcgggtcaccttctgccgccgtgagccaggatctagcacagctgttaagccaagccggactgatgaagtcaacagagcctggcgaacccccctgcatcacaagcgccgggttccaatttttattactcgacacaccggcccagctctggtacttcatgctgcagtatctgcagaccgctcagtcacgcggcatggatctggtggaaattttgtcatttctcttccagttgagcttttcaaccctaggcaaggattattcagtcgaggggatgagcgatagcctgttaaactttctccagcatctgagggagttcggcctggtttttcagcgcaaacggaaatccaggaggtactaccctaccagacttgccatcaatttgagcagcggagtgagcggagctggaggtactgtgcaccagcccgggttcatcgtggtcgagacaaactaccgcttgtacgcttatacagaaagtgagctccagatcgctctgattgcgctgttttcagagatgctgtacaggttcccaaatatggtggtggctcaagtgactcgcgaaagtgtccagcaggctattgcctcaggtattactgctcagcagattattcactttctccggactcgggcccatcctgtgatgctcaaacagacaccagtgctgccaccaactatcacagatcagatccgcttgtgggaacttgagcgagatcgcctgcgatttacagaaggcgtgctctataaccagtttttgagccaggttgactttgagctcctgttggctcatgcaagagaacttggcgtgctggtgttcgaaaatagtgcaaagcggcttatggtcgtgaccccggctggacactctgatgtaaaacggttttggaagaggcagaagcacagctcatag

SEQ ID NO: 118340 - DNA, 1389 bp, Artificial Sequence
  derived and/or modified sequence
atggagagcacccccagccggggcctgaaccgggtgcacctgcagtgtagaaatctccaggaattccttggcggcctgagccccggtgtgctcgacagactgtatggccatcctgcaacatgcctggctgtgtttcgagaactgcccagtctagctaaaaactgggtgatgaggatgctgtttctggaacagccccttccgcaggcagctgtcgcgctttgggtcaagaaggaatttagtaaggctcaggaagaatctacaggactgctgtctgggctgcggatctggcatactcagctgctgccgggtggcctgcagggacttatcctgaatccaatctttcggcagaacttacgcatcgccttgctggggggtggcaaagcctggagcgacgacacttcccaattaggacccgataaacacgctcgagatgtgccctcacttgacaagtacgcggaggagcgttgggaggtagttctccacttcatggtcggctctcctagcgcagccgtgagccaggatcttgcgcagctgctgtcccaagcaggactgatgaaatcaaccgaacctggagaaccaccctgcatcacctccgccggcttccagttcctcctgctcgatacacctgctcagctttggtacttcatgctgcagtacctccagaccgcacagagccggggaatggatctagtggagatccttagttttcttttccagctgtccttctcaactttagggaaagattattcggtcgaggggatgtccgatagcttgttgaatttcctgcagcacctacgcgagttcggtttggtgtttcaacgaaagcggaaatcgcgccgctactacccaacccgcctggccattaatctgtcctctggtgtatccggcgctgggggaaccgtgcaccaaccaggctttatagtcgtggagacaaactaccgcctatacgcttatactgaatccgagcttcagatcgccctgatcgctctcttcagcgaaatgctataccgcttcccgaatatggtagtggctcaggtaacccgcgagagcgtgcagcaggccattgcaagcggaatcaccgcccagcagatcattcattttctgagaacgagagctcaccctgtgatgctgaaacagactcccgtgctccctccaactataaccgaccagattcgcctttgggagctggaacgggatcggctgagattcacagagggcgttctgtacaaccagttcttaagccaggtcgacttcgaactattactggcacatgcaagggagctcggggtgcttgtgttcgaaaattcagcaaaacggttgatggtggtgacccccgcaggacattctgacgtgaaacggttctggaagcgtcagaaacactcgtcttag

SEQ ID NO: 118341 - DNA, 417 bp, Artificial Sequence
  derived and/or modified sequence
atggagagcacccccagccggggcctgaaccgggtgcacctgcagtgccgtaatcttcaggaatttctgggaggtctgtccccaggtgtactcgatcgcctatatggtcatccggccacatgcctggctgtctttagggagttgcccagcttagcaaagaattgggtcatgaggatgctgtttctcgagcaaccactccctcaggctgcggtggctctctgggtgaagaaggagttttcaaaagctcaagaggagtcgacaggcctattgtcaggacttagaatttggcacacccagctgctccctggtggccttcagggcctgatcctgaacccgattttccgccagaacctcaggatcgcccttctaggcggaacaggcattaccggcgtctcacattgcgcatggccggggtag

SEQ ID NO: 118342 - DNA, 417 bp, Artificial Sequence
  derived and/or modified sequence
atggagagcacccccagccggggcctgaaccgggtgcacctgcagtgtcggaatctgcaggagttcctcggtggattgagtcccggcgttctggataggctctacggtcatcctgcgacctgcctggcagtttttcgggagttgcctagcctggccaaaaactgggttatgagaatgctgttcctggaacaacctttgccacaggcagcggttgcgctgtgggtgaagaaggagttctcaaaagcgcaagaagaatctaccggcctcttgtctggtctgaggatttggcacacacagctcttgcctgggggtctgcagggtctgatcttgaatccaatctttaggcagaaccttaggatagccctactgggaggcactggtattaccggggtcagccactgcgcctggccaggctag

SEQ ID NO: 118343 - DNA, 417 bp, Artificial Sequence
  derived and/or modified sequence
atggagagcacccccagccggggcctgaaccgggtgcacctgcagtgccgcaacttgcaagaatttcttggtggcctgtctcccggagtgctggatcgtctgtatggtcatcctgccacttgcctcgcagtatttcgcgagttaccatccctggccaagaactgggtgatgaggatgctcttcctcgagcagccactgccacaggccgccgttgcactgtgggtgaagaaagaattctccaaggcccaggaggaatccacgggactcttgtctggactccgcatctggcatactcagcttttacccggcggcctccagggacttattctaaatcccatcttccggcagaaccttaggatagcactccttggtggcacaggcattaccggtgtgtcccattgcgcctggccaggatag

SEQ ID NO: 118344 - DNA, 1389 bp, Artificial Sequence
  derived and/or modified sequence
atggagagcacccccagccggggcctgaaccgggtgcacctgcagtgtcgtaacctgcaggaattcttgggcggactcagtccaggtgtcctcgacaggctatacggccacccagctacttgcctcgcagtattccgggagctaccgagcctcgccaagaactgggtgatgcggatgctgttccttgaacagcccctgccccaagctgcagttgcattatgggtcaagaaagaatttagcaaggcgcaggaggaatctacggggcttctcagcgggctgcgcatttggcacacgcaattgcttccagggggtctgcagggcttaatcctaaaccctatcttcagacaaaatctccggatcgccctattaggtggcggcaaagcctggtccgatgacacaagccagctcggtccggataagcacgctcgggacgttccttccctggacaagtacgccgaggaacgatgggaggtcgtgctgcactttatggtcggtagtcccagcgcggctgtgagccaagatctcgctcagctcctgtcccaagccggcctgatgaagtccacagagccaggggagcctccttgtattacgtcagcaggatttcagtttctgctgctcgacacgcccgcccagctgtggtatttcatgttgcaatacctgcagacagcgcagtcgcgcggaatggatcttgtggagatcctctcttttttgttccagctgtcattttctaccctgggaaaggactatagtgtggagggaatgagcgacagcctcttaaatttcctccaacaccttagggagtttgggctggttttccagcggaagagaaaaagcaggcgttattaccccacgagactagcaatcaacctatcttccggtgtaagcggggccggtgggacggtacaccagcccggcttcatcgtcgtcgagaccaactacaggctatatgcatacactgagtcagaattacagattgcattaattgcactgttctcagagatgttatacaggttccccaatatggtggtcgcacaggtcaccagagagagcgtgcagcaagcgattgcctccggcattacagctcagcagatcatacacttcctgaggacacgagcacaccccgtgatgttgaagcagacccctgtgctgccccctactatcaccgaccagatcaggctgtgggaacttgagcgcgatcggctccgatttacagagggcgtcctttacaaccaatttctcagtcaggttgattttgaactgctcctcgcccacgctcgcgagcttggggtgctggtgtttgagaattccgccaagagactcatggtagtcacacccgccggacactctgacgttaaacggttctggaaacgacagaagcactcatcatag

SEQ ID NO: 118345 - DNA, 663 bp, Artificial Sequence
  derived and/or modified sequence
atgcggatgctgttcctggagcagcccctgccccaggccgccgtggcactttgggtgaagaaagagttctccaaggcccaagaggagagtaccggactgctaagtggtctgcgcatctggcatacacagctcctgcctggtgggttacagggcctcatactgaatccaatctttcgccagaacttgcggatcgccctgctcgggggcggaaaggcctggtcagatgatacaagtcaattgggacctgacaaacacgcgagggacgtgccgtccctggataaatacgcagaagagcggtgggaggtagtcctgcattttatggtcgggagcccatccgcagcagtgtcacaggacctcgcccaactcttaagccaggccggtttaatgaaatctaccgaacccggggagcctccatgcattaccagcgccgggtttcagtttctattattggatacccccgcacagctttggtactttatgctccagtatctgcaaaccgcacagagtcgcggaatggatttggtggagatcctcagttttctctttcagctaagcttttcgactctcggtaaggattactccgtggaggggatgtctgatagtttgctgaactttctccagcacctgagagagtttgggcttgtattccaaagaaaagtctag

SEQ ID NO: 118346 - DNA, 663 bp, Artificial Sequence
  derived and/or modified sequence
atgcggatgctgttcctggagcagcccctgccccaggccgccgtggcactgtgggtgaagaaggagttttctaaagcccaggaggagtccaccggcctgctgtccggtctaagaatatggcacacccagcttctgccgggaggactgcaggggcttatcttgaaccctatcttccggcagaaccttagaattgccttacttggaggtggcaaggcatggagcgatgacaccagtcagcttggtcctgacaagcatgcacgggatgtgcccagtttagacaaatacgctgaggagcggtgggaggtggttctccattttatggtgggaagcccatctgctgccgttagtcaggatctggcccagttgctctcacaggccggcctcatgaagagtaccgaacctggagagccaccctgcataacaagtgccggcttccagttccttttgttagatacgccagctcagctgtggtactttatgctacagtacctgcaaacagcacagagcaggggcatggacctcgttgagatcctttccttcttgttccagctcagcttttcaacactaggcaaagactactctgtggagggaatgtccgatagcctgctgaattttctgcaacacctaagggagttcgggctcgtgtttcagagaaaggtgtag

SEQ ID NO: 118347 - DNA, 663 bp, Artificial Sequence
  derived and/or modified sequence
atgcggatgctgttcctggagcagcccctgccccaggccgccgtggctttgtgggtgaaaaaggagttctctaaggcgcaggaagagagcactgggcttttgtcagggcttcggatctggcatacccagttgctgccaggtggacttcaggggttgatcttaaatccgatcttcagacagaatctgcgcattgccctgctcggaggcggcaaagcttggagcgacgatacatctcaactaggccctgacaagcacgcccgagacgtgccttcacttgacaagtacgccgaggaacgatgggaggtggtactacacttcatggtcggttctccgagtgctgctgtttcccaggacctcgcacaattgctttcgcaagctggccttatgaaaagcactgagccaggcgagcccccctgtatcacttcagccggctttcagtttcttctgctggatacaccagcacagctgtggtatttcatgctccagtatctgcagacggcacagtctaggggcatggatctggtagagatcctcagcttcctgttccagctgtccttctcgaccctggggaaagactactcagtagagggcatgagcgattccctgctgaactttctacagcacttgcgagagttcggtctagtcttccagcgcaaagtgtag

SEQ ID NO: 118348 - DNA, 663 bp, Artificial Sequence
  derived and/or modified sequence
atgcggatgctgttcctggagcagcccctgccccaggccgccgtggcactgtgggttaagaaggagttcagtaaggcacaagaggagtctaccgggttgttgagtgggctccggatttggcatacgcagctgctccctggtggcctgcaaggtctcattctgaaccctatttttcggcagaatcttagaatcgccctgttaggcggtggcaaggcatggtccgatgacactagtcagttgggtcccgataaacacgcgcgggacgttcccagcctcgacaaatacgcagaagaaagatgggaggtggtgctgcacttcatggttggtagccctagcgccgccgtgagccaggacctggctcagcttctctcccaggccggtctgatgaaatctacagagcctggggagcccccatgtattacatcagccggattccaattcctgctcctggacacgccagctcagctgtggtattttatgctccagtacctgcaaactgcccaatcacgcgggatggacctggtcgaaattttgagctttctgttccagctctctttttctacacttggcaaagactacagcgtggaaggcatgtctgacagtctgctaaattttctccaacatctgagagagttcgggcttgtgttccaacggaaggtctag

SEQ ID NO: 118349 - DNA, 663 bp, Artificial Sequence
  derived and/or modified sequence
atgcggatgctgttcctggagcagcccctgccccaggccgccgtggccctctgggtcaagaaggagttctcgaaggcgcaggaagagagcacagggctcctgtccgggctgcgcatttggcacacccagttactgccgggaggactgcaggggttgatcctgaatcctatctttaggcagaatcttcgcattgcactcctggggggaggcaaggcctggagtgatgacactagtcaactgggcccagataagcacgcccgagacgttccctcgcttgataaatatgctgaggaacgttgggaagttgtactgcacttcatggtcggatcaccatctgctgcagtttctcaagatttagcgcaattgctgtcccaagccggcctgatgaaatcaacagagcctggggaacctccctgtattacgtcagctgggtttcagtttttattattggatacccccgcccagctgtggtatttcatgctccagtatctgcaaaccgcccaatccagaggcatggaccttgttgagattttaagctttctgtttcaactgagcttctcgaccctgggaaaggattacagcgtcgagggaatgtccgatagcctgcttaacttcctccagcacttgagggaattcggacttgtgttccagaggaaggtgtag

SEQ ID NO: 118350 - DNA, 663 bp, Artificial Sequence
  derived and/or modified sequence
atgcggatgctgttcctggagcagcccctgccccaggccgccgtggctctttgggttaaaaaggagttcagcaaagcccaagaggaatccacaggtctgctttctgggctgaggatctggcacacacagctgttacctgggggtctgcaagggttaattttaaatcctatctttcgacagaatctgaggatcgccctgctgggagggggcaaggcctggtctgacgacaccagccaattaggacccgataagcacgctagagatgtccctagcctcgataaatacgctgaagaacgatgggaagtggtattacattttatggtggggagtccaagcgccgcagtaagccaagatcttgcccagctcttatcccaggccggcttgatgaagagtactgaaccgggagagcccccatgtataacaagcgcgggatttcagttcctccttctcgacacgcccgcacagttgtggtacttcatgttacagtacctgcaaactgcccagtcccgcggaatggacctggtggaaatattgtcatttctgtttcagctgagttttagtactctcggcaaggactacagcgtggaaggcatgtctgactctctgctcaactttttgcagcatctgcgggaatttgggttggtgtttcagagaaaagtgtag

SEQ ID NO: 118351 - DNA, 1389 bp, Artificial Sequence
  derived and/or modified sequence
atggaaagtactccctctcgaggtttaaacagggttcatctgcagtgcagaaacttgcaggagttcctgggaggcctgagcccaggagtgctcgatcgtttgtacggtcacccagccacctgtctagctgtgtttagagagcttccatccctagctaaaaactgggtcatgcgcatgctgttcttggagcagccgctgccacaggccgctgtggcattatgggtgaagaaagaattttccaaggcccaggaggaatcgacgggattactctcgggcctcagaatatggcatacacagctgctgccgggtgggctacagggcctaatactcaatccgatttttagacagaatctgcgcatagcattactcggaggcggtaaagcgtggtccgacgataccagtcagctcggacctgataaacacgcgagggacgtaccttccctggacaaatacgccgaagagcgatgggaggtcgtgttgcactttatggtaggctcgcccagtgccgctgtgagccaggatctcgcccagctgttgagccaggcagggctaatgaaatctacggaacctggggagcctccatgtattaccagcgcgggttttcaatttttgctcctggacacacctgcccagctgtggtatttcatgctccaatacttgcagacggcccagtcccgtggaatggatctggtggaaatactgagctttctgtttcagctgagcttcagcacactggggaaggactactcggtggaagggatgtccgacagcctgctcaatttccttcaacacttgagggagttcggtttagtttttcagagaaagcgcaagagcagacgatattatcctacaaggctcgccataaaccttagctctggcgtgtcaggagccggaggcacggtgcatcagccgggatttattgtcgttgagaccaattatcggctgtacgcctacacggagtccgaactgcagatcgccctgatcgcactgttcagtgaaatgttatatcggttcccgaatatggtggtggctcaggtgacccgggagtcagtccagcaagccatcgctagcggcattaccgcgcagcagatcattcattttctgcggactagggcgcatcctgttatgttgaagcaaacacctgtgctaccgcctactataaccgaccaaattcggctatgggaactggaaagagatcggctgcgcttcactgagggggtgctgtacaaccagtttctttcccaagtggacttcgagttgctgctggctcatgccagagagctcggagtgcttgtgttcgagaactccgccaagcggctgatggtcgttactccggcagggcacagcgacgtgaaaaggttttggaaacggcagaaacattctagttag

SEQ ID NO: 118352 - DNA, 1389 bp, Artificial Sequence
  derived and/or modified sequence
atggagagcaccccatcacggggactgaatcgtgtgcatctgcagtgtcgcaatctgcaggagttcctcggagggttgtcccccggagttctggatcgcctgtacggacaccccgctacatgccttgccgtctttcgagaacttcccagtcttgctaagaattgggtcatgagaatgctcttcctagagcagccactccctcaggccgcagttgccctctgggtcaaaaaggagttttcgaaagcccaggaagaatccacagggctgctcagtggactgcgaatctggcacactcaactacttcccggaggtctgcagggcttgattttgaaccccatttttaggcagaatctcagaatcgccctgctgggcggaggcaaggcctggtccgacgatacatcccagttaggcccagataaacatgcaagggacgtgccgtctcttgacaaatacgccgaagagaggtgggaagtcgtcctgcacttcatggtgggttccccgagcgcagctgtgtcccaggatttggcacaactcctgtcacaggctggcctaatgaagagcacagaaccaggggagcccccatgtatcactagcgcgggattccagttcctcctactggacacacctgcccaactttggtatttcatgctgcagtacttacaaaccgcccagtcccgcggtatggatcttgtcgaaattctatccttcctctttcagctgagtttttcaactttgggaaaagactattcagtcgagggcatgtcagattcgctcctcaattttcttcagcacttgagggagtttggtctggtgtttcagaggaagcgtaaatctcggcgttattaccccactcgtctggcaattaacttatcgtctggcgtttccggggctggagggaccgtccatcagccagggttcattgtggtggaaaccaattatcgcctgtacgcctacaccgagtcagagttgcagatcgcactcattgctctgttcagcgaaatgctctaccggttccctaatatggtggtagcccaggtgacacgggagtcagtgcagcaggcaatcgcatccggaattaccgctcagcagattatccactttctccgcactcgggctcatcccgtgatgttaaagcaaaccccagtgctgccccctactattacggaccagatccgtttgtgggagctagaacgtgaccggctgaggtttaccgagggcgtgctttataatcagtttttgagtcaggttgatttcgaactgcttctggcacatgctagggaactcggcgtgctcgtgttcgagaattccgcgaagcgattgatggtcgttacacctgccggacactccgatgtcaaacggttttggaagcggcaaaagcatagcagctag

SEQ ID NO: 118353 - DNA, 1389 bp, Artificial Sequence
  derived and/or modified sequence
atggagtcgaccccaagtaggggcctcaatcgtgttcatctgcagtgtagaaatctgcaggagtttctcgggggactgtctcccggagtgttggatagactttacggtcacccagcgacatgcctggcagtctttcgggaactgccgagcttggccaaaaactgggtcatgcgcatgctgttcttagagcagccgcttcctcaggccgcagtcgcattatgggtgaaaaaggagtttagcaaagcccaggaggagagtacagggctgctttcgggcttaagaatttggcatactcagctgttgccaggaggactgcagggcctgatcctcaacccaattttcaggcagaatctcagaatcgcactgttagggggtggtaaagcttggagcgacgacactagtcaactgggacccgataaacacgccagggatgtgccttctcttgacaagtacgccgaggagcgttgggaagtggtgctgcacttcatggtcgggagcccctctgccgctgtatctcaagacttggcccagcttctcagccaggccggactaatgaagagtacagagccaggcgagcctccctgtatcacttctgccggttttcagtttctgttgctagacactccagcccagctttggtactttatgcttcagtacctacaaaccgcccagtcccgcggaatggacctggtcgagatcttgagtttcctattccaactctctttttctacactaggaaaggattatagcgttgaaggtatgtcagattcgctgctgaattttctgcaacacctcagagaattcgggctcgtttttcaacgaaaaagaaagagtaggcgatactacccaacccggttggcgattaatcttagctctggtgtcagcggtgccggaggaaccgtacaccaacccggattcatcgtcgtggaaacgaactaccgtctgtatgcctacactgagtccgagctccagattgcacttatcgccttattctcagagatgctgtataggttccctaacatggtagtggcgcaggtcacccgggagagtgtccaacaggccatagcatctggtattactgcacagcagattattcatttcctccggactcgggcacacccggtcatgctaaagcagacgcccgtcctaccgcctaccatcaccgaccagatccggctgtgggaactggagcgggaccggctgcgcttcacagaaggagtcttatacaaccagtttttgtcccaggtggatttcgagctgctgctcgcacacgctcgggaactcggtgttctagtgttcgagaatagcgccaagagacttatggtggttacccctgcgggacattctgacgtgaaaagattttggaagaggcaaaagcattcctcctag

SEQ ID NO: 118354 - DNA, 1389 bp, Artificial Sequence
  derived and/or modified sequence
atggagagcaccccctcacgaggtctgaaccgggtccatctgcaatgcagaaatctacaggagtttctcggcggactctcgcccggagttctggacagactctatggccaccctgctacctgtctcgcagtctttagggaattacccagtctggccaagaactgggtaatgcgtatgctgtttctggaacagcctctgcctcaggccgctgtggccctttgggtgaaaaaggagttttccaaagcccaagaagagagcactggacttctgtccggcctccggatctggcacacccagctcctccctggaggccttcagggcctgatactgaatcctatctttcgccagaatctccgcatcgccctgctgggtggaggcaaagcctggtccgacgacacatctcaattgggcccagacaaacacgcacgcgacgtgccctctctcgacaaatacgccgaagagaggtgggaagtagtcttgcacttcatggttggttctccttcagctgccgttagccaagatttagcccagttattgtctcaggctggcctgatgaaatccaccgaaccgggagagccgccttgtataacgtctgccggatttcaatttttgctgctcgacacacccgcacaactatggtattttatgctgcagtacctgcagactgcgcagtcccgaggaatggatctggtggagattctgtcctttctttttcaactctctttctccacacttgggaaggactattcagtcgagggcatgtccgattcccttctgaacttcctgcaacatttgcgcgagtttggtttagtcttccagcgaaaaaggaaaagcaggagatattacccaactaggctggctatcaatctgtctagtggcgtgagtggtgcagggggtactgtgcaccaacccggtttcatcgtagtggaaacgaattaccggctctacgcttatacagagtcagaattgcagattgcgcttattgctctcttttctgagatgctgtaccgatttccaaatatggtggtagcccaggtgacacgggagagtgtgcagcaagcgattgcatccgggattaccgcccaacagataatccattttttaaggacccgggcacaccccgtcatgctcaagcagaccccagtcttgcctcctacaatcacagatcaaatccggctgtgggagctggagagggaccgcttgcgatttactgaaggggtgctgtacaatcagttcctcagccaagtggactttgaactgctcttggcccacgcgagggaattaggcgtcttggtgttcgagaacagcgctaaacgattaatggttgtcacaccagcgggtcacagcgatgtgaaacgtttttggaaacggcagaagcatagttcgtag

SEQ ID NO: 118355 - DNA, 1389 bp, Artificial Sequence
  derived and/or modified sequence
atggaatccacccctagtcgaggtcttaatagggtgcatctccaatgtcgaaacttgcaagaatttctgggagggctgtcgcccggagtcctagaccgcttgtatggacaccccgctacctgcctggctgtttttagagagctgcctagccttgcaaaaaattgggtgatgcgcatgctcttcttggaacagcctctgccacaggccgcagtggccctgtgggttaagaaagagttctcgaaggctcaggaagagtcaaccggtcttctaagcggcctgcgaatctggcatacacagttgctgcctggcggactgcaaggcctgatcctgaatcccatatttaggcagaacctacggatagcactactgggtgggggtaaagcctggtccgacgacacctcccaactggggccagacaagcatgcccgtgacgtgccgtcacttgacaagtacgccgaggagaggtgggaggtggtgctccattttatggtgggaagtccatctgcagctgttagtcaggacctggcccaattactgtctcaagctgggctcatgaaatcaaccgaacctggagagcctccctgtatcactagtgcgggattccagttcctcttgcttgacaccccagcacaactctggtatttcatgttgcagtaccttcagaccgctcagagcagaggaatggacctagtcgagatcttaagtttcctctttcagctttccttcagcaccctgggcaaggactactccgtcgagggcatgagcgattcactccttaatttcttacagcatctccgggagttcgggctggtgtttcagagaaagcgcaagtctcggaggtactacccaactcgtttagctattaacctcagttctggcgtctctggcgctggtggaacagtgcaccagccaggattcatagtggtagaaacaaactatcgactgtacgcatataccgagtctgagctgcagatagctctgattgctctgttctccgaaatgctgtataggttcccaaacatggtggtcgcacaggtcactcgtgagtcagttcagcaggcaatcgcttccggcatcaccgcccagcagattattcatttccttcggacacgggcacatcccgtcatgctaaaacagaccccggtgttgcctcctacaatcaccgatcagattagactgtgggagctggagcgcgacaggctgagatttaccgagggggttctctacaaccagtttctttcccaagtggattttgaactcctccttgctcacgccagggaattgggcgtgctggtctttgaaaattctgccaagagactgatggttgtgacacccgctggccatagtgatgttaagagattttggaaacgacagaagcattcatcctag

SEQ ID NO: 118356 - DNA, 417 bp, Artificial Sequence
  derived and/or modified sequence
atggagagcaccccaagccgcggactgaacagagtgcacctgcagtgtagaaacttgcaagaattcctgggaggtctgagtccaggggttctggaccgtctgtatggccaccccgctacctgtctggccgtcttcagagaactcccaagcctagctaagaattgggttatgcgtatgctgttccttgaacagccactgccacaagccgcagtggccttgtgggtcaagaaggagttcagtaaggcacaagaagagagcaccggcctgctgtctggcctgcgaatttggcatacacagctgttgcctgggggactgcagggactgattctcaaccctatcttccgccagaatctgcgtattgcacttttaggcggaacaggtatcacaggggttagtcattgtgcttggccaggttag

SEQ ID NO: 118357 - DNA, 1389 bp, Artificial Sequence
  derived and/or modified sequence
atggaatccaccccatctaggggcctgaaccgtgtgcatctacagtgtaggaacctccaggagtttctcggcggtttatctcccggtgtgcttgatcgactctacggccaccccgctacatgtctagcggtgtttcgagaactgcccagtctggctaaaaactgggttatgcgaatgctgttcctcgagcagccactaccgcaggctgctgttgcattatgggtgaagaaggaattctcgaaggcgcaggaagaaagcacgggactgctctctgggctcagaatttggcacactcagctcttgcccggagggctgcagggcctcatcctcaacccaatcttcaggcagaatcttcgaatcgctctgcttggcggaggaaaagcttggtccgacgacacaagccagcttggtcccgacaagcacgccagagacgtgccttctctggataagtatgctgaagaaaggtgggaggtcgtcttacatttcatggttggcagcccctccgccgctgtgagccaggacctggcccagctactttctcaagcaggattaatgaagagcacagaaccgggtgaacccccatgcattacctccgccggatttcaattcttgcttctggacacgcctgctcagctctggtatttcatgctgcagtatttacagactgcacaatcgcggggtatggacctggttgaaattctgtccttcctgttccaactgagtttcagcactctcggtaaggactacagtgtcgagggcatgagcgatagcctgcttaattttctgcagcatttacgagagttcggactggtgtttcaaaggaaaaggaagtcccggagatactaccctacccggttggcaattaacttatccagtggggttagcggagccggtggaacggttcaccagccgggattcatcgtggtggagaccaattaccgattgtacgcctatactgagtctgagttacagatcgccttgatcgctttattctccgagatgttgtatcggttccctaacatggtcgtggctcaggtgaccagggagtcggtgcagcaggctattgcttcagggattaccgctcagcagataatccacttcctgaggacgcgggctcaccctgtgatgctgaaacagacccctgtgctgccccctaccattacagaccagatcaggttatgggagttggagagagataggcttaggtttaccgaaggggtcctttataaccagtttctgtcccaggtcgactttgaattgctgcttgcccatgcccgtgaactgggagttctagtgtttgagaacagcgccaagagactaatggtcgttactcccgctggacactcagacgtgaaacgattctggaagcgtcagaagcacagtagttag

SEQ ID NO: 118358 - DNA, 417 bp, Artificial Sequence
  derived and/or modified sequence
atggagagcacccccagccgaggcctgaacagggtgcatctgcagtgccggaacctgcaagagtttttgggcggtttgtctcccggagttcttgacaggctgtacggtcaccctgcaacctgtctggccgttttcagagagctgccttccctggccaagaactgggtcatgagaatgctctttttagagcagcctctgccccaggcagctgttgcactttgggtgaagaaagaattctctaaggctcaggaggaatcgacggggctcttgagcgggttgcgtatttggcacacccagctgttaccaggaggcctacagggccttattctgaacccaattttccgccagaatctccgaatcgccctcctgggaggaactgggatcacaggcgtgagccattgcgcatggccgggttag

SEQ ID NO: 118359 - DNA, 1389 bp, Artificial Sequence
  derived and/or modified sequence
atggaatctactccatctagaggactcaacagggtccacttacagtgcaggaatctgcaggagtttctaggcggattgtcacctggggtgctagacagactatacggacatcctgctacatgtctcgcagttttccgggagctgcccagcctcgctaaaaattgggtcatgcgcatgctgttcctggaacagcccctgccccaagctgcagttgcgctttgggtaaagaaggagttcagcaaagcccaggaggagagtacgggattgttaagtgggctgagaatttggcatacccagcttctgcctggaggcctgcagggtcttatactgaaccccatattccgtcagaatctgcgcattgccctattgggcggaggcaaggcctggagcgatgatacttctcagctgggacccgataagcatgcgagagacgttccgtcactcgataagtacgctgaggagagatgggaggtcgtcttgcacttcatggtaggatctccatccgctgcagtgagccaagaccttgctcagctgttgtcccaggctggcctgatgaagagtacagagccaggcgaacctccctgcatcacctccgccggtttccaatttctcctgcttgatacaccagcccagctgtggtatttcatgttacaatacctacagactgcccagagtagaggcatggatttggtggaaatactgtcatttctgttccagctgagcttttcaacactgggcaaagactacagcgtggaaggcatgtctgattctcttctcaattttttgcaacacctacgagagttcggactcgtctttcagcgaaagaggaaatctcgtcgttactaccccacaaggcttgccatcaacctaagctctggagtcagcggtgccggtggaaccgtccatcagccaggtttcatcgtggtggaaactaactaccggctgtatgcttatacagagtccgaactgcagatcgcactcatcgccctcttctctgaaatgctataccgcttcccaaacatggtggttgcacaggtgacccgagaaagcgtgcagcaggcaatagcctccggtattacagcacagcagatcatacacttccttcggactcgcgctcatccagtaatgctgaaacaaaccccggtgttacccccaacaattacggaccaaataaggttatgggagttggagcgcgacaggcttcgttttacggagggagtgctttacaatcagtttctctcacaggtcgattttgagctgctgctcgcccacgccagagagctcggtgtcctagtgtttgagaacagtgccaaaagactgatggtggtcactccagccggacactccgatgtgaaaaggttttggaaacgtcagaagcatagctcttag

SEQ ID NO: 118360 - DNA, 417 bp, Artificial Sequence
  derived and/or modified sequence
atggagagtaccccaagccgcggattaaacagggtgcacctgcagtgtcgaaatttgcaggagtttctgggcggactgtcaccgggagttctcgaccgcctctacgggcatcctgctacttgcctcgctgtgttccgcgagttgccgtctctcgccaaaaattgggtaatgcggatgctttttctggagcagccattaccacaggctgccgtcgcactgtgggtcaaaaaggagttctcaaaggcgcaggaggagtcgaccggcctgctttcaggcctgaggatctggcacacacaactgctgcctggcggacttcaaggtcttatcttgaaccccatctttcggcagaacttacgaatcgcgctcctcggcggaactggtattaccggggtttcccactgtgcgtggccaggatag

SEQ ID NO: 118361 - DNA, 1389 bp, Artificial Sequence
  derived and/or modified sequence
atggagagcacacctagccgaggcctgaatcgcgtgcacctgcagtgcagaaacctccaggagttcttgggcggtctaagcccaggtgtattggataggctgtacggacacccagcgacatgcctcgctgtctttcgcgaacttccctctttagccaagaactgggttatgagaatgctgtttctggagcagcctcttccacaggccgctgtggctttgtgggtgaaaaaggagttctccaaagcccaggaggaatcgactggcctcttgagcggcctacggatctggcatacccagttgctgcccggtggcctgcagggtctcatcctcaatcctattttccgccagaacctgaggatcgctttgcttggcggtggaaaagcctggtccgatgacaccagtcagttgggtcccgataaacacgcacgcgacgtcccatcacttgacaaatacgcagaggagaggtgggaagttgttctgcactttatggttggctcaccttcagcagccgtgagtcaggaccttgctcaactgctctcacaggcaggtttgatgaagagtactgagcctggggaaccaccttgcattactagcgcaggattccaatttttgctgctggacaccccagcccagttgtggtattttatgctccagtacctgcagacagcacaatcccgtgggatggacttggtcgagattctgtcctttctgttccagctctctttctctacattggggaaagactactctgtggagggaatgtctgattcgttgctcaattttctgcagcacctacgggaattcggactagttttccagcgcaaacggaaaagcaggagatactatccgacccgactcgcaataaatctgtccagcggggtgtccggggctgggggaactgtgcatcagccaggcttcatcgttgtggaaacgaattaccggctgtatgcctacacagaaagcgaactccagattgcgctcatcgcacttttctctgagatgttatacaggttccctaacatggtcgttgctcaagtgacacgcgagtccgttcaacaagcaatagccagcggcattaccgctcagcagataatacacttcttgagaacgcgggctcaccccgtgatgctgaaacagactccagtgctcccacctactatcactgaccaaatcagactttgggaactcgaaagagaccggttgaggtttactgagggcgtcctttataaccagtttctgtctcaagtggattttgaattactcctggcacatgctcgcgaactcggggttctagttttcgagaattccgctaagaggctgatggtcgttacgcccgctgggcactccgatgtaaagagattctggaagaggcagaagcacagttcatag

SEQ ID NO: 118362 - DNA, 1389 bp, Artificial Sequence
  derived and/or modified sequence
atggagtcaactcccagcaggggtttaaacagggtccacctgcagtgcagaaacctgcaggagttcctgggcggattgtcgcccggtgttctagaccgcctctacggacacccagctacgtgcttggccgtgtttagagagctcccgagcctggccaagaactgggtgatgcgtatgctgttcctggagcagcccctaccacaagccgctgtggcactctgggtgaagaaagagtttagcaaggcccaggaggaatcgacaggtctgctatctggtctccgtatttggcacacacagctccttccgggtggactgcagggtctgattttgaatccaatctttcgccagaaccttcgtatagccctcttggggggtggtaaagcttggtctgatgatacctctcaacttggacctgacaagcatgcccgagacgtgccgagcttagacaaatacgcagaagaacgctgggaggtcgtgctgcactttatggtggggagccctagcgccgctgtcagccaggacctcgcccagctcttaagccaggccggactgatgaagtccacagaacccggagagccaccatgcatcacaagcgcgggttttcaatttcttctcctggacacccccgcacagctctggtatttcatgctgcagtatttacagacggcccagtcgcgagggatggatctcgtggaaattctgagcttcctgttccagctctccttttccaccctcgggaaggattattcagtagagggaatgagcgacagtctgctcaattttcttcaacacctaagagagttcggactggtgtttcagaggaaaaggaagagcagacgatactaccctacgcgcctcgcgatcaatctgtcttcgggcgtgtctggggcagggggtactgtgcaccagcctggtttcattgttgttgaaactaactaccgtctctacgcttatacagaatctgagctccagattgctctgattgcattgtttagcgagatgctctacagattccctaacatggtggttgctcaagtaacaagagagtctgttcagcaggccatcgcttcaggcataacagcccagcaaatcattcatttcctgagaactagggctcatccggtgatgcttaaacagactccggtgttaccacctacgataactgaccagattaggctctgggagctagaacgggatcgtttgagattcacggagggtgtgctgtacaatcagttcctgagccaggttgacttcgaactccttctggcccatgcccgtgaacttggcgtcctggttttcgagaactctgctaaaagattaatggttgtgacccccgctggacattctgacgtgaagagattctggaagcggcagaaacattcctcttag

SEQ ID NO: 118363 - DNA, 1389 bp, Artificial Sequence
  derived and/or modified sequence
atggaaagcacccctagtcgcggactgaaccgggttcatctgcagtgtaggaatctccaggagtttctgggagggttatctcccggagtcctcgataggctttacgggcaccccgctacgtgcctggcagtctttcgcgagcttccatccctggccaaaaactgggtaatgcgcatgcttttcctcgagcaacccctgccccaggccgctgtcgcactgtgggtgaagaaagagttcagtaaagcccaggaggaatcaaccgggcttctgtctggtctccgaatatggcatacccaacttctccctgggggtctgcaaggactgattctgaatcccatatttaggcagaacctgcgcattgccttgctgggtggtgggaaagcttggtcagacgacacttcacaactggggccagataaacatgctagagatgtgcccagcctggacaagtatgccgaagaacgttgggaagtggtactgcatttcatggttggatctccctccgcagcagtgagtcaggacctggcccagctgctctctcaggccggtctgatgaagtccacagagcctggagagccgccatgtattaccagcgcaggattccagttcctgttgctggacacgccggctcaactgtggtacttcatgttgcagtatctgcaaacggcacagtccaggggcatggatctggttgaaatactctcctttttgttccagctgagtttcagcactctgggcaaagactactcagtcgaagggatgtccgacagtcttctcaactttctgcagcatctacgcgagtttggccttgtgtttcagagaaaaaggaaatcccgaaggtactaccctacacgactggcaatcaatttatcctctggggtgtcaggtgccggaggaaccgtgcatcagcctgggttcatcgttgtggaaaccaactacagattgtacgcctatacagagtccgagctgcagatcgccttgatcgccttgtttagcgagatgctctacaggttccctaatatggttgtggcccaggtcacccgcgaaagtgtgcagcaggcaattgcctctggcataacagcacagcagatcattcactttctgcggactagagcccatccagtcatgctgaaacagaccccggtcctgcctcctactataactgatcagataagactgtgggaacttgagagggataggcttcgatttactgagggcgtattgtacaaccagtttttatctcaagtggactttgagctgctactcgctcatgcaagagagttgggggtcctggtcttcgaaaattcagccaaacgcctaatggtggtgacgcctgccggacattcagatgtgaagagattctggaagaggcaaaagcactccagctag

SEQ ID NO: 118364 - DNA, 1389 bp, Artificial Sequence
  derived and/or modified sequence
atggaatcgacacccagcagaggcctcaatagggtgcacttacagtgtcgcaacttgcaggaatttctaggaggacttagccccggtgtgttagataggctgtacggtcatcctgcaacatgcttagcagtcttccgagagctgccatcactcgccaaaaactgggttatgcggatgctctttctcgagcaaccactgccccaggcagctgtcgccctgtgggtcaagaaggaattttcgaaggcccaggaggagtccacaggcctcctgagcggtctgcgcatctggcatacacaactcttgcccggaggtctacagggtctcatactaaatccaatttttcgccagaacctgcgtatcgctttactgggtggcggtaaggcctggtccgatgacacatcccagttggggccagataaacacgccagagatgtgccgagccttgataaatacgcagaggagcgttgggaggtggtcctgcacttcatggtggggagcccgtctgccgctgttagtcaggatttggcacagttattaagccaggccggtctgatgaaatctaccgaaccgggagaacctccctgtattacttccgctggattccagttcctgttgttagacacccctgcccaactctggtatttcatgctgcaatacttgcaaacagcacagtccagaggcatggacttggtcgagattctgtcctttctctttcagctgtctttcagcaccctgggtaaagattacagtgtggagggaatgtcagattccctacttaatttcttacaacatctgagagagttcggcctcgtctttcaaagaaagagaaaatccaggagatattaccctacgagactagcgatcaacctgagcagcggtgtgagcggcgcaggcggaactgtccaccaacccggatttatcgtggtggagactaactaccgcctctatgcttatacagagtccgagctgcaaatcgcccttatcgctctcttttctgagatgctgtaccgatttcccaatatggtggtggcccaggtcaccagagaatccgtgcagcaagccattgccagtgggattacagcacagcagatcatccattttctccgaacccgggctcaccctgtcatgctgaagcagacacccgtccttccacctactatcacagaccaaattcgtctttgggaattagagagggatagattgaggtttaccgaaggcgtgctctataatcagtttctctcccaggtagactttgagcttcttctagctcacgcacgggagttgggggtcctcgtctttgagaattcagccaagcgcttgatggtagtcacgccggctggtcattcagatgttaaaagattctggaagaggcagaagcactcctcttag

SEQ ID NO: 118365 - DNA, 417 bp, Artificial Sequence
  derived and/or modified sequence
atggagagtactccaagtcggggtttgaatcgcgtgcacttgcagtgccgcaatctgcaagagtttcttgggggtctgagcccaggggtcctcgatagactgtacggtcacccagcgacatgcctggctgtcttccgagaactccctagtctggccaagaattgggtgatgagaatgctctttttggagcaacccctgcctcaggccgctgttgcactctgggtgaaaaaggagttttctaaagctcaggaagaatccactgggctgctttccggtttaagaatttggcacacccagcttctgcccggtgggctacagggactgatattgaatcccatttttaggcagaaccttcgtatcgccctgctcggcggaacaggcattacaggagttagtcattgcgcatggcctggctag

SEQ ID NO: 118366 - DNA, 417 bp, Artificial Sequence
  derived and/or modified sequence
atggaatcaaccccttcccgcggactgaaccgcgtgcacctgcagtgccggaacctgcaagagttcctcgggggtctgtctcctggggttcttgatcggttgtatgggcaccccgcaacctgcctcgccgtgtttcgtgagctcccatctttggcaaagaattgggttatgcgcatgttgttcctggagcagcctcttccccaggccgcagtggccctctgggtgaaaaaagagttttccaaggcacaagaggagtccaccggcctgctaagcggacttcggatttggcacacccagcttttgcctgggggtttgcaaggtctgatactgaaccctatcttcaggcagaacttgcggatcgctctactgggcggtaccggcatcacaggcgttagccactgcgcttggccgggatag

SEQ ID NO: 118367 - DNA, 417 bp, Artificial Sequence
  derived and/or modified sequence
atggaatctacaccctcacgcggtctcaacagagtccatcttcagtgccgaaacttacaggaatttctgggcggactgtcacctggcgttctggaccgcttatatgggcacccagccacttgcctggcagtgttcagagaattgccgagcctggcgaagaactgggtgatgagaatgctttttctggagcaacctctacctcaggcagccgtcgccctctgggtcaagaaggagttttctaaggcacaagaagagtcaacgggtctgctcagtggtctgcgcatctggcatacacagcttctgcctggtggcttgcaaggcctgattttgaatcctatttttagacaaaacttgcggatcgcactcttggggggaacagggattaccggcgtgagccactgtgcgtggccgggttag

SEQ ID NO: 118368 - DNA, 1389 bp, Artificial Sequence
  derived and/or modified sequence
atggagagtacgccgagcagggggctcaatagagtgcatctccaatgccgaaacttgcaagagtttttgggtggcttgtcacctggtgtactggatagactgtatgggcacccggctacctgcttggcagttttcagggagctgccgtccctggcaaaaaactgggtcatgagaatgcttttcctggaacagcccctccctcaggctgccgtggcactgtgggttaagaaagaattctccaaggcccaggaagagtccaccggcttattgtcgggcctgagaatatggcacacccagctgctacccggaggactccagggactcattctgaaccctatattcagacagaatctccgaatcgctttacttggtggaggcaaagcatggtcagacgatacaagccaactgggaccagataaacacgccagggacgtgcccagcctggacaagtatgcagaggagcgctgggaggttgttctacacttcatggtcggatctccttccgccgctgtcagccaggacctggctcaactgttgagccaggccggtctgatgaaatccacagagccgggtgaaccaccctgcatcacatccgcgggtttccagttcctgctcttggacacacccgctcaactgtggtactttatgcttcagtacttgcagaccgctcagtccagaggaatggatcttgtcgagatcctctcattcctttttcagctgtctttttcaacactcggaaaggactattctgtcgagggaatgagtgactcactcctgaatttcctgcaacacctgcgcgagtttggtctggtgttccaaaggaagcggaaatcaagaagatactatcctacaaggcttgctataaacttgagctccggagtgtcaggcgcaggcggaactgtgcaccagcccggttttattgtggtcgagactaactatcgcctttatgcttatacagaaagcgagctgcaaatcgctctgatcgcattgttctccgaaatgctgtatagattcccaaatatggtcgtggctcaggtcaccagagaatccgtccaacaggccatcgcctccggcatcaccgcccagcaaatcattcattttcttcgtactcgggcacaccccgtcatgctaaagcaaacccctgtgttgccacctactatcacagaccagatccggctgtgggaactggagcgggataggctgcgattcactgagggggtgctctacaatcagttcctctcgcaagtcgactttgaactgctgttagctcatgcccgagagctaggtgtcctggttttcgagaacagcgctaaaaggctaatggtggttactccagcgggacattctgacgtcaaacgtttctggaaaaggcaaaaacactccagctag

SEQ ID NO: 118369 - DNA, 663 bp, Artificial Sequence
  derived and/or modified sequence
atgcgaatgctgtttctggagcagcccctgccacaggcggcagtggcactttgggtgaaaaaggagttctcaaaggcacaagaagaatctacagggctgctgtcgggattgagaatttggcacacccagctcctgcccggtggactgcaggggctcatcctgaaccccattttccgacagaatctgcggatagccttgctggggggaggcaaggcttggtctgatgataccagccagttgggtcctgataagcacgcccgagacgtaccctccttagacaagtacgctgaggaacgctgggaagttgttctgcatttcatggtgggctcaccaagtgcggctgtgtctcaagacctcgcgcagttactgagtcaggccggtctcatgaaatctaccgaacctggagaacctccatgtattaccagcgccggttttcaatttctgctcctggataccccagcccaactctggtattttatgctgcagtacctgcagacagcccagtcaagggggatggacctggtggagatcctgagcttcttgtttcagctatcattctctacccttggaaaagactactccgtggaaggtatgagtgacagtctactgaacttcttacagcatcttcgcgaattcggcttggtctttcagcgcaaagtttag

SEQ ID NO: 118370 - DNA, 663 bp, Artificial Sequence
  derived and/or modified sequence
atgaggatgctattcctggagcaacccctgcctcaggccgctgtggcattgtgggtaaaaaaggaattcagtaaggcgcaagaagaatcaaccggtctccttagcggcctgcgtatttggcatacccagttgctaccaggtggactgcagggcctgattttaaatcccatctttcggcagaatctgcggatcgcactgttgggagggggtaaagcctggagcgatgatacaagtcagctgggcccagataaacatgctcgggacgtaccatccttggacaaatatgcagaggagcgatgggaggtcgtgctccacttcatggtgggaagcccgtccgcagctgtgagccaggacctcgctcagctcctgagtcaggctggcctaatgaagtctaccgagcccggagaacctccttgtataacttccgctggctttcaattcctcctgttggacactccagcacagctgtggtacttcatgctgcagtaccttcagactgcgcagtctcgaggtatggatctggtcgaaattttaagttttctctttcagttatccttttcaactttggggaaagactatagtgtggaggggatgtcagactctttacttaatttcttgcaacacctgcgggagttcggactcgtctttcagaggaaagtgtag

SEQ ID NO: 118371 - DNA, 663 bp, Artificial Sequence
  derived and/or modified sequence
atgcgcatgctattcctggaacagcctttgccccaggctgctgtagctctgtgggtgaaaaaggaattctcgaaagctcaggaggagtcaactggtctcctgagcggcctacgtatatggcacacacagttgctgcctggcggattacaggggctgatccttaaccccattttccgccagaacctgaggatcgctcttcttgggggaggaaaggcgtggagcgatgacacaagtcagctcggcccagataaacatgctcgtgacgtcccttcactggataaatacgcagaggagaggtgggaagtcgttcttcatttcatggttggatccccatcggccgctgtgtcacaggacttggctcagttgctctcccaggcagggctgatgaaatcaactgaacctggagagcctccttgtattacatcagccggttttcagtttctcctcctggatacacctgctcagttgtggtacttcatgctgcaatatttacagactgcccagtctcgaggaatggatttggtcgagatcttaagctttctattccaactgtctttcagtaccctcgggaaggattattctgtggagggaatgtccgactcactcctcaatttcttgcagcatttgcgcgagttcggactggtgttccaacggaaagtttag

SEQ ID NO: 118372 - DNA, 663 bp, Artificial Sequence
  derived and/or modified sequence
atgaggatgttgttcctggaacagcctctgccacaagctgctgtggccctttgggtaaagaaggagttttctaaggcacaagaagagtcaactggcctactgtctggactgagaatctggcacacccagcttctgcccggaggtttgcaaggcctcattctcaaccctatctttcgccagaacctacgaatcgctctgttagggggagggaaggcatggtcagatgacactagccagctggggcctgataaacatgcaagagatgtaccttcgctggataaatatgccgaggaaaggtgggaagtggtgttgcattttatggttggatcacccagtgctgccgtgagccaggacctggcgcagctgctgtcacaggccggtttgatgaagtctacagagcctggagaacccccatgcattacaagcgccggatttcagttccttctactagacacacctgcgcagctctggtactttatgctgcagtacctgcagacagcacagtccagagggatggacttggtcgaaattctatcattcttattccagctgtccttcagcaccctagggaaagattactcagtggaaggaatgagcgattccctattgaatttcctccagcatctcagggagttcggacttgtctttcaaagaaaagtgtag

SEQ ID NO: 118373 - DNA, 663 bp, Artificial Sequence
  derived and/or modified sequence
atgcgaatgctttttctcgaacaacccctgccccaggctgccgtggcgctgtgggtcaagaaggagttctccaaagcgcaagaggaatcaacaggtcttttgagtggattgcgtatctggcacacacagttactgcccggtgggttgcaagggctaattttaaatcctatcttccgacagaatcttcggatcgcgctactgggaggcggaaaagcctggtctgatgacacctctcaattggggccagacaagcacgccagagacgtgcccagcctggataagtatgccgaagagcgatgggaggtcgtgctgcacttcatggtgggctctccaagcgcagcagtctcacaagatctggcccagcttctgtcccaggccggattgatgaagagcacagaaccaggtgagcctccctgtatcacttccgcaggcttccaatttcttcttttggacactccagcccagctgtggtattttatgctccaatatctgcagaccgcccagtcccgcggaatggaccttgtagagatcctgagttttctgttccagctgagtttcagcaccctcggcaaagactacagtgttgaagggatgtccgattcactgctgaacttcctccagcacctcagggaattcggcctagtcttccagagaaaagtctag

SEQ ID NO: 118374 - DNA, 663 bp, Artificial Sequence
  derived and/or modified sequence
atgcggatgctgttcctggagcaaccgttaccacaggcagccgtggcgctctgggttaagaaggaattttctaaggcgcaggaggaatctacgggactgctcagtggattgagaatttggcatactcaactcctgcctggcggactccaggggctaatcctcaatcccattttccggcaaaatctgaggatcgccctgctgggcggtggtaaggcgtggtcagatgataccagccagctcgggcctgataagcacgccagagacgttccttccctcgacaagtacgctgaagaaaggtgggaggtggtgctccacttcatggtagggtcccctagcgctgctgtatctcaggaccttgcacagctgctgtcgcaggccggtctgatgaaaagcactgaacccggagagcccccttgcataacctctgccggtttccagttcttattgctggacacaccagcccagctatggtactttatgttacagtacttgcagacagctcagtccagaggtatggacctggtagagatactgtcctttctgtttcaactgtcattcagcacactcggtaaggattattccgtggaaggtatgagcgacagcctgctgaacttccttcaacacctgcgggagtttggccttgtttttcagcgtaaggtgtag

SEQ ID NO: 118375 - DNA, 1389 bp, Artificial Sequence
  derived and/or modified sequence
atggagagcacccccagcagaggcctgaacagagtgcacctgcagtgcagaaacctgcaggagttcctgggcggcctgagccccggcgtgctggacagactgtacggccaccccgccacctgcctggccgtgttcagagagctgcccagcctggccaagaactgggtgatgagaatgctgttcctggagcagcccctgccccaggccgccgtggccctgtgggtgaagaaggagttcagcaaggcccaggaggagagcaccggcctgctgagcggcctgagaatctggcacacccagctgctgcccggcggcctgcagggcctgatcctgaaccccatcttcagacagaacctgagaatcgccctgctgggcggcggcaaggcctggagcgacgacaccagccagctgggccccgacaagcacgccagagacgtgcccagcctggacaagtacgccgaggagagatgggaggtggtgctgcacttcatggtgggcagccccagcgccgccgtgagccaggacctggcccagctgctgagccaggccggcctgatgaagagcaccgagcccggcgagcccccctgcatcaccagcgccggcttccagttcctgctgctggacacccccgcccagctgtggtacttcatgctgcagtacctgcagaccgcccagagcagaggcatggacctggtggagatcctgagcttcctgttccagctgagcttcagcaccctgggcaaggactacagcgtggagggcatgagcgacagcctgctgaacttcctgcagcacctgagagagttcggcctggtgttccagagaaagagaaagagcagaagatactaccccaccagactggccatcaacctgagcagcggcgtgagcggcgccggcggcaccgtgcaccagcccggcttcatcgtggtggagaccaactacagactgtacgcctacaccgagagcgagctgcagatcgccctgatcgccctgttcagcgagatgctgtacagattccccaacatggtggtggcccaggtgaccagagagagcgtgcagcaggccatcgccagcggcatcaccgcccagcagatcatccacttcctgagaaccagagcccaccccgtgatgctgaagcagacccccgtgctgccccccaccatcaccgaccagatcagactgtgggagctggagagagacagactgagattcaccgagggcgtgctgtacaaccagttcctgagccaggtggacttcgagctgctgctggcccacgccagagagctgggcgtgctggtgttcgagaacagcgccaagagactgatggtggtgacccccgccggccacagcgacgtgaagagattctggaagagacagaagcacagcagctag

SEQ ID NO: 118376 - DNA, 417 bp, Artificial Sequence
  derived and/or modified sequence
atggagagcacccccagcagaggcctgaacagagtgcacctgcagtgcagaaacctgcaggagttcctgggcggcctgagccccggcgtgctggacagactgtacggccaccccgccacctgcctggccgtgttcagagagctgcccagcctggccaagaactgggtgatgagaatgctgttcctggagcagcccctgccccaggccgccgtggccctgtgggtgaagaaggagttcagcaaggcccaggaggagagcaccggcctgctgagcggcctgagaatctggcacacccagctgctgcccggcggcctgcagggcctgatcctgaaccccatcttcagacagaacctgagaatcgccctgctgggcggcaccggcatcaccggcgtgagccactgcgcctggcccggctag

SEQ ID NO: 118377 - DNA, 663 bp, Artificial Sequence
  derived and/or modified sequence
atgagaatgctgttcctggagcagcccctgccccaggccgccgtggccctgtgggtgaagaaggagttcagcaaggcccaggaggagagcaccggcctgctgagcggcctgagaatctggcacacccagctgctgcccggcggcctgcagggcctgatcctgaaccccatcttcagacagaacctgagaatcgccctgctgggcggcggcaaggcctggagcgacgacaccagccagctgggccccgacaagcacgccagagacgtgcccagcctggacaagtacgccgaggagagatgggaggtggtgctgcacttcatggtgggcagccccagcgccgccgtgagccaggacctggcccagctgctgagccaggccggcctgatgaagagcaccgagcccggcgagcccccctgcatcaccagcgccggcttccagttcctgctgctggacacccccgcccagctgtggtacttcatgctgcagtacctgcagaccgcccagagcagaggcatggacctggtggagatcctgagcttcctgttccagctgagcttcagcaccctgggcaaggactacagcgtggagggcatgagcgacagcctgctgaacttcctgcagcacctgagagagttcggcctggtgttccagagaaaggtgtag

SEQ ID NO: 118378 - protein, 957 aa, Artificial Sequence
  derived and/or modified sequence
MAQVAMSTLPVEDEESSESRMVVTFLMSALESMCKELAKSKAEVACIAVYETDVFVVGTERGRAFVNTRKDFQKDFVKYCVEEEEKAAEMHKMKSTTQANRMSVDAVEIETLRKTVEDYFCFCYGKALGKSTVVPVPYEKMLRDQSAVVVQGLPEGVAFKHPENYDLATLKWILENKAGISFIIKRPFLEPKKHVGGRVMVTDADRSILSPGGSCGPIKVKTEPTEDSGISLEMAAVTVKEESEDPDYYQYNIQGSHHSSEGNEGTEMEVPAEDDDYSPPSKRPKANELPQPPVPEPANAGKRKVREFNFEKWNARITDLRKQVEELFERKYAQAIKAKGPVTIPYPLFQSHVEDLYVEGLPEGIPFRRPSTYGIPRLERILLAKERIRFVIKKHELLNSTREDLQLDKPASGVKEEWYARITKLRKMVDQLFCKKFAEALGSTEAKAVPYQKFEAHPNDLYVEGLPENIPFRSPSWYGIPRLEKIIQVGNRIKFVIKRPELLTHSTTEVTQPRTNTPVKEDWNVRITKLRKQVEEIFNLKFAQALGLTEAVKVPYPVFESNPEFLYVEGLPEGIPFRSPTWFGIPRLERIVRGSNKIKFVVKKPELVISYLPPGMASKINTKALQSPKRPRSPGSNSKVPEIEVTVEGPNNNNPQTSAVRTPTQTNGSNVPFKPRGREFSFEAWNAKITDLKQKVENLFNEKCGEALGLKQAVKVPFALFESFPEDFYVEGLPEGVPFRRPSTFGIPRLEKILRNKAKIKFIIKKPEMFETAIKESTSSKSPPRKINSSPNVNTTASGVEDLNIIQVTIPDDDNERLSKVEKARQLREQVNDLFSRKFGEAIGMGFPVKVPYRKITINPGCVVVDGMPPGVSFKAPSYLEISSMRRILDSAEFIKFTVIRPFPGLVINNQLVDQSESEGPVIQESAEPSQLEVPATEEIKETDGSSQIKQEPDPTW

SEQ ID NO: 118379 - protein, 106 aa, Artificial Sequence
  derived and/or modified sequence
MAQVAMSTLPVEDEESSESRMVVTFLMSALESMCKELAKSKAEVACIAVYETDVFVVGTERGRAFVNTRKDFQKDFVKYCVEEEEKAAEMHKMKSTTQANRMSVDA

SEQ ID NO: 118380 - DNA, 2874 bp, Artificial Sequence
  derived and/or modified sequence
atggctcaggttgccatgtccaccctgcccgttgaggatgaggagagcagtgagagccgaatggtggtgacttttctcatgtccgcccttgagtcgatgtgtaaggaactcgccaagtcaaaggccgaggtagcatgcattgcggtatatgaaactgacgtttttgttgtgggcaccgaaaggggacgcgcgttcgtaaatacacggaaggatttccagaaggacttcgttaagtactgcgtggaggaagaggagaaggccgccgaaatgcataaaatgaagagtactacacaggcaaatagaatgtccgttgacgctgtcgagatcgagacccttcggaaaaccgtggaggattacttctgcttctgctacggaaaagccctgggtaaatcgacagtagtgccggtcccctatgagaaaatgctgcgggatcagagtgcagtcgtggtccagggattgcctgaaggcgtggccttcaaacacccagaaaattatgacctcgcgacactgaagtggattctggaaaataaggctggaatctcctttattatcaagcgtccctttcttgaacctaagaagcatgtgggaggtagagttatggtcactgacgctgacaggtccattctatcacccggcggctcatgtggcccaatcaaggtgaaaactgaaccaaccgaggactcagggattagccttgaaatggcggcggtgactgttaaggaggaaagtgaagatcccgactactaccagtataacatacaggggagtcatcatagtagcgagggaaatgaaggcaccgagatggaagtccctgcggaggacgacgactacagtcccccatcaaagcgcccaaaggccaacgagctcccccagcccccggttcctgaacctgctaacgcgggaaaaaggaaggttagggagttcaattttgaaaagtggaacgccaggataactgacttaagaaagcaggtcgaggagttatttgagcgcaagtatgcccaggccatcaaggccaagggccctgtcactatcccttatccactctttcagtcgcatgttgaggacctctacgttgaggggctgccagaaggaattccttttaggagacctagcacgtatgggatccccaggctggagaggattttacttgcaaaggagcgcatcaggtttgtcatcaaaaagcatgaactgctgaattccaccagagaggatctgcagctggataagccagctagtggggtgaaggaagagtggtacgctcggattaccaaattgagaaagatggttgatcagctcttttgcaagaaatttgcagaagctcttgggtcaacggaggccaaggccgtcccatatcagaaattcgaggctcacccaaatgatctatacgtggaaggtctgcctgagaacatccccttcaggtccccatcctggtacgggatccctaggctggaaaaaatcattcaagtggggaaccgtatcaagtttgtgatcaaacgcccagagctgctgacacacagcacaacggaggttacgcaacctcgcactaacacccctgtgaaagaagactggaacgtccggatcacaaagctgaggaaacaggtcgaggaaatcttcaatctgaagttcgcacaagcgctgggcctcacagaggccgtgaaggtgccctacccagttttcgagtccaacccagagttcttatatgtggagggactccccgaagggatcccatttagatcgcccacctggttcgggatcccacggctcgagaggattgtgcgcggatccaataagatcaagttcgtggttaagaaacccgagctggtgataagctaccttccacctgggatggcgtccaagataaataccaaggcgcttcaatccccaaaacgccctcgctctcctgggagcaactccaaggtgcctgaaattgaggtcaccgtggaaggacctaacaacaataatcctcagactagtgccgtgcggaccccaactcaaaccaatgggagtaatgtgccttttaaacctagaggtagagaattctctttcgaagcatggaatgctaagattaccgacctcaaacagaaagttgagaatctgttcaacgaaaagtgtggagaagcactcgggctgaagcaggctgtgaaggtccccttcgcactgtttgaaagttttcccgaggacttctatgtggagggtctgcccgaaggagtgccttttaggaggcccagcactttcggaatcccccggcttgagaaaatcctgcgcaataaagcaaagatcaagttcattatcaaaaaacctgaaatgttcgaaactgccattaaagagagcacctcgagtaagtcacccccccgtaaaattaacagctcacccaatgtcaataccaccgcgtcgggggtagaggatttgaatattattcaggtaactatcccagatgatgacaacgaaaggctcagtaaggttgagaaagcacgtcaactgcgcgagcaagtgaacgacctgttttctaggaaatttggagaagccatcggaatgggctttccagtgaaagtaccatatagaaaaattacaattaacccgggctgcgtggtcgtggacggaatgcccccaggtgtctccttcaaagcccctagttacctggagatcagcagtatgcgaagaatactggactcagctgagtttataaagttcacagttatacggccatttccaggcctcgttattaacaatcagctcgtcgatcaatccgaatccgaaggcccagtgatccaagagagcgctgaaccctcccagctggaagttcctgctacggaggagataaaagagactgacggttcaagccagattaaacaagaaccagatccaacgtggtag

SEQ ID NO: 118381 - DNA, 4356 bp, Artificial Sequence
  derived and/or modified sequence
cgcccccccgcttccccgcacgcgctctccagccgcggccgcccgcctgccgcggtcaccccggcctctgcctctgtcccccagtgatcggatcaaggcgctgagcgaggccctgcctgcggggcggccatgcggcggtgacaggagcgcgaccgacacgcacgggcccctcgccccctctcgcctcccgtccgctcgccagctcccctcagccgaggctgctccgcggcggccgcagcccgcgcgcggcccacactcgcctcccctcggcacccccggccccggagctgcctggaggcggccgcactcggggatcatggcccaagttgcaatgtccaccctccccgttgaagatgaggagtcctcggagagcaggatggtggtgacattcctcatgtcagctctcgagtccatgtgtaaagaactggccaagtccaaagccgaagtggcctgcattgcagtgtatgaaacagacgtgtttgtcgtcggaactgaaagaggacgtgcttttgtcaataccagaaaggattttcaaaaagattttgtaaaatattgtgttgaagaagaagaaaaagctgcagagatgcataaaatgaaatctacaacccaggcaaatcggatgagtgtagatgctgtagaaattgaaacactcagaaaaacagttgaggactatttctgcttttgctatgggaaagctttaggcaaatccacagtggtacctgtaccatatgagaagatgctgcgagaccagtcggctgtggtagtgcaggggcttccggaaggtgttgcctttaaacaccccgagaactatgatcttgcaaccctgaaatggattttggagaacaaagcagggatttcattcatcattaagagaccttttttagagccaaagaagcatgtaggtggtcgtgtgatggtaacagatgctgacaggtcaatactatctccaggtggaagttgtggccccatcaaagtgaaaactgaacccacagaagattctggcatttccctggaaatggcagctgtgacagtaaaggaagaatcagaagatcctgattattatcaatataacattcaaggaagccaccattcttcagagggcaatgaaggcacagaaatggaagtaccagcagaagatgatgattattctccaccgtctaagagaccaaaggccaatgagctaccgcagccaccagtcccggaacccgccaatgctgggaagcggaaagtgagggagttcaacttcgagaaatggaatgctcgcatcactgatctacgtaaacaagttgaagaattgtttgaaaggaaatatgctcaagccataaaagccaaaggtccggtgacgatcccgtaccctcttttccagtctcatgttgaagatctttatgtagaaggacttcctgaaggaattccttttagaaggccatctacttacggaattcctcgcctggagaggatattacttgcaaaggaaaggattcgttttgtgattaagaaacatgagcttctgaattcaacacgtgaagatttacagcttgataagccagcttcaggagtaaaggaagaatggtatgccagaatcactaaattaagaaagatggtggatcagcttttctgcaaaaaatttgcggaagccttggggagcactgaagccaaggctgtaccgtaccaaaaatttgaggcacacccgaatgatctgtacgtggaaggactgccagaaaacattcctttccgaagtccctcatggtatggaatcccaaggctggaaaaaatcattcaagtgggcaatcgaattaaatttgttattaaaagaccagaacttctgactcacagtaccactgaagttactcagccaagaacgaatacaccagtcaaagaagattggaatgtcagaattaccaagctacggaagcaagtggaagagatttttaatttgaaatttgctcaagctcttggactcaccgaggcagtaaaagtaccatatcctgtgtttgaatcaaacccggagttcttgtatgtggaaggcttgccagaggggattcccttccgaagccctacctggtttggaattccacgacttgaaaggatcgtccgcgggagtaataaaatcaagttcgttgttaaaaaacctgaactagttatttcctacttgcctcctgggatggctagtaaaataaacactaaagctttgcagtcccccaaaagaccacgaagtcctgggagtaattcaaaggttcctgaaattgaggtcaccgtggaaggccctaataacaacaatcctcaaacctcagctgttcgaaccccgacccagactaacggttctaacgttcccttcaagccacgagggagagagttttcctttgaggcctggaatgccaaaatcacggacctaaaacagaaagttgaaaatctcttcaatgagaaatgtggggaagctcttggccttaaacaagctgtgaaggtgccgttcgcgttatttgagtctttcccggaagacttttatgtggaaggcttacctgagggtgtgccattccgaagaccatcgacttttggcattccgaggctggagaagatactcagaaacaaagccaaaattaagttcatcattaaaaagcccgaaatgtttgagacggcgattaaggagagcacctcctctaagagccctcccagaaaaataaattcatcacccaatgttaatactactgcatcaggtgttgaagaccttaacatcattcaggtgacaattccagatgatgataatgaaagactctcgaaagttgaaaaagctagacagctaagagaacaagtgaatgacctctttagtcggaaatttggtgaagctattggtatgggttttcctgtgaaagttccctacaggaaaatcacaattaaccctggctgtgtggtggttgatggcatgcccccgggggtgtccttcaaagcccccagctacctggaaatcagctccatgagaaggatcttagactctgccgagtttatcaaattcacggtcattagaccatttccaggacttgtgattaataaccagctggttgatcagagtgagtcagaaggccccgtgatacaagaatcagctgaaccaagccagttggaagttccagccacagaagaaataaaagagactgatggaagctctcagatcaagcaagaaccagaccccacgtggtagacctcttccctcctaggcttaaagtatcagtggttgagaagagcttttcggacctgttactaccccaagctgtgtaatatacttgtataacagaaataccttctatacaaacctttttttctacttttagatagaaatgtctactttttcagcagttctgtgaattaaagagcagagtgactgtgggtctggaatggctggtgtacttgggaatgtactatcaggattttacagcaatgctgggaaatgacagggaaaatgacaggaatgaatctcaccagattttttatgtactcagcagagccttgagttacggtgtttattttccaatcaagtgaagatatctcctacttctcctactggaacatctcagcttctgcagtgaagaaaaattcctgtgatagttcagttctttagtttttctatttgaaaaaaaaaaatcatttaaatgatcctttgttcacggctctccttaatgactgagtgaacagttcctatctgtatatttgactaaaccttttcctaagctatctctcatggttcctatgtttttttatcataattaaaagcaaaaccatctggatcacctaacagtcagaggtcagtatctcagcgtgtgaattatagaggaaatacagagagaacctcttccacttttacttttcgtccaaataaaatgcatggtgtaccagaagttgaagatcgggttgaggattggggctagctcgatgacactaaggccccaacatcgcgggacctgctgtggcgcggattcttaggaacgctgttctagccggccccctctccaggggtcgccgtggccggcattatttcctagttcttcttgtaaccctgaggtgccagcgcggggagtgaggaggggtcagggggctaaggatgcaacctctgacgttctgcgccttcctaggagagtcttacatgtgttgagatttcacaagcaatgcgagttgtaaaataccagctctacaagaagctaggctctgtgacggcatagttttcagtagctttatcacaatattcacaatggagaattatatgacatggtagcagaaataggcccttttatgtgttgcttctattttacctcaaattgtagatatagggtaatcaataaaatccatccatgcctttcacacactaagtca

SEQ ID NO: 118382 - DNA, 2874 bp, Artificial Sequence
  derived and/or modified sequence
atggcccaggtggccatgagcaccctgcctgtggaggatgaggagagcagcgagagcaggatggtggtgaccttcctgatgtctgccctggagagcatgtgcaaggagctggccaagagcaaggccgaggtggcctgcatcgctgtgtatgaaacagatgtgtttgtggtgggcacagagcggggccgggcctttgtgaacaccaggaaggacttccagaaggactttgtgaagtactgtgtggaggaggaggagaaggctgctgagatgcacaagatgaagagcaccacccaggccaacaggatgtctgtggatgctgtggagattgagaccctgaggaagacagtggaggactacttctgcttctgctacggcaaggccctgggcaagagcacagtggtgcctgtgccctatgagaagatgctgcgggaccagagcgctgtggtggtgcagggcctgcctgagggcgtggccttcaagcacccagaaaattatgacctggccaccctgaagtggatcctggagaacaaggccggcatctccttcatcatcaagaggcccttcctggagcccaagaagcacgtgggcggccgggtgatggtgacagatgctgacaggagcatcctgagccctgggggcagctgtggccccatcaaggtgaagacagagcccacagaggacagcggcatcagcctggagatggctgctgtgacagtgaaggaggagagcgaggaccctgactactaccagtacaacatccagggcagccaccacagcagcgagggcaatgaaggaacagagatggaggtgcctgcagaagatgatgactacagcccccccagcaagaggcccaaggccaatgagctgccccagccccctgtgcctgagcccgccaatgctgggaagaggaaggtgcgggagttcaactttgagaagtggaatgcccgcatcacagacctgaggaagcaggtggaggagctgtttgagaggaaatatgcccaggccatcaaggccaagggccctgtgaccatcccctaccccctcttccagagccacgtggaggacctgtatgtggagggcctgcctgagggcatccccttccggcggcccagcacctacggcatcccccggctggagcgcatcctgctggccaaggagcgcatccgcttcgtcatcaagaagcatgagctgctgaacagcacccgggaggacctgcagctggacaagccagccagcggcgtgaaggaggagtggtacgcccgcatcaccaagctgaggaagatggtggaccagctgttctgcaagaagtttgctgaggccctgggcagcacagaggccaaggctgtgccctaccagaagtttgaggcccaccccaatgacctgtatgtggagggcctgcctgagaacatccccttccgcagccccagctggtacggcatcccccggctggagaagatcatccaggtgggcaaccgcatcaagtttgtgatcaagaggcctgagctgctgacccacagcaccacagaggtgacccagcccaggaccaacacccctgtgaaggaggactggaatgtgcgcatcaccaagctgaggaagcaggtggaggagatcttcaacctgaagtttgcccaggccctgggcctgacagaagctgtgaaggtgccctaccctgtgtttgagagcaaccctgagttcctgtatgtggagggcctgcctgagggcatccccttccgcagccccacctggtttggcatcccccggctggagagaattgtgcggggcagcaacaagatcaagtttgtggtgaagaagccagagctggtgatctcctacctgcccccaggcatggccagcaagatcaacaccaaggccctgcagagccccaagaggcccaggagccctggcagcaacagcaaggtgcctgagattgaggtgacagtggagggccccaacaacaacaacccccagaccagcgctgtgaggacccccacccagaccaacggcagcaatgtgcccttcaagccccggggccgggagttctcctttgaggcctggaatgccaagatcacagacctgaagcagaaggtggagaacctcttcaatgaaaaatgtggggaggccctgggcctgaagcaggccgtgaaggtgccctttgccctgtttgagagcttccctgaggacttctacgtggagggcctgcctgagggcgtgcccttccggcggcccagcaccttcggcatcccccggctggagaagatcctgaggaacaaggccaagatcaagttcatcatcaagaagccagagatgtttgaaacagccatcaaggagagcaccagcagcaagagcccccccaggaagatcaacagcagccccaacgtgaacaccacagccagcggcgtggaggacctgaacatcatccaggtgaccatcccagatgatgacaatgaaaggctgagcaaggtggagaaggcccggcagctgcgggagcaggtgaatgacctcttcagcaggaagtttggagaggccatcggcatgggcttccctgtgaaggtgccctacaggaagatcaccatcaaccctggctgtgtggtggtggatggcatgcctcctggggtgtccttcaaggcccccagctacctggagatcagctccatgaggcgcatcctggacagcgctgagttcatcaagttcaccgtcatccggcccttccctggcctggtgatcaacaaccagctggtggaccagagcgagagcgagggccctgtgatccaggagagcgctgagcccagccagctggaggtgcctgccacagaggagatcaaggagacagatggcagcagccagatcaagcaggagccagaccccacctggtag

SEQ ID NO: 118383 - DNA, 2874 bp, Artificial Sequence
  derived and/or modified sequence
atggcccaggtggccatgagcaccctgcccgtggaggacgaggagagctccgagagccggatggtggtgacttttctgatgtccgccctcgaatccatgtgcaaagagctagcaaagagcaaggccgaggtggcctgtatagctgtgtatgaaaccgacgtgttcgttgtggggactgagcgcgggcgagcttttgtcaacacccgtaaagatttccagaaagatttcgttaaatactgtgtggaggaagaagaaaaggctgccgagatgcacaagatgaagagtacaactcaggccaatagaatgagcgtagatgccgtagagattgagaccctgcgcaaaaccgtagaggattacttttgtttttgctacggaaaggccctcggcaaatcaacagtcgtgcccgtgccatatgagaaaatgctgcgggatcagtcagccgtggtagtgcagggccttcccgagggcgtagcgtttaaacatcctgagaattacgaccttgctaccctgaagtggattctggagaataaagccggtatctccttcatcattaagcgtcccttcttggagcccaaaaaacacgttgggggaagggttatggtgacggacgccgaccggtctatactgagtccggggggcagttgcggacctataaaggtgaagactgagccaactgaagattccgggatctctctcgagatggcagcagtgacagtgaaagaggagtcagaagaccccgactattaccagtataacattcaagggtcacatcactcttctgagggtaacgagggaactgagatggaagtacctgccgaggacgatgactactccccaccttccaagcgccctaaagccaatgagctgccacagccccctgtccctgagccagctaacgcgggtaagagaaaagtacgagaatttaactttgaaaagtggaacgcacgtattacagacttgcgcaaacaagtggaagagttgtttgaaagaaagtatgcacaggccataaaagctaaaggccccgtgaccatcccctatcctctgttccaatctcatgttgaagacttgtacgtggaaggcctgcccgagggcatcccatttagacgtccatccacttatggcatccctcgactcgaacgtatcctgctcgctaaggaaagaatacgcttcgtcatcaaaaagcacgaactgctgaactcgacccgggaagatcttcagctggacaagcctgcgagtggcgtcaaagaagagtggtacgcgagaataaccaaactgcggaagatggtagaccaacttttttgtaagaagttcgctgaggctctcggaagcacagaggctaaggccgtgccctaccagaaattcgaggctcaccctaacgacctctatgttgagggcctccctgagaatattcccttcagatccccttcttggtacggcatcccaagattagagaaaataatacaggtgggcaatcgtattaagttcgtcatcaagcgcccggagctccttacccactcgacaacggaggtcacccagccacgtacgaatactcccgtgaaagaggattggaacgtcaggatcaccaagctccggaagcaggtggaggaaattttcaatctgaagtttgcccaggctctggggctaacagaggccgtcaaagtgccctaccccgtattcgaaagtaatcctgaattcctgtacgtggagggcctgcctgagggaatccccttcaggtcgccgacttggtttggcattccacgactcgaaaggattgtgagaggaagtaataaaattaaattcgtcgttaaaaagcccgaactcgtaatctcttacttgcccccaggtatggcctctaagatcaatacaaaagccctgcagagtccaaaaagacctcgatccccaggttctaacagtaaagtgcccgagatcgaggtcacggtagagggaccgaacaataataaccctcagacctccgcagtgaggacacctacccagaccaatggctctaatgtaccttttaagcccaggggacgtgagtttagtttcgaagcttggaatgcaaaaatcaccgatctaaaacagaaagttgagaacctgttcaatgaaaagtgtggtgaggcactgggcctgaagcaggccgtcaaggttccttttgcattgttcgagtcttttcccgaggatttctatgtagaaggcttgccagagggagtcccctttaggcgtccttcaacatttgggattccgaggctggaaaagatccttcgaaataaggcaaaaatcaaattcattattaagaagccagaaatgttcgagactgcaatcaaggaaagcacaagcagcaaatcacctccccgaaagatcaattccagtcccaacgtgaatactacagcatcgggggtagaggatctgaatatcattcaagtgacaattccagacgatgacaacgagcgccttagcaaggttgaaaaggcccgacagctgagagaacaggtgaatgatctgttctctcgcaaatttggtgaagccatcggtatggggttccctgtcaaagtaccatataggaagatcacaatcaaccctggatgcgtggtggtggacggaatgccccctggggtgtcatttaaggccccctcctacctcgagatttcctcaatgagacgcattctggacagtgctgagttcattaagttcaccgtgattcggccatttcccggtctagtgatcaacaatcaactggtggaccagtcagaatctgaagggcctgttatccaggaatccgccgaaccctctcagctcgaggtccccgcaaccgaggagatcaaagagactgacggatcatcccagatcaagcaggagcccgacccaacatggtag

SEQ ID NO: 118384 - DNA, 2874 bp, Artificial Sequence
  derived and/or modified sequence
atggcacaggtggccatgagcacattgccggttgaagacgaggaaagctctgagtcccgcatggtggttacgttcttaatgagcgccctcgaatctatgtgtaaggagttggccaagtctaaggcagaggtggcctgtatcgccgtttacgaaacagacgtgtttgtcgtcggaacagagcgcggacgagcattcgtcaacacccgcaaggactttcaaaaagacttcgtgaagtactgtgtggaagaagaagagaaagccgcagagatgcacaagatgaagagcaccacccaggctaatcggatgagcgtggatgctgtggaaatcgagacactgaggaaaacagtagaagactacttctgcttctgctatggcaaagcgctcggaaaatccacagtggttcccgtgccctacgaaaaaatgttgcgcgatcagagcgctgtcgtcgtacagggcctgcccgaaggcgtcgccttcaaacatcccgaaaactatgatttggccacactcaagtggattctcgagaacaaggccggaatcagttttatcataaaacgccctttcttggagccgaagaaacatgtgggtgggagggttatggtgacggacgcggataggtcaattttgtctccagggggttcttgcggtcccataaaggtgaagacagaacctacggaggattccggcatctctttagaaatggctgccgttaccgtgaaggaggagtcagaggaccctgattactatcagtacaatatccaggggtctcaccactcctccgaggggaacgagggcactgaaatggaagtgcccgctgaggatgacgactactccccaccttctaagcgacccaaggctaacgagttgccccagcccccagtgcccgagcccgcaaacgccggtaagcgaaaagttagggagtttaactttgagaagtggaacgcacgcatcacagacttgcgtaaacaggtcgaagagctctttgaacgcaagtacgcccaggccatcaaggctaaggggcctgtaacaatcccctacccattgtttcagagccatgtggaggacctctatgtggagggcttgccagagggcataccctttcgccgaccctccacgtatggcatcccgaggcttgagcgtattcttctagcaaaagagcggataagatttgtgatcaaaaaacacgaattgctgaatagcacaagagaggacttgcaactcgacaaacccgcaagcggcgtaaaagaagagtggtatgcccgtatcacaaaattaagaaagatggtggaccagcttttctgcaaaaagttcgctgaggctctcgggtccactgaggctaaagcagtgccctatcagaagttcgaggcccacccaaacgatctgtacgtggagggactcccagagaacatcccttttaggagtcccagttggtacggtattccaaggctggagaaaataattcaggtcgggaataggatcaaattcgtaataaaaaggcccgagttgctgacccactcaactaccgaggttacacagcctcggaccaacaccccggtgaaggaggactggaacgtccgtataaccaaattaaggaagcaggtggaggaaatttttaacttaaagttcgctcaggccctgggcctgaccgaagccgtaaaggtcccctaccctgtgttcgaatctaatcccgagttcttgtacgtggagggactaccagagggcataccgtttcgatcacctacctggttcggcatccccaggcttgagcgcatcgtcagaggcagcaacaaaatcaaatttgtagtgaagaagcccgaattggtgatatcatatctgccccctgggatggcatcaaaaattaacaccaaggccctgcaaagcccgaaaagacctagatcacccggttccaactcgaaggtgccagagatcgaagtcaccgtggaaggtcccaacaacaataacccccagacaagcgccgtccgtacccccacccagacaaacggttctaatgtcccgttcaagccgagaggccgagaatttagctttgaggcctggaacgcaaaaattacagatctcaagcagaaagtcgaaaatttgtttaatgagaaatgcggcgaagcgttgggtctgaagcaagccgtgaaagtgcccttcgccctcttcgaaagtttccctgaggatttttatgtagagggtttgcccgagggcgttccttttaggcgaccctccacttttgggatacccaggctggaaaagattttaaggaataaggcaaaaatcaaatttataattaagaaacccgagatgtttgagaccgcaataaaggaatcaacctccagtaagagcccccctagaaaaattaactcttcaccgaatgtgaataccactgcatccggtgtggaagacctgaatatcatccaggttactattcccgacgatgataacgaacggctcagcaaggtcgagaaagcccgacagcttcgggagcaggtcaacgacctgttttctcggaaatttggggaagccatcggcatgggattccccgtcaaggtgccttatcgaaaaataaccattaatccgggatgtgtcgtggttgacggcatgccaccaggcgtatccttcaaggctccctcctatctcgagatctctagtatgagacggatactcgactctgccgaatttattaaatttacggtaatcaggccttttcccggattagtgataaacaaccagttagtggaccagtctgagtctgagggaccggtcatacaggaatcagccgagccttcacaactcgaggtaccagcgaccgaggagatcaaggaaacagacggttcctctcagattaagcaggagcccgaccccacttggtag

SEQ ID NO: 118385 - DNA, 2874 bp, Artificial Sequence
  derived and/or modified sequence
atggcccaggtggccatgagcaccctgcccgtggaggacgaggagagcagcgagagcagaatggtggtgaccttcctgatgagcgccctggagagcatgtgcaaggagctggccaagagcaaggccgaggtggcctgcatcgccgtgtacgagaccgacgtgttcgtggtgggcaccgagagaggcagagccttcgtgaacaccagaaaggacttccagaaggacttcgtgaagtactgcgtggaggaggaggagaaggccgccgagatgcacaagatgaagagcaccacccaggccaacagaatgagcgtggacgccgtggagatcgagaccctgagaaagaccgtggaggactacttctgcttctgctacggcaaggccctgggcaagagcaccgtggtgcccgtgccctacgagaagatgctgagagaccagagcgccgtggtggtgcagggcctgcccgagggcgtggccttcaagcaccccgagaactacgacctggccaccctgaagtggatcctggagaacaaggccggcatcagcttcatcatcaagagacccttcctggagcccaagaagcacgtgggcggcagagtgatggtgaccgacgccgacagaagcatcctgagccccggcggcagctgcggccccatcaaggtgaagaccgagcccaccgaggacagcggcatcagcctggagatggccgccgtgaccgtgaaggaggagagcgaggaccccgactactaccagtacaacatccagggcagccaccacagcagcgagggcaacgagggcaccgagatggaggtgcccgccgaggacgacgactacagcccccccagcaagagacccaaggccaacgagctgccccagccccccgtgcccgagcccgccaacgccggcaagagaaaggtgagagagttcaacttcgagaagtggaacgccagaatcaccgacctgagaaagcaggtggaggagctgttcgagagaaagtacgcccaggccatcaaggccaagggccccgtgaccatcccctaccccctgttccagagccacgtggaggacctgtacgtggagggcctgcccgagggcatccccttcagaagacccagcacctacggcatccccagactggagagaatcctgctggccaaggagagaatcagattcgtgatcaagaagcacgagctgctgaacagcaccagagaggacctgcagctggacaagcccgccagcggcgtgaaggaggagtggtacgccagaatcaccaagctgagaaagatggtggaccagctgttctgcaagaagttcgccgaggccctgggcagcaccgaggccaaggccgtgccctaccagaagttcgaggcccaccccaacgacctgtacgtggagggcctgcccgagaacatccccttcagaagccccagctggtacggcatccccagactggagaagatcatccaggtgggcaacagaatcaagttcgtgatcaagagacccgagctgctgacccacagcaccaccgaggtgacccagcccagaaccaacacccccgtgaaggaggactggaacgtgagaatcaccaagctgagaaagcaggtggaggagatcttcaacctgaagttcgcccaggccctgggcctgaccgaggccgtgaaggtgccctaccccgtgttcgagagcaaccccgagttcctgtacgtggagggcctgcccgagggcatccccttcagaagccccacctggttcggcatccccagactggagagaatcgtgagaggcagcaacaagatcaagttcgtggtgaagaagcccgagctggtgatcagctacctgccccccggcatggccagcaagatcaacaccaaggccctgcagagccccaagagacccagaagccccggcagcaacagcaaggtgcccgagatcgaggtgaccgtggagggccccaacaacaacaacccccagaccagcgccgtgagaacccccacccagaccaacggcagcaacgtgcccttcaagcccagaggcagagagttcagcttcgaggcctggaacgccaagatcaccgacctgaagcagaaggtggagaacctgttcaacgagaagtgcggcgaggccctgggcctgaagcaggccgtgaaggtgcccttcgccctgttcgagagcttccccgaggacttctacgtggagggcctgcccgagggcgtgcccttcagaagacccagcaccttcggcatccccagactggagaagatcctgagaaacaaggccaagatcaagttcatcatcaagaagcccgagatgttcgagaccgccatcaaggagagcaccagcagcaagagcccccccagaaagatcaacagcagccccaacgtgaacaccaccgccagcggcgtggaggacctgaacatcatccaggtgaccatccccgacgacgacaacgagagactgagcaaggtggagaaggccagacagctgagagagcaggtgaacgacctgttcagcagaaagttcggcgaggccatcggcatgggcttccccgtgaaggtgccctacagaaagatcaccatcaaccccggctgcgtggtggtggacggcatgccccccggcgtgagcttcaaggcccccagctacctggagatcagcagcatgagaagaatcctggacagcgccgagttcatcaagttcaccgtgatcagacccttccccggcctggtgatcaacaaccagctggtggaccagagcgagagcgagggccccgtgatccaggagagcgccgagcccagccagctggaggtgcccgccaccgaggagatcaaggagaccgacggcagcagccagatcaagcaggagcccgaccccacctggtag

SEQ ID NO: 118386 - protein, 473 aa, Artificial Sequence
  derived and/or modified sequence
MTALRLLQRMKRDWMHTGRRPSGLCGAALLVAARMHDFRRTVKEVISVVKVCESTLRKRLTEFEDTPTSQLTIDEFMKIDLEEECDPPSYTAGQRKLRMKQLEQVLSKKLEEVEGEISSYQDAIEIELENSRPKAKGGLASLAKDGSTEDTASSLCGEEDTEDEELEAAASHLNKDLYRELLGGAPGSSEAAGSPEWGGRPPALGSLLDPLPTAASLGISDSIRECISSQSSDPKDASGDGELDLSGIDDLEIDRYILNESEARVKAELWMRENAEYLREQREKEARIAKEKELGIYKEHKPKKSCKRREPIQASTAREAIEKMLEQKKISSKINYSVLRGLSSAGGGSPHREDAQPEHSASARKLSRRRTPASRSGADPVTSVGKRLRPLVSTQPAKKVATGEALLPSSPTLGAEPARPQAVLVESGPVSYHADEEADEEEPDEEDGEPCVSALQMMGSNDYGCDGDEDDGY

SEQ ID NO: 118387 - protein, 677 aa, Artificial Sequence
  derived and/or modified sequence
MTGRVCRGCGGTDIELDAARGDAVCTACGSVLEDNIIVSEVQFVESSGGGSSAVGQFVSLDGAGKTPTLGGGFHVNLGKESRAQTLQNGRRHIHHLGNQLQLNQHCLDTAFNFFKMAVSRHLTRGRKMAHVIAACLYLVCRTEGTPHMLLDLSDLLQVNVYVLGKTFLLLARELCINAPAIDPCLYIPRFAHLLEFGEKNHEVSMTALRLLQRMKRDWMHTGRRPSGLCGAALLVAARMHDFRRTVKEVISVVKVCESTLRKRLTEFEDTPTSQLTIDEFMKIDLEEECDPPSYTAGQRKLRMKQLEQVLSKKLEEVEGEISSYQDAIEIELENSRPKAKGGLASLAKDGSTEDTASSLCGEEDTEDEELEAAASHLNKDLYRELLGGAPGSSEAAGSPEWGGRPPALGSLLDPLPTAASLGISDSIRECISSQSSDPKDASGDGELDLSGIDDLEIDRYILNESEARVKAELWMRENAEYLREQREKEARIAKEKELGIYKEHKPKKSCKRREPIQASTAREAIEKMLEQKKISSKINYSVLRGLSSAGGGSPHREDAQPEHSASARKLSRRRTPASRSGADPVTSVGKRLRPLVSTQPAKKVATGEALLPSSPTLGAEPARPQAVLVESGPVSYHADEEADEEEPDEEDGEPCVSALQMMGSNDYGCDGDEDDGY

SEQ ID NO: 118388 - DNA, 3660 bp, Artificial Sequence
  derived and/or modified sequence
cggctgcgctcaccggtaggccccgctcgggttccgccgaagcccagcccccgcaggtcgcccctccgacgccggcgcgccgcaagggaggccagctcgctcgcagtggggaggtcgcggctccagtcctcgcgtccccgccgtggtcccggtgcctgtcccatcccgcgggcgcggccgttgcgggcggcgcggcccgggcgcgcgcggcgaatctgcggctgcgaatcggctggagcggggcctcgcgagagcggcgaggcctgggcggctgggcctgggcgggcggcgcgggctgctccggaggctcgggtggcttgagagtcttgggaggctccgggcgctgcccgcgcggtcgccggcatgacgggccgcgtgtgccgcggttgcggcggcacggacatcgagctggacgcggcgcgcggggacgcggtgtgcaccgcctgcggctcagtgctggaggacaacatcatcgtgtccgaggtgcagttcgtggagagcagcggcggcggctcctcggccgtgggccagttcgtgtccctggacggtgctggcaaaaccccgactctgggtggcggcttccacgtgaatctggggaaggagtcgagagcgcagaccctgcagaatgggaggcgccacatccaccacctggggaaccagctgcagctgaaccagcactgcctggacaccgccttcaacttcttcaagatggccgtgagcaggcacctgacccgcggccggaagatggcccacgtgattgctgcctgcctctacctggtctgccgtacggagggcacgccgcacatgctcctggacctcagcgacctgctccaggtgaatgtgtacgtgcttggaaagacgtttcttctcttggcaagagagctctgcatcaatgcgccggccatagacccgtgcctgtatattccacgctttgcgcacctgctggaattcggggagaagaaccacgaggtgtccatgactgccctgaggctcctacagaggatgaagcgggactggatgcacacaggccggcgcccctcgggcctctgcggagcagcgctcctggttgcagccagaatgcatgacttcaggaggactgtgaaggaggtcatcagtgtggtcaaagtgtgtgagtccacgctgcggaagaggctcacggaatttgaagacacccccaccagtcagttgaccattgatgagttcatgaagatcgacctggaggaggagtgcgaccccccctcgtacacagctgggcagaggaagctgcggatgaagcagcttgaacaagtcctgtcaaaaaaactggaggaggttgaaggtgaaatatccagttaccaggatgcaattgagattgaactagaaaacagccggccaaaggccaaggggggcctggccagcctggcaaaagatggctccaccgaggacaccgcgtccagcttgtgtggcgaggaggacacagaggacgaggagctggaagccgcggccagccacctgaacaaagacttataccgggagctccttggtggtgcccccggcagctcggaagcagcaggaagccccgagtggggcggcagacctccggccctggggtccctgctggaccccctccccactgcagccagcctgggcatctcagactccatccgcgaatgcatctcctctcagagcagcgaccccaaagatgcttcaggagacggtgagctggacctcagtggcattgatgacctggagattgacaggtacatcctgaatgagtcggaagcccgcgtgaaggccgagctgtggatgagggagaacgccgagtacctgcgggaacagagggaaaaagaagcaagaatagcgaaagagaaggagctcggcatctacaaggaacacaagcccaagaagtcttgcaagcgacgggagccaattcaggccagtaccgccagggaggccatcgagaagatgctggagcagaagaagatctccagcaagatcaattatagcgtgctccggggcctcagcagcgccggcgggggcagtccgcacagggaggatgcacagcccgagcatagcgccagtgccaggaagctgtcacgaaggaggacgccggccagcagaagtggggctgaccctgtgaccagtgtggggaaaaggttgaggcctctggtgtctacgcagccagcaaagaaggtggccacgggagaggctttgctcccaagctctcccaccctcggagctgagcctgccaggccccaggcggtgctggtggagagcgggcccgtgtcataccacgccgacgaggaggctgacgaggaggagcctgacgaggaggacggggagccctgcgtcagtgccctgcagatgatgggcagcaacgactatggctgtgatggcgatgaggacgacggctactgaagtgtggcctccaggcaggtgatgtcctggcagggggcctcgcgggtctcctcagcatcagacgggcttccaggaccgcagcaggcaggccccagcgccgagactcctggtgacaggtggcacctgtcccacagccctcgtcccatgtggaacttaccattgggattgtgtttctattcagcaagggaaaccggaccaagcgtctgcatgtgtgtgatcagatgtgggccgggtgtgtgcagggctgggtcccgctgcctgccgtcgactcatccaaggaccctccaaggctggcagtgtggtgttgctactattaaggaaacaggcttggggcagccccactgctggtccaagtgtgtggagggctgagtgtgctggccctgtgactcaggaccagctctggagtctccagcccaccctccgcaccgtcccctcctgagcagcactcggcgccagcagcctctgccagagtggaagccagagccctgcaggtgtccggcgcagccgtgggagctgaggatctggcacttgagaggcagcagctccttgaaggtcctctgcctccagctgtggccctgcatccagatacctgcctcgtccgaggcagacacccccacccctgcctcctccagacccccctccccgctgcctgcaccgcctggagcagcatgggggtcagacccctgctccagggccacttgagttgtgggcccaggagccctgcggctgccggcaggtgaactgagtgcccgacagctgagaccggcgcccacccgtcctgagcatagctctgtaggcagtgcgggcatagcctgcatagtgtcctggcgctgggagttccccgtggacagagccagagggcagtggcgctccctgtcagagctggatcaggccccccatcgaggagggagggcagacggaggcccgagagcctccccaggcctcttcgtgggaaggccccagtaccactcgtaggaggtctcagctctggcatggctgccccggatgtggccgagggggcttcaccctgtgtccttaggagggggtggccttgaggcagagccgtgcctcactgacccccaggggcctcatcctccccatggaatgggctgtatgtcctgccccaacttggcccgcagcaggccagacccccctacccccgcccagagctcagtagccagcctgggtcctgccagggcttctcgagggcttgggggaagaatagatttagtaaagcaggaagatctgttgttacttaacaga

SEQ ID NO: 118389 - DNA, 1689 bp, Artificial Sequence
  derived and/or modified sequence
atggcagtaagccggcatcttacaaggggccgcaagatggctcacgttatcgctgcctgtctatacttggtgtgtagaaccgaggggactccacacatgctgctagacctttctgacctgcttcaggtgaatgtctacgtcctcggcaagaccttcctgcttctcgcaagggagttgtgcattaacgcccctgccatagatccctgcctgtatatccctcgcttcgcccacttgttagagttcggggagaagaatcacgaagtgagcatgaccgccctgagactgctgcagcggatgaagcgagattggatgcacaccggacgaagaccttcaggcctgtgcggcgccgcactcctggtggcagcccgcatgcatgactttagaaggaccgtgaaagaggtcatctctgtggtcaaggtgtgtgaatcaacactgagaaagagactgaccgagttcgaggatacacccactagtcagctgacgatcgacgagtttatgaaaattgacctggaggaagaatgtgaccccccatcctacactgcgggtcagcgcaagttacgaatgaagcaattggaacaagtgctctcaaaaaagttggaagaagttgagggcgagatctcttcatatcaagatgcaatcgagattgaattggaaaattcgcggccaaaggccaaaggcgggctggcatctctagctaaggacggctcaactgaggatactgcatcttctctttgcggagaagaggatacagaggatgaggaactcgaggccgcagcttcacacctgaacaaggacctgtacagagagctgttagggggcgccccgggaagcagcgaggccgcgggctcaccggagtggggaggtcgtccccctgccctcggctctctgctggacccactgcccaccgctgcatccctggggatctctgactcaattcgtgagtgtatctcatcccagagctcagaccctaaagatgctagtggcgacggtgaactggatctgagtggcattgatgatctggagatagaccgatacattctgaacgaaagcgaagcccgcgtcaaggccgagctttggatgcgagaaaacgccgaatatttgcgggaacagagggagaaagaggccaggatagcaaaagagaaggagttgggaatctacaaagaacacaaacccaagaagtcctgcaaacgccgcgagccaatacaggcaagcacagccagggaggcaattgaaaagatgctggagcagaaaaaaatttctagcaaaattaactattctgtgctgcgggggctgtcctctgcaggcggcggatccccacaccgggaagatgctcagcctgagcattccgcaagtgccaggaaactctcccggagaaggacacccgcatctcggtccggagccgatccagttaccagtgtggggaagcgcctcaggccattagtttccacacagcctgccaagaaggtcgctactggggaggccctgctgccatcatctcccacacttggcgccgaacccgcacgccctcaggccgtcctggtagaaagtgggcctgtctcttatcatgctgacgaagaggccgatgaagaggaaccagatgaggaagacggagagccctgcgtctctgccctacagatgatgggctccaatgattacgggtgtgatggagacgaggacgacggctactag

SEQ ID NO: 118390 - DNA, 2034 bp, Artificial Sequence
  derived and/or modified sequence
atgaccggacgggtctgccgaggctgcggaggcacagatatagaactggatgctgcacggggtgatgctgtgtgcaccgcttgcgggtctgtgcttgaggacaacatcattgttagcgaagtccagtttgtggaatcttcggggggtggatcgtctgccgtagggcagttcgttagcctcgacggcgcggggaaaacccctaccttagggggcgggtttcatgtgaacctggggaaagagagtcgcgctcaaacactccagaacggccgcagacacatccaccatctggggaaccagctgcagttgaaccagcactgcctggacacggcattcaattttttcaaaatggctgtgagtcggcacctgacccgcgggaggaagatggcccacgtgattgctgcatgtctgtatctcgtgtgcaggaccgagggcaccccccatatgctgctcgacttatcagacctgcttcaagtcaatgtgtatgttctgggcaaaacgttcctcctccttgcccgcgagctgtgtatcaacgcccccgcgatcgatccctgcctgtacattccccggttcgcacacctactggagttcggcgaaaagaaccatgaagtttctatgaccgccctgagactgctgcaacggatgaagagggattggatgcatacagggcgccggccgtccggactgtgtggcgccgcccttctggtggcagctcgtatgcacgactttagacgcaccgttaaagaggtcatcagtgtggtgaaggtgtgcgaatctaccctccgcaagcgtctgactgaattcgaagacactccaaccagtcagctaaccatcgacgagtttatgaagatcgacctggaggaagagtgcgatcccccgagttatacggccggacagcgcaagctgaggatgaagcagcttgagcaggttctgagtaagaagctggaggaagtggagggggagatttcatcctatcaggatgcaattgaaattgagcttgagaatagcagacccaaagctaagggtggactggcaagccttgcaaaggatgggtcaactgaggataccgccagcagcctgtgcggagaagaggataccgaggacgaggaactggaagcagctgcatcccacctgaacaaggatttgtaccgggagttattgggaggcgcccccggtagttcagaggccgctggctcccccgagtggggcgggcggccacccgccctgggctccctgctggacccattgcccacagcagcctccctcggtatctcagacagcatccgggagtgtatatcctcgcagagctcagatcccaaagacgcctcaggggacggagaactggacctgtcaggcattgacgacctggagatcgatcggtatatcttgaacgaatccgaagcgcgagtgaaagcagagctgtggatgcgagagaacgccgagtatcttcgagaacagagggagaaggaagcacggatagctaaagagaaagaactgggaatatataaggagcataaacctaagaaatcctgcaaaagaagagagccgattcaagctagcaccgctcgggaagcaatagagaagatgctggaacagaagaagattagcagtaagataaattattcagtgctcagaggactttccagcgcaggagggggctctccccaccgtgaggatgctcagccagaacatagtgctagtgcacggaagctcagtagaagacgaacccccgccagcaggtctggtgctgatcctgtgactagcgtggggaagagacttcgcccactggtgtctacacaacctgccaaaaaggtggctactggcgaagcgctgctgcccagcagtcctacattgggagccgagccagctcgcccccaggctgtactcgtagaatccggaccagtgagctatcatgctgatgaggaagccgatgaggaagagcccgatgaggaagatggcgagccctgtgtgtccgcccttcaaatgatggggtctaacgactatgggtgcgacggtgacgaagatgacggttactag

SEQ ID NO: 118391 - DNA, 45 bp, Artificial Sequence
  derived and/or modified sequence
atgaccgccctgaggctgctgcagcgcatgaagagggattggtag

SEQ ID NO: 118392 - DNA, 1689 bp, Artificial Sequence
  derived and/or modified sequence
atggctgtgagccgccacctgacccggggcaggaagatggcccacgtgattgctgcctgcctgtacctggtgtgcaggacagagggcaccccccacatgctgctggacctgagtgacctgctgcaggtgaatgtgtatgtgctgggcaagaccttcctgctgctggcccgggagctgtgcatcaatgccccagccatcgacccctgcctgtacatccccaggtttgcccacctgctggagtttggagagaagaaccacgaggtgtccatgacagccctgcggctgctgcagaggatgaagagggactggatgcacacaggccggcggcccagcggcctgtgtggggccgccctgctggtggccgccaggatgcatgacttccggaggacagtgaaggaggtgatctctgtggtgaaggtgtgtgagagcaccctgaggaagaggctgacagaatttgaggacacccccaccagccagctgaccattgatgagttcatgaagattgacctggaggaggagtgtgacccccccagctacacagctggccagaggaagctgaggatgaagcagctggagcaggtgctgagcaagaagctggaggaggtggagggggagatcagcagctaccaggatgccattgaaattgagctggagaacagccggcccaaggccaagggcggcctggccagcctggccaaggatggcagcacagaggacacagccagcagcctgtgtggggaggaggacacagaagatgaggagctggaggccgccgccagccacctgaacaaggacctgtaccgggagctgctgggcggggcccctggcagcagcgaggccgccggcagccctgagtggggcggccggcccccagccctgggcagcctgctggaccccctgcccacagctgccagcctgggcatcagtgacagcatccgggagtgcatcagcagccagagcagtgaccccaaggatgccagcggagatggagagctggacctgtctggaattgatgacctggagattgaccgctacatcctgaatgaaagtgaggcccgggtgaaggccgagctgtggatgagagaaaatgctgagtacctgcgggagcagcgggagaaggaggccagaattgccaaggagaaggagctgggcatctacaaggagcacaagcccaagaagagctgcaagagaagagagcccatccaggccagcacagcccgggaggccatcgagaagatgctggagcagaagaagatcagcagcaagatcaactacagcgtgctgcggggcctgagcagcgctgggggcggcagcccccaccgggaggatgcccagcctgagcacagcgccagcgccaggaagctgagcagaagaaggaccccagccagccgctctggagctgaccctgtgacctctgtgggcaagaggctgcggcccctggtgtccacccagcctgccaagaaggtggccactggagaggccctgctgcccagcagccccaccctgggcgctgagcccgcccggccccaggccgtgctggtggagagcggccctgtgtcctaccacgcagatgaggaggctgatgaggaggagccagatgaagaagatggagagccctgtgtgtctgccctgcagatgatgggcagcaatgactatggctgtgatggagatgaagatgatggctactag

SEQ ID NO: 118393 - DNA, 2034 bp, Artificial Sequence
  derived and/or modified sequence
atgacaggccgggtgtgccggggctgcggcggcacagacatcgagctggatgctgcccggggagatgctgtgtgcacagcctgtggctctgtgctggaggacaacatcatcgtgtctgaggtgcagtttgtggagagcagcggcggcggcagcagcgctgtgggccagtttgtgtccctggatggagctgggaagacccccaccctgggcggcggcttccacgtgaacctgggcaaggagagccgggcccagaccctgcagaatggccgccgccacatccaccacctgggcaaccagctgcagctgaaccagcactgcctggacacagccttcaacttcttcaagatggctgtgagccgccacctgacccggggcaggaagatggcccacgtgattgctgcctgcctgtacctggtgtgcaggacagagggcaccccccacatgctgctggacctgagtgacctgctgcaggtgaatgtgtatgtgctgggcaagaccttcctgctgctggcccgggagctgtgcatcaatgccccagccatcgacccctgcctgtacatccccaggtttgcccacctgctggagtttggagagaagaaccacgaggtgtccatgacagccctgcggctgctgcagaggatgaagagggactggatgcacactggaagaagacccagcggcctgtgtggggccgccctgctggtggccgccaggatgcatgacttcagaagaacagtgaaggaggtgatctctgtggtgaaggtgtgtgagagcaccctgaggaagaggctgacagaatttgaggacacccccaccagccagctgaccattgatgagttcatgaagattgacctggaggaggagtgtgaccccccatcctacacagctggccagaggaagctgaggatgaagcagctggagcaggtgctgagcaagaagctggaggaggtggagggggagatcagcagctaccaggatgccatcgagattgagctggagaacagccggcccaaggccaagggcggcctggccagcctggccaaggatggcagcacagaggacacagccagcagcctgtgtggggaggaggacacagaagatgaggagctggaggccgccgccagccacctgaacaaggacctgtaccgggagctgctgggcggggcccctggcagcagcgaggccgccggcagccctgagtggggcggccggcccccagccctgggcagcctgctggaccccctgcccacagctgccagcctgggcatcagtgacagcatccgggagtgcatcagcagccagagcagtgaccccaaggatgccagcggagatggagagctggacctgagcggcattgatgacctggagattgaccgctacatcctgaatgaaagtgaggcccgggtgaaggccgagctgtggatgagagaaaatgctgagtacctgcgggagcagcgggagaaggaggcccgcatcgccaaggagaaggagctgggcatctacaaggagcacaagcccaagaagagctgcaagaggcgggagcccatccaggccagcacagcccgggaggccatcgagaagatgctggagcagaagaagatcagcagcaagatcaactacagcgtgctgcggggcctgagcagcgctgggggcggcagcccccacagagaagatgcccagcctgagcacagcgccagcgccaggaagctgagcagaagaaggaccccagccagccgcagcggggctgaccctgtgacctctgtgggcaagaggctgcggcccctggtgtccacccagcctgccaagaaggtggccaccggggaggccctgctgcccagcagccccaccctgggcgctgagcccgcccggccccaggccgtgctggtggagagcggccctgtgtcctaccacgcagatgaggaggctgatgaggaggagccagatgaggaggatggagagccctgtgtgtctgccctgcagatgatgggcagcaatgactatggctgtgatggagatgaagatgatggctactag

SEQ ID NO: 118394 - DNA, 45 bp, Artificial Sequence
  derived and/or modified sequence
atgacagccctgcggctgctgcagaggatgaagagggactggtag

SEQ ID NO: 118395 - DNA, 1689 bp, Artificial Sequence
  derived and/or modified sequence
atggccgtgagccggcacctgacccggggccggaagatggcccacgttatagccgcgtgtctgtacctggtttgtaggaccgaaggcactccacacatgctgctggatttgtctgacctgctgcaagtgaatgtgtacgtgctcggaaagacctttctgcttctggcgagggagttgtgcattaatgccccagctattgacccatgtctgtatattcctcgtttcgcacacttgcttgaattcggagaaaaaaaccacgaggtttctatgacagccctcaggctattacagagaatgaagcgcgattggatgcacactgggaggcggccttccggcctctgtggcgcagcgttgctggtcgccgcccggatgcacgacttccgcagaaccgtcaaggaggtgatcagtgttgtcaaggtttgtgagtcgacactgcgcaagcggttgaccgagttcgaagatacccctactagtcaattgacaatcgacgagttcatgaagatcgatcttgaagaggaatgcgatcctccctcctataccgccggtcagcgtaagttaagaatgaaacagttagagcaggtgctttccaaaaaactagaggaagtggagggggagatctcctcctatcaggatgctatcgaaatcgagctcgaaaatagccgccctaaggctaaaggcggcctcgcctccctagcaaaagatggaagcactgaagacacagctagttccttatgcggcgaggaggacacagaggacgaagaattagaggccgccgcttctcatctaaataaggacctgtatcgcgagctgcttggaggcgcccctggaagcagcgaggcagctggtagccctgaatggggcgggcgccctccagctttgggcagcttgttagacccactgccaacggctgcgtcattgggcattagtgactccatccgcgaatgcatctcctcacaaagtagtgatcccaaagatgcttcaggtgacggcgagctggatctctccggtattgatgatctggagatcgaccgctatattctgaacgaatccgaggctagggtgaaagccgagctctggatgcgagaaaacgctgaatatctgagagagcagcgcgagaaagaagcgcgtatagctaaagagaaagagctggggatctataaagaacacaagccaaaaaaatcctgtaaaagacgggagcccatccaagccagcactgcacgcgaggcaatcgagaagatgttggaacagaagaagattagctcaaagataaattattccgtcctccggggactttcatcggctgggggtggctcccctcatcgcgaagacgcacagccggagcactctgcttccgccaggaagcttagtagaagaaggaccccagcttcgagatctggggctgatccggtcacttctgtgggtaaacgattgagaccactagtgtcgacccagcccgccaagaaagtggcgaccggcgaggccttacttccgagctcgcccactctcggagccgaaccagctcggccacaggccgttctcgttgagtccgggcctgtctcttatcacgctgatgaagaagccgacgaggaagaacccgacgaggaagatggggaaccatgcgtgtcagccctgcagatgatgggctctaacgattacggctgtgacggcgacgaggacgatggctactag

SEQ ID NO: 118396 - DNA, 2034 bp, Artificial Sequence
  derived and/or modified sequence
atgaccggccgggtgtgccggggctgcggcggcaccgacatcgagctggacgctgctagaggggatgccgtgtgcaccgcatgtggtagcgtgttggaggacaatatcatcgtgtcagaagttcaattcgtcgagagctctggagggggaagttctgccgtcggacagtttgtttcccttgatggcgctggaaaaacccccacactgggcggcggctttcatgttaatctgggcaaagaatcacgggctcagacgctgcaaaacgggaggcgtcatatacaccacctgggcaaccagctccaactcaaccagcactgcctggacaccgcctttaacttcttcaagatggcagttagcaggcatctcacacggggccggaagatggctcacgtaatcgctgcatgtctgtacctggtttgccgtacagaaggcacccctcatatgctcctcgacctgtcagacttgttacaggtgaatgtgtatgtgttgggaaaaaccttcctcctgttggccagagaactctgcataaatgctccagccatcgacccctgcttatacatcccccggttcgcccacctgctagagtttggggagaagaatcacgaggtttcgatgactgccttaaggttactgcagcggatgaagagggattggatgcatacaggcagacgcccatccggcctgtgtggcgccgctctgctggtggcggcaagaatgcatgatttcaggcgcaccgtgaaggaagtcatctctgtggttaaagtgtgcgaaagtacactacgcaaacgcctaacggagttcgaggacaccccaaccagccagttgaccatcgatgagtttatgaagattgaccttgaggaggaatgcgaccctccttcatacactgccgggcaacgcaagcttcgcatgaaacaactcgaacaggtgctctcaaagaagctggaggaggttgaaggtgaaatttcaagttaccaggacgccatcgaaattgaactcgaaaattcaaggccaaaggctaaagggggactggcgtccctcgccaaggatgggtcaaccgaagacactgcctcttccctttgcggcgaagaggataccgaggatgaagagcttgaagctgcagcatcccatctcaacaaagatctgtatagggaactgctgggcggcgcccccggaagctctgaggccgcaggcagtccggaatggggcggccgcccacccgcactcggatcactcttagacccactgccaacggccgcttctctggggatatcagattcaattagggagtgcatctcatcccagagctcagaccctaaggacgcttctggcgatggggagcttgatcttagtggcatcgacgatctcgagatcgaccggtacatcttaaatgaatctgaagcccgggtaaaggcggaactttggatgagggaaaatgcagagtatttaagggagcagagggagaaagaagctcgcattgctaaggagaaagaactgggcatctataaagagcataagcctaaaaagagctgcaaacgcagggagcccatccaagcatcaactgcacgcgaggccatagaaaagatgctggaacagaagaagattagctccaagatcaactactccgtgttgagaggtctgtcatccgctggcggaggatcaccccatagagaggacgcgcagccggaacacagcgcttccgctaggaagttgtcaaggaggagaacccccgccagtaggtctggcgccgaccccgttaccagtgtgggtaaacgacttaggcctctggtgagcactcagccagcgaagaaagtggcgactggtgaggctctattgccatctagcccgaccctgggcgctgagccagccaggccacaagccgtccttgttgaatcagggccagtctcatatcatgccgatgaagaagcagatgaggaagagcctgacgaggaggacggggaaccctgtgttagtgctcttcagatgatgggaagcaatgactatggctgtgatggggatgaagacgatggttattag

SEQ ID NO: 118397 - DNA, 45 bp, Artificial Sequence
  derived and/or modified sequence
atgaccgccctgcggctgctgcagcggatgaagcgggactggtag

SEQ ID NO: 118398 - DNA, 1689 bp, Artificial Sequence
  derived and/or modified sequence
atggccgtttctcggcacctaaccaggggcaggaaaatggcacatgtgatcgccgcttgcttgtacctggtgtgcaggactgaggggactccccatatgctcttagatctgagtgacttactacaggtgaacgtttatgtgttaggcaagacattcctactattggcccgtgaactgtgtattaatgcgcctgctattgatccctgtctatatattcctaggttcgcacaccttctggaatttggcgagaagaaccatgaggtctccatgacggccctccggctgttgcagaggatgaagcgtgactggatgcacaccgggagacgcccttccggcctgtgtggggctgctctgctcgtggctgcacgtatgcacgattttcgcaggacggtaaaagaagtgatcagcgtcgtgaaggtgtgtgagagtacgcttagaaaacggctcacagaatttgaagacactccgactagccagctgacaatcgacgaatttatgaaaattgatttggaggaagagtgcgatcccccatcttacacagctggccagagaaaactgcgcatgaagcagttagaacaggtactgtctaagaaactggaggaggtggaaggtgaaatctcctcctaccaagacgccattgaaatcgaattagagaattctcggccaaaagccaagggcggactggccagtctggctaaggatggctctacagaagacaccgcttccagcctgtgtggagaagaagacaccgaagatgaagaactggaggcggcagcatcccacctgaacaaagatttgtatagggagctgcttggcggtgctcccggttcttcagaggctgccggaagccccgagtggggcggacggccacctgcactggggagcctcctggacccactacccactgccgcatccttagggatttctgattccatcagggaatgtatttcaagccagagctctgatccaaaggatgcctccggcgacggtgagctggacctgagcggaattgacgacctcgagatcgaccgctacattctgaacgagagcgaagctcgagtgaaggctgaactatggatgagagagaacgccgaatacctgagagaacagcgggagaaagaggctcgaattgccaaggagaaggaattagggatctataaagaacacaaaccaaagaaaagctgcaaacggagagagcccatccaggcctcgacggcaagagaagccatcgagaagatgctcgaacaaaaaaagatttcttccaagatcaattattccgtactgcggggattgtcaagcgccggtgggggaagcccgcaccgagaggatgcacagcctgagcactcagctagcgcaaggaagttatctcgcaggcggactcccgcaagcaggtccggtgctgaccccgtaacgtccgtcggaaaacggctccggcctctggtctccactcagccggctaaaaaagtagctacgggggaggctctgctgccttcctcccctaccttaggagcggagcccgctcggcctcaggccgttctcgtagaatctggtccagtgtcgtaccatgccgatgaggaggctgatgaagaggaaccagatgaggaggatggtgagccctgtgtcagcgctctgcagatgatggggagcaacgactatggctgtgacggcgacgaagacgatgggtactag

SEQ ID NO: 118399 - DNA, 2034 bp, Artificial Sequence
  derived and/or modified sequence
atgacgggaagagtctgtcgaggctgtggtggcacggacattgaactggacgctgctcgtggagacgccgtctgcaccgcctgcggtagtgttctggaagacaatattatcgtgagcgaagtacaatttgtggagtccagcggcggtggcagtagtgccgttggtcagtttgtgtctttggacggtgctggcaaaacacccaccctgggtggcggttttcatgtaaatcttggaaaggagtcacgggctcagacactgcagaatgggagacgccatatacatcatttgggaaaccaactgcagttaaatcagcactgtctcgacaccgccttcaactttttcaagatggccgtgtctagacacttaaccagaggcaggaaaatggcccatgtcatcgctgcctgtctatatctggtatgcaggactgaaggtacacctcacatgcttctagacttatcggatctgctgcaggtaaacgtgtacgtactcgggaaaaccttcctgttattggcacgggagctctgcatcaatgcgcctgcgatcgacccatgtttatatatccctcgcttcgcgcacttgctggaatttggcgagaagaaccatgaggtgagtatgactgcccttaggctcttgcagagaatgaagagggattggatgcatacgggaagacggccaagtgggctgtgtggggctgctctgcttgtggccgcacggatgcatgacttcaggcggacagtgaaggaagttatcagcgtggttaaggtttgcgaatcaacattgagaaagcgactaaccgaatttgaggacactcccacatcacagcttaccatagatgaattcatgaagatcgatttagaagaggaatgcgatcccccttcttacactgccggacagcgcaagctgcgcatgaagcagttggagcaggttctgtcaaaaaaattggaagaggtggaaggagagatttcctcataccaggatgcaatcgaaatcgagctggaaaactcccgcccaaaggctaagggcggacttgcatcactggcaaaagatgggtccacagaagatacagcgagcagcctttgcggcgaggaggacaccgaggatgaagagctggaagctgcagcctctcacctaaataaggacttgtaccgcgagctgttgggcggtgctccaggaagctccgaagcggctggcagccccgagtggggcggaaggccacccgcactgggctctctcctggaccccttacctacagcagcatctttaggcattagtgattcaataagggaatgcataagttctcagagctctgatccaaaggacgccagtggcgatggcgagctggacttaagcggcattgacgacctggaaatcgacaggtacatcctgaatgaatccgaggcaagagtgaaggcagaattgtggatgcgggagaatgcggagtatttaagggagcagcgggagaaagaggcaaggatcgccaaagagaaggagctgggaatttacaaggagcataagccaaagaaaagttgcaagcgacgggaaccgatccaagcttctactgctcgcgaggcaatcgagaaaatgttggagcagaagaagatatcatccaagatcaattatagcgtcctgcggggactgtccagcgccggaggcggatcacctcaccgggaagacgcacagccagaacattctgcttccgctaggaaactttcaaggaggcggacaccagcctcacgcagcggagccgatccggtgacttctgtaggcaaacgattgcgcccactcgtatccacgcagccagcaaaaaaggttgcaacaggcgaagccctgttgccgtcatctcccacactgggggcagagcctgcgagaccccaggcagtcttggttgaaagtggtcctgttagctaccacgccgacgaggaagccgatgaggaagaacctgatgaggaagatggcgaaccatgcgtttctgcactgcaaatgatgggctctaatgactacggctgtgatggtgacgaggacgatgggtactag

SEQ ID NO: 118400 - DNA, 45 bp, Artificial Sequence
  derived and/or modified sequence
atgacagccctgcggctgttgcagcgcatgaagcgcgactggtag

SEQ ID NO: 118401 - DNA, 2292 bp, Artificial Sequence
  derived and/or modified sequence
acaaccgagtcctgcgcgccccgtgcgccgggggtcgctcccaggccgaggtctgacagtgtcgccgaacgcgaaaggaagcgtgtggtacccgagagaggaagcaccctcgtcaccccggccggcaccgcattgaggcaggtgtgcaggtgcggttgcggcgagccaggtgctggcaaaaccccgactctgggtggcggcttccacgtgaatctggggaaggagtcgagagcgcagaccctgcagaatgggaggcgccacatccaccacctggggaaccagctgcagctgaaccagcactgcctggacaccgccttcaacttcttcaagatggccgtgagcaggcacctgacccgcggccggaagatggcccacgtgattgctgcctgcctctacctggtctgccgtacggagggcacgccgcacatgctcctggacctcagcgacctgctccaggtgaatgtgtacgtgcttggaaagacgtttcttctcttggcaagagagctctgcatcaatgcgccggccatagacccgtgcctgtatattccacgctttgcgcacctgctggaattcggggagaagaaccacgaggtgtccatgactgccctgaggctcctacagaggatgaagcgggactggatgcacacaggccggcgcccctcgggcctctgcggagcagcgctcctggttgcagccagaatgcatgacttcaggaggactgtgaaggaggtcatcagtgtggtcaaagtgtgtgagtccacgctgcggaagaggctcacggaatttgaagacacccccaccagtcagttgaccattgatgagttcatgaagatcgacctggaggaggagtgcgaccccccctcgtacacagctgggcagaggaagctgcggatgaagcagcttgaacaagtcctgtcaaaaaaactggaggaggttgaaggtgaaatatccagttaccaggatgcaattgagattgaactagaaaacagccggccaaaggccaaggggggcctggccagcctggcaaaagatggctccaccgaggacaccgcgtccagcttgtgtggcgaggaggacacagaggacgaggagctggaagccgcggccagccacctgaacaaagacttataccgggagctccttggtggtgcccccggcagctcggaagcagcaggaagccccgagtggggcggcagacctccggccctggggtccctgctggaccccctccccactgcagccagcctgggcatctcagactccatccgcgaatgcatctcctctcagagcagcgaccccaaagatgcttcaggagacggtgagctggacctcagtggcattgatgacctggagattgacaggtacatcctgaatgagtcggaagcccgcgtgaaggccgagctgtggatgagggagaacgccgagtacctgcgggaacagagggaaaaagaagcaagaatagcgaaagagaaggagctcggcatctacaaggaacacaagcccaagaagtcttgcaagcgacgggagccaattcaggccagtaccgccagggaggccatcgagaagatgctggagcagaagaagatctccagcaagatcaattatagcgtgctccggggcctcagcagcgccggcgggggcagtccgcacagggaggatgcacagcccgagcatagcgccagtgccaggaagctgtcacgaaggaggacgccggccagcagaagtggggctgaccctgtgaccagtgtggggaaaaggttgaggcctctggtgtctacgcagccagcaaagaaggtggccacgggagaggctttgctcccaagctctcccaccctcggagctgagcctgccaggccccaggcggtgctggtggagagcgggcccgtgtcataccacgccgacgaggaggctgacgaggaggagcctgacgaggaggacggggagccctgcgtcagtgccctgcagatgatgggcagcaacgactatggctgtgatggcgatgaggacgacggctactgaagtgtggcctccaggcaggtgatgtcctggcagggggcctcgcgggtctcctcagcatcagacgggcttccaggaccgcagcaggcaggccccagcgccgagactcctggtgacaggtggcacctgtcccacagccctcgtcccatgtggaacttaccattgggattgtgtttctattcagcaagggaaaccggaccaagcgtctgcatgtgtgtgatcagatgtgggccgggtgtgtgcagggctgggtcccgctgcctgccgtcgactcat

SEQ ID NO: 118402 - DNA, 2368 bp, Artificial Sequence
  derived and/or modified sequence
ggcgacgcctctaaatgagagacagcgccaaccaggtacccgcgaggacgaccccgccccgcaggacagggcatctccaccgcgcgctggacggaggatacaaccgagtcctgcgcgccccgtgcgccgggggtcgctcccaggccgaggtctgacagtgtcgccgaacgcgaaaggaagcgtgtggtacccgagagaggaagcaccctcgtcaccccggccggcaccgcattgaggcaggtgtgcaggtgcggttgcggcgagccaggtgctggcaaaaccccgactctgggtggcggcttccacgtgaatctggggaaggagtcgagagcgcagaccctgcagaatgggaggcgccacatccaccacctggggaaccagctgcagctgaaccagcactgcctggacaccgccttcaacttcttcaagatggccgtgagcaggcacctgacccgcggccggaagatggcccacgtgattgctgcctgcctctacctggtctgccgtacggagggcacgccgcacatgctcctggacctcagcgacctgctccaggtgaatgtgtacgtgcttggaaagacgtttcttctcttggcaagagagctctgcatcaatgcgccggccatagacccgtgcctgtatattccacgctttgcgcacctgctggaattcggggagaagaaccacgaggtgtccatgactgccctgaggctcctacagaggatgaagcgggactggatgcacacaggccggcgcccctcgggcctctgcggagcagcgctcctggttgcagccagaatgcatgacttcaggaggactgtgaaggaggtcatcagtgtggtcaaagtgtgtgagtccacgctgcggaagaggctcacggaatttgaagacacccccaccagtcagttgaccattgatgagttcatgaagatcgacctggaggaggagtgcgaccccccctcgtacacagctgggcagaggaagctgcggatgaagcagcttgaacaagtcctgtcaaaaaaactggaggaggttgaaggtgaaatatccagttaccaggatgcaattgagattgaactagaaaacagccggccaaaggccaaggggggcctggccagcctggcaaaagatggctccaccgaggacaccgcgtccagcttgtgtggcgaggaggacacagaggacgaggagctggaagccgcggccagccacctgaacaaagacttataccgggagctccttggtggtgcccccggcagctcggaagcagcaggaagccccgagtggggcggcagacctccggccctggggtccctgctggaccccctccccactgcagccagcctgggcatctcagactccatccgcgaatgcatctcctctcagagcagcgaccccaaagatgcttcaggagacggtgagctggacctcagtggcattgatgacctggagattgacaggcgcgaccttagcatgccccggtgtgcgaaggctaaaagccagccccacttccctgtgctcgcccagtacatcctgaatgagtcggaagcccgcgtgaaggccgagctgtggatgagggagaacgccgagtacctgcgggaacagagggaaaaagaagcaagaatagcgaaagagaaggagctcggcatctacaaggaacacaagcccaagaagtcttgcaagcgacgggagccaattcaggccagtaccgccagggaggccatcgagaagatgctggagcagaagaagatctccagcaagatcaattatagcgtgctccggggcctcagcagcgccggcgggggcagtccgcacagggaggatgcacagcccgagcatagcgccagtgccaggaagctgtcacgaaggaggacgccggccagcagaagtggggctgaccctgtgaccagtgtggggaaaaggttgaggcctctggtgtctacgcagccagcaaagaaggtggccacgggagaggctttgctcccaagctctcccaccctcggagctgagcctgccaggccccaggcggtgctggtggagagcgggcccgtgtcataccacgccgacgaggaggctgacgaggaggagcctgacgaggaggacggggagccctgcgtcagtgccctgcagatgatgggcagcaacgactatggctgtgatggcgatgaggacgacggctactgaagtgtggcctccaggcaggtgatgtcctggcagggggcctcgcgggtctcctcagcatcagacgggcttccaggaccgcagcaggcaggccccagcgccgagactcctggtgacaggtggcacctgtcccacagccctcgtcccatgtggaacttaccattgggattgtgtttctattcagcaa

SEQ ID NO: 118403 - DNA, 18259 bp, Artificial Sequence
  derived and/or modified sequence
ggcgacgcctctaaatgagagacagcgccaaccaggtacccgcgaggacgaccccgccccgcaggacagggcatctccaccgcgcgctggacggaggatacaaccgagtcctgcgcgccccgtgcgccgggggtcgctcccaggccgaggtctgacagtgtcgccgaacgcgaaaggaagcgtgtggtacccgagagaggaagcaccctcgtcaccccggccggcaccgcattgaggcaggtgtgcaggtgcggttgcggcgagccaggtgagcgccgcccgggagccccaaggtcccgccgggtctgagcagcaccgggtcctcggaagctgagcgcggcccccggtgctcgggacctggggggctggggccgcgcttgccggagctgcgggggggcggcggctgcacgcgtcgaaccggcgggcgggggcgcggggggcgacctgggctccgctgggggacccgggccggggatggggcgcgcagaggccgcggccaggacacccccagcaggtgcccggcgggaacaaagcgcggcgggcggcgcgtacctgggcacgcagctggggctggagccgtccacctcccaggtggcgaacaggttcatgggcacgggcgtgttgagcgcgccgggcgcgccggggaggccgaggcggcctcgctcggccatggcgccggccccgccgctccctcggcggcctggggctgcggccgggccgcggacgcgcggcgggcgggccgggcgcgcggagggcggcggcgcggtcacatggctgccgggcggcggaggggacgggccgggccccggcgtcggacaggcccgcgggcggcgacgagctgcggccgctccgccccgccccgcccggcgccccgcccgcgccccgcgcgcccccggccgccccgcgcgcgcccggcgccctccgacccgcgccggcgccgccgattggctgggcggggcgccagctcgccgcctcgggtccaatcgccgccggcgcagcgcgcgccggaagtgaggtgcgcgcgcgcttcctccggcggcgcctcacggggcgtccccgcccgccggtgcgcgagagcgcgcactcacgcgcctgcgcacagaccccgcccggggcgccccgccccgccccccgggagccgcgggcaagggccgggagagtcgtgggggtccaccgggtcccggccagcttcaggcgccgccccctaaggaaagctcatcgtcgccctggcgatgcccacctccccacgcgcggattccccggcctcgacactttcccgcctccaccccgccatgccccgagtctccccgcccccctgccctcgccgccccttgtctcctgccgacccccgctgggttggcccggctgtgcgggccccgcccgtccccgagcccctccctcgcgcccccctgcgtgggttccccgggacgcagggaggtggcaaggaggtggccgggcctggcggcggtcgcggggactcgaagccactcggggcgccaggctgccgagcttagcctccagggctccagatgaccccgggcgccctctttgcgtcccagcatccttattcagcgccgcttttcagcgttgtgctcaggacaatggagaacaaatgtctggggccaaggctggctcctggccctggggttaacagtgaacttggggacccaagcaaagaggaggcaatggctagagccgctggggcccgacgtgtaggctctggggctcagggagggtgcttcccccatctgtttggcagcggctgtggtccagcaccagatgccaagccgagatttaggaaacggttttctggcctctcttctgtttccttgtttcacagttagtttacagttgcttttctcttcgccctgtgtcttgtctacaagtagttttactgaaacaaatccagcccgagcaaattgacctggagctggtttctttcctggcccacggggcttgccaccccagtgccccgtcagctccttctgcaaaggccctcatgccgctgcttcctccgttgagagagctcagcctccagctgtaactcctgtatctagaactgcaaacagctgcgactgcttaaagtcagggtcccacttcggagagaacaagggactctgtgtttcccacgcgcccctggctcctctaaggtggtacactgagagccatgagggtctgtctgaccttggccagctgctcggcgggcagagggccggtggatctcatacctttgagacagggtagggggagaagtgactatgtccagagagggggtagccataccccaggaggacaggctgtctgtgatgggagggcaggagacaggcacccattgaccccagaactgagcgtacggcgctgctggacctggcgagcgtgcagttgcagtcagacggatgggccgcctgacacatggtgcctgtgtatgccagcgtctaacccaggcagggactacaactgggggtcaagtgaggagatgcggggtgactaagccgtgcacagcagggcttggcaccagctgccaccattgagcggtgcccctcctctgtgccaggcaccgttgtgagcccttaagggacgtgacagttctgtcccatcccaagtgacaaaagaggagatggcggcctgtgaggttatgcagctgccaggggtcgggatatgacccacacagtctgtaccagagtggcccgaagaacccgtatggtgggtctacatcaatgcttctgccaggcaggaaagcagggacacgaaacacaccatgtgtcacgcctgcgaccacgtttatgtttgtttttaaggtgggatggtggtgatgggactgtggtcttctgtattttccaagtgcacagatgtcccttgggtgatcagagtaactttttagccagaacttgttatttgcactgccctcctctgtcggaaaatgatgctgtgctggtccttctcttgagggctgtgggtcacaggaggagatcccctgaaggctgggaggcatccctccccatgctatgaccctggcatggtgtgagccctcacccccgtgtttggagcacaggtgctttctctggtagcgttttctttaaagcaggaacttggtttgagacaaacctctcggatgactggggtggctgggcacggttggggaggaggtccaagaagaggatccttcagagccctggggtctcaggaggacaacctgaaagctggtcctaccacgtgctgcccggggtccccggaggttgtgggagttattattatttaagaagttaaagcttcaaggttctgaatgcttggctaggattccattggtattaaaaagacgaagccccaacccccagtcatgggacaggatgggccgaggcctttcctctgtccgcctggcttcgctaggtccctccacctagggtgaaggctcaggcttttccagtcgggcgccaggaccatgggctgcttggaaacgcattcatctcctcagcctgggctaagatgacacagacacacagcaggccctgctgaagtcggggagtgggggaggggcctcctccagggccagcactggtcagttggcggctccagcccacagcgcccctactccttctcctgccaggagctgggctgaggaagcagccccacgtggccaggtccctgcccagcccatgctatggcagagggacagaactgccgaacccctagacaggccctgccgcatccactcccatggttggagcacatggccatgactgaggctgaggaggaatggtcacaaaaaaggtacagcagggccctcctcctggaggcattttctgggaagccatgtgggggatggccaagagctctaagaccgctgagatcgctgcacccgcagccgcacctgtggacagttcccacggtcacccttagagcagctcaactgctgagagtgaggcctggaatcaaccccggggttgtagagtagaacagggttaggtgagccatgatagaacctgatagaatattctacagctggcagaaatagtgagttaaaagtagctaaaaacaggccagtcgcaggggctcacacctgtaatcccagcactttgggaggccaaagcgcacagatcccgtgacctcaggagttcaagaccagcttgggcaatatggcaaagtcccatctctaacaaaaatacaaaaacgtacctgggcatggtggtgcgcatctgtgatcccagtgacttgggaagctgaggtgggagaatcacttgaacccaggaggtggaggttgcagtgaaccaggatcacaccactgcactccagtctgggggacagagccaggctccatctcaaaaaataaaaataaaaaggccgggcacagtggctcatgcctgtaatcttagcactttgggaggccgaagtgggtggatcacctgaggtcaggagtttgtgaccatcctggccaacatagtgaaaccccatctctactaaaaatacaaaaaattagtggggcatgatggtgcgcgcctgtaatcccagctactcgggaggctgaggcaggagaatcgcttgaacccagcaggcagaggttccattgagccaagattgtgccactgcactccagcctgggtgacaagagtgaaactctgtctcaagaaaacaaaaatgtatgtgaaaatgcatgtccatgtgcagtatgtatttacatgttagtgattatacatataaaacacctattttcaggtatagaaaaatattgataggatacaaattaatccaaagtgttaagaaagtatctctgtgtgatggggattccattgatttggtttctcctttttgcttatctttatctcctattttctccatgatgaacatgtattaattgtgtagggaaaatcaaaccacagcagggtgagctgccgctggctggagagccgggcgccatctggctggggctgcgccccgtcctgaaaaaaccaaacgtgcaaagggaaccctcacccaacgcaacaaactattgaggatgatctttgtaagaatactgaatgtttcactagggtaacattcttttttttttttttttttttttgagacagagtctcgctctgtctgtcgcccaggctggagtgcagtggtgccatctcagctcactgcaagctctgcctcccgggttcatgccattctcctgcctcagcctcctgagtaggggggactacaggcgcctgccaccacgcctggctaattttttgtatttttattagagacggggtttcaccgtgttagccaggatggtcttgatctcctgacctcatgatccgcccgcctcgacctcccaaagtgctgggattacaggcgtgagccactgtgcctggctcactagggtaacattcttaatatcaaaggaaatcatacaagtccataagaccactaaaaaattcccagtggaaaatggttagagaagctacaaaagattcacaaaagaataagtgagacagttgtcactactatcacgaattgtaaattataaaaagatgcacatggctgggtgcggtggctcatacctgtaatcccagcactttgggaggccgaggcgggtggatctccaggtcaggagttcaaaactagcctgaccaatacactgaaaccccgtctctactaaaaatacaaaaattagtcgggtgtggtggcgggcgcctgtagtcccagctagtcgggaggctgagacaggagaattgcttgaatccaggaggcggagcttgcagtgagccgagattgtgccactgcactcctgcctgggcaagagagtgagactccgtctaaaaaaaaaaaaaaaaaaaaaaaaaaaagacacacatcaccaccttctccttaatgcaggctaatctagacctaatacagacctaaggtcgtgatgacatcctcggtgtcctgcacgctgctcccctcctgggttgggcgcaggcagcgcagctccctcacacagcacctggggcaggacccagagcagctctgcagagtggcttggcagcgtcttgggagatttgcctgggctcatgggtatcccatggcatcctgcaggtgacactggaaatgtcaacagggacacaggtccaggtgtgtgagatatttcaaacagcaacacctacagaaaggaatgtccagtccaggggaaatgacaaaacttgccctggcacatccaccccatgggatgtggaataaccagcaaaacggaacgctgcctcagttttagcaacatggggaaattctcagatatgtgattgtgtgacaaatcagggtgtaaagttgaacacagcatgacctggattcaggaataaaactctcccctcttgactgtggttatcctgagccccaagattaagagggaccttgatgcataaattttaacacttctttctttcccacaatagaatatcatcacaataagccaggacataacttaaatattagaaaagaaaggaaaacacccaggccctaatacagaaatcagccaaggacattcacagacatcagaacagcaattaccgcaacacgtgtcaaccaacactcaacctcagtgctcttcgtgcaggatggatttctggttttgttaggttttgtttgtctttttctttttttttcttttgttttcttgacagggtcttgctctgtcaaccaggctggagtgcagtggtgccatcatggctcactgtaggccagatctcctggactcaaaccatcctcctgcctcagcctctcaaagtgctgggattacaagtgtgaaccactgtgctgggtccctaagggttttaaaaaattatttatttatttagagacaaagtcatggctgggcacagtggctcatgcctgtaatcccagcactttggggggctgaggcaggcggatcatgaagtcaggagttccagaccagcctggccaacatggtgaaaccctgtctctactaaaactgcaaaacttagctgggcacagtggctcatacctgtaatcccagctactcagaaggctgaggcaggagaatcacttgaacccaggaggcggaggttgcagtgagccaagattgcaccactgcactccagcccggacgacagagcaagactccatctcaaaaaaaaaaaaaaaaaaagacagaatctgcctctgtcgtgcccaggctggagtacaatggtgccatctcagctcactgcaacttctgtctcctgggctcaggcaatcctccctcttcagcctcccgagtagctgggaccacaggcatgtaccaccacacctggctaatttttgtatttttgttagagatgctgttttgccatatttcccaggctggtctcaaacacctgggctcaatcaatcctctcacctcagcctcccaaagtgctgggataacaggtgtgagccactgtgcccggcctaattgtttttttgggggggacagagtctcactctatggtccaggctggagtgctgtggtgtgatcataactcactgcagcctcagtcacctgggttcaagcgattctcctgcctcagcctcccaagtagctgaactagaggcacgcaccaccacgcacagctaatttttaaattttttgtagagacagggatctcactttgttgcccaggctggtctcgaactcctgggctcaagctatcctcccacctctgcctcccaaagtgctgggatgacaggcgtgagccactgtcctggcctggcccttgacttctgtggtggaaggtggactggagcctcaccaagtctcactcgagttgcggagaacagacaggaacagggacttgccttctgagcagtctgtctaccagacacatgtcctccatcatactccgcagtgctagggtgggctattcttatccctgttatgcagatgaggaagtagaaacctagagagattgaagcacttgcccaaggccaggcagcaggtgagaaggtgagaaggccatagaagcttgctttctcatttcccctgctgactgctgcatggggggacagggctattgagtacccaggagttattttgatcaaatgtgataagatgacagacacagagacaaccgcctttgaaagaggagtttattactcacagttcccaggaggaggggcacgtggggaagcacccagggccagtcaggacagggagggggtgaagggaaagggtgggcaagagcctttattgccattttccaggcaaggcagaggaggcaagctgagcagaattagaactgggtcatttcagtgggctctgggcttgggggtggtatctagctagctggtacctggccttggggtgatttagggcagggggctagtgttcaggaatgcaggagcctgatgaaaggaggcaggtgggactcatgatggttgctctgcatatcaaaggtatgctcagcctgcacggtggctcaagcctgggatctcagtactttgggaggctggggccaaaggatctcttgagcccagcagtttgagacgacagtgagctatgatcataccactgcactccagcctgggtgacagagtgagaccctgcctcaaaaaaaaaagaaaaaaagaaaaaataaagtaaataaggcatactcagaggcaagtggtcagctgtctctaggaattagctaaccctgggaggggagtccctctctaggtccacgagaccccaagatgtcaaagcaccacagatgagaacacgatggggcttggcacggtggctcacgcctgtaatcccagcactttgggaggccaaggcagatggatcatttgaggtcaggaattcaagacgagcctggccaacatgatggaaccctgactctactaaaaatacaaaaattagctgggcgcagtggcaggtgcctgtaatcctagctacttgggaggctgaggcaggagaattgcttgaacccgggaggtagagattgcggtacatcaagatcgtgccattgcactacagcctgggcgacacagcgagactcagtctcaaaaaaaacccccaaaaaacaggccaggtgtggtggctcatgcctataatcccagcactttgggaggttgaggtgggcagatcacgaggtcaggagatcgaggccatcctggccaacatggtgaaaccccatctctactaaaaatacaaaaaattagccgggcatggtggcatgcacctgtaatcccagctaatcgggaggctgaggcaggagaatcgcttgaacctgggaggcagaggttgcactgagtcgagatggcgccgctgcactccagcctgggggacagagcaagactgtgtctcaaaaacaaaacaaaacaaaacaaaacaaaacaaacccaaaaacaaaagacaccatgaatgaagaaagcctccaggaggggaagtttgcaggtgcctaggcgtgtccttcaaaactctaaccctgctggtcaggtcatttttctcaggccctgagaaaaggaaatccttcctggtctaagtgttacgagcacgttcagttcagattaaagcaattctctcatttcagtgcaacacctacattactttccagctctctggggcccccatgaaggaatgttcctgccccacacccccagcctgggccccgctctgctgctgtgtgctggagtcaggtctaggggcaagcccacagcctctccctgtttacagccagagcggagatcactgcacgtttccagcgtcctctttggcgcggtgcgagtgagggtcctgccttgcagggctgaatgaggagtacagaggaccctgggcacaggaagctggtgctgggtgcccagtgtgggtgctctgagggcactggtgccccttggccgcccttgcttgactctttgagcttgtcagtcagtcctaaatgtttccaagcttcctggggcgcttgcagcatggggcacctaaccggtccccagggcagttctccgcattctccctctaacctggctccattctttatgccttcacatcacgtggggagcgttactccctgcctcagttggttcacactgcaatggcaaaccaccacagtccaagtggcttataaaccactattcatttcacaggacggtgctggcagatgccgtgtctggtgagggccacttcctggttcatagacagtgccctcttcctgcatcctcacatgggggaagcagcagacaagctccctccagccacgttttttcttttttcttgtttcttttttctttgagacaggttctcaatctgtcgcccaggctggagtggagtggtgtgatctcagctcactgcagcctcaactttctgggctcaagcaatcctcctacctcagcctcccaagtagctgggactacagacacatgctaccacaaccggctaagtttttgtagtttttgtagagtcagggttttgccatgttgcttaggctggtctcaaactcctggactcaagcaatcctccctcctcagcctcccaaagtgctgagatcacagatgtgagccactgtgcccagccagccacttttctgagggcattaatcccgctcatgagggaagcagccctcatgacctcatctcccaaaggccccacctctctaaaaccatcgccttggggcaaggacgtcaacatatggactttgggggaacacacatgatatgatttggctctgtgtacccacccagatctcatcttgaattcccacatattgtggagggacctggtgggagggaattgaatcatgggggcaggtctttcccgtgctgttcttgtgattgcgaataagtctcacgagatctgacggttttataagagggagtttccctgcagaagctctctctctccctgctgccatccacgtaagacgtgacttgctcctccttgccttcctccatgattgtgaggcctctgcagccacgtggaactacaggtccaataaacctcttttgtttgttaatcgcccagtctcacgtatgtctttatcagcagtgtgaaaacagactgatacaatgcacattcagaccatagcacccctcctctgcagcccatctgagcaaaggcttagttctggcagcacgcaccttgggccattgcccagtagagcctcacccttttttatattttattttattttattttatttattgtgagatggagtttcactcttgtcgtccaggctgaagtgcaatgacgccatctcgcctcaccacaactcccgcctcccaggttcaagcaattctcctgcctcagcctcccgagtagctggaactacaggcgcccaccatcacacctgctaatttttgtattttttggaaagatgggtttcaccatgttggccaggacggtcttgatctcttgacctcgtgatctgccctcctcagcctcccaaagtgctgggattacagtcctgagccaccgagcctggctgaaaccacaccctttaaacctcttaccgttgtgggtgtggtcttccccaccctctgctcctctggccaatcctgtcctgtacagcctgactgtcctgtactgcctgactgtcctgcaccgctgtggcctgggaggcatgctgccccttgcacctgcaggcacctcacaggctttggtgagggagcacacgaaataacccctctagtctgtcaggtgagagcaaggatccagtggccacatggcctcagattggattctggctttgttacctactggctatgagatttggggctgtcacccctcacatcctcaagggctccctccataaaatggagacaacagtgtctgcaagctagtgttgccataaggatgaaatgtcatcatggacagagagcattttgcatagagatcaataatacatatttgaaaaatccccaacatttagaaacaaaacaatacacttcctaataacccttggatccgggaggaaattaagagtggagacaatcttgagctgaatgaaaatgaaaacacagcacattgaaatgtgcaggattcagctaaagtggtaattacagggagaattatagcaataaaatgcctatttataaaggaaaagagatcttaaatcaatgatttcatctttcaccttaaaaaactaggaaaaggccaggcgcgatggctcacgcccatagtcccagcactttgggagggcgagacaggtggatcacgaggtcaggagatcaagaccatcctggctaacacagtgaaaccctgtctctactaaaaatacaaaaaattagccaggcatggtggtgggcacctgtagtcccagctacttgggaggctgaggcaggagaatggcatgaacccgggaggtggaggttacagtgagccaagatcgcaccactgcattccagcctgggtgacagagcgagactccacctcaaaaaacaaaacaaaacaaaaactagaaaaaggggccgggtgcattggctcacgtgtagaatctcaacactttgggagaccaagacaggtggatcacttgaggtcaggagtttgggaccagcctagccaacatggtgaaaccccatctctactaaaaatacaaaaattagctgggcgtggtggcacatgcctgtaattccagctacttgggaggctgaagtgacagaatcacttgaacctgggaggtggaagttgcagtgagctgagatggcaccactgaactccagcctgggtgttctctatctcaaaaaaaaaaaagaactagagaaagggcggggagcagtggctcatgcctgtaatcccagcactttgggaggacagggcggggagcagtggctcatgcctgtaatcccagcactttgggaagacaaggcgggtggctcacttgagcccaggagttccagaccagcctgggcaaatgaggcaaaaacccatctctacaaaaaatattatctgggtgtggtggcacatgcctgtagttccagctactcgggaggctgaggtgggaggatcacctgagcccaggaggtagagtctgcagtgaggcttgattatgctactgcactccaccttgggtgacagaatgagacactatctcaatttttaaaaaatgaagaaactagaaaaagggaacacattgaaccaaattaagtggaaagaaggatctaacaaaaatgagagcagaaattaatgaaatagggccatgcacggtggctcatgcctgtaatcccagcactttgggaggctgaagtgggcggatcacctgaggtcgggagttcaagactggcctgaccaacatggagaaaccccgtctctactaaaaatacaaaattagccaggtgtggtggtgcatacctgtaatcccagctactcgggaggctgagagaggagaatcgcttaaacccaggaggcagaggttgcagtgagccgatatctcaccactgcactccagcctgggcaacagagcagagactccgtctcaaaaaaaaaaaaaaaagaaagaaaaaaaagagggtggggtcttccgcatttccttttttctcttttttttttttgagacagagtttcactcttgtcacccgtcacccaggctggagtgcaatggcgggatctcagctcactgcaacctccacctctcaggttcaagtggttctcctgtctcagactcgcgagtagctgggattacaggcgcccaccaccaagcctggctaatttttttgtatttttagtggagacggggtttcgccatgttggccaggctggtctcgaactcctcaccttacgtgatccgcctgccttggcctcccaaagtgctgggattacaagcgtgagccactacgcctggttacgcatttctttttaggctcattcctgggtatgtcaccggccctatggcgattgtgaacagcacctgcagatatttgagggcgtgcgcagccagggttcccgctctgggcagggggcacagcgaggtgactcacgggtaaccacaggtggccacgaatgactgctagaaagtgggaattttaggggaacagaaaacggagaatagcggggcgcacggggaggctctggaacctgggcgagcggagcggcggacgccgcaaatgcggagggcggggcagggtggcccctggcgggtgtctccacctctgcggccaggccccccagcgcagctgccctggccccgcccaccactcccagagcccggggttgggtcccaggtcgccctcaggagccaaggccccgcccaccacgctcggccccctcgcctcaagccccgcccacagttcgggtccagacccaggctccgcccccttcccccgcccacagctccagttcccttcgcaggccgtctctccacgggaggccccgccccccaccctcagccccgcatccggctgagtcctcaccccaggcctcgctcgccgctggagaccgcgctcactatccgaggaggaccctcctctgccccgcgtccagctttagtccccgactgcgttcatcgccaagggcccgcccactgccttaggtcgcgtcgccagccttgggtcccgtcgccagccttgggtcccgtccccggctgcactcaccgcgaggccccacccttagctctagtccccggtgtcgcccaccgacgaggccccgccccaaactccagtcccgggctgcgctcaccgccgtggccccgcccccaagcgccagtcctcggctgcgctcaccggtaggccccgctcgggttccgccgaagcccagcccccgcaggtcgcccctccgacgccggcgcgccgcaagggaggccagctcgctcgcagtggggaggtcgcggctccagtcctcgcgtccccgccgtggtcccggtgcctgtcccatcccgcgggcgcggccgttgcgggcggcgcggcccgggcgcgcgcggcgaatctgcggctgcgaatcggctggagcggggcctcgcgagagcggcgaggcctgggcggctgggcctgggcgggcggcgcgggctgctccggaggctcgggtggcttgagagtcttgggaggctccgggcgctgcccgcgcggtcgccggcatgacgggccgcgtgtgccgcggttgcggcggcacggacatcgagctggacgcggcgcgcggggacgcggtgtgcaccgcctgcggctcagtgctggaggacaacatcatcgtgtccgaggtgcagttcgtggagagcagcggcggcggctcctcggccgtgggccagttcgtgtccctggacggtgctggcaaaaccccgactctgggtggcggcttccacgtgaatctggggaaggagtcgagagcgcagaccctgcagaatgggaggcgccacatccaccacctggggaaccagctgcagctgaaccagcactgcctggacaccgccttcaacttcttcaagatggccgtgagcaggcacctgacccgcggccggaagatggcccacgtgattgctgcctgcctctacctggtctgccgtacggagggcacgccgcacatgctcctggacctcagcgacctgctccaggtgaatgtgtacgtgcttggaaagacgtttcttctcttggcaagagagctctgcatcaatgcgccggccatagacccgtgcctgtatattccacgctttgcgcacctgctggaattcggggagaagaaccacgaggtgtccatgactgccctgaggctcctacagaggatgaagcgggactggatgcacacaggccggcgcccctcgggcctctgcggagcagcgctcctggttgcagccagaatgcatgacttcaggaggactgtgaaggaggtcatcagtgtggtcaaagtgtgtgagtccacgctgcggaagaggctcacggaatttgaagacacccccaccagtcagttgaccattgatgagttcatgaagatcgacctggaggaggagtgcgaccccccctcgtacacagctgggcagaggaagctgcggatgaagcagcttgaacaagtcctgtcaaaaaaactggaggaggttgaaggtgaaatatccagttaccaggatgcaattgagattgaactagaaaacagccggccaaaggccaaggggggcctggccagcctggcaaaagatggctccaccgaggacaccgcgtccagcttgtgtggcgaggaggacacagaggacgaggagctggaagccgcggccagccacctgaacaaagacttataccgggagctccttggtggtgcccccggcagctcggaagcagcaggaagccccgagtggggcggcagacctccggccctggggtccctgctggaccccctccccactgcagccagcctgggcatctcagactccatccgcgaatgcatctcctctcagagcagcgaccccaaagatgcttcaggagacggtgagctggacctcagtggcattgatgacctggagattgacaggtacatcctgaatgagtcggaagcccgcgtgaaggccgagctgtggatgagggagaacgccgagtacctgcgggaacagagggaaaaagaagcaagaatagcgaaagagaaggagctcggcatctacaaggaacacaagcccaagaagtcttgcaagcgacgggagccaattcaggccagtaccgccagggaggccatcgagaagatgctggagcagaagaagatctccagcaagatcaattatagcgtgctccggggcctcagcagcgccggcgggggcagtccgcacagggaggatgcacagcccgagcatagcgccagtgccaggaagctgtcacgaaggaggacgccggccagcagaagtggggctgaccctgtgaccagtgtggggaaaaggttgaggcctctggtgtctacgcagccagcaaagaaggtggccacgggagaggctttgctcccaagctctcccaccctcggagctgagcctgccaggccccaggcggtgctggtggagagcgggcccgtgtcataccacgccgacgaggaggctgacgaggaggagcctgacgaggaggacggggagccctgcgtcagtgccctgcagatgatgggcagcaacgactatggctgtgatggcgatgaggacgacggctactgaagtgtggcctccaggcaggtgatgtcctggcagggggcctcgcgggtctcctcagcatcagacgggcttccaggaccgcagcaggcaggccccagcgccgagactcctggtgacaggtggcacctgtcccacagccctcgtcccatgtggaacttaccattgggattgtgtttctattcagcaagggaaaccggaccaagcgtctgcatgtgtgtgatcagatgtgggccgggtgtgtgcagggctgggtcccgctgcctgccgtcgactcatccaaggaccctccaaggctggcagtgtggtgttgctactattaaggaaacaggcttggggcagccccactgctggtccaagtgtgtggagggctgagtgtgctggccctgtgactcaggaccagctctggagtctccagcccaccctccgcaccgtcccctcctgagcagcactcggcgccagcagcctctgccagagtggaagccagagccctgcaggtgtccggcgcagccgtgggagctgaggatctggcacttgagaggcagcagctccttgaaggtcctctgcctccagctgtggccctgcatccagatacctgcctcgtccgaggcagacacccccacccctgcctcctccagacccccctccccgctgcctgcaccgcctggagcagcatgggggtcagacccctgctccagggccacttgagttgtgggcccaggagccctgcggctgccggcaggtgaactgagtgcccgacagctgagaccggcgcccacccgtcctgagcatagctctgtaggcagtgcgggcatagcctgcatagtgtcctggcgctgggagttccccgtggacagagccagagggcagtggcgctccctgtcagagctggatcaggccccccatcgaggagggagggcagacggaggcccgagagcctccccaggcctcttcgtgggaaggccccagtaccactcgtaggaggtctcagctctggcatggctgccccggatgtggccgagggggcttcaccctgtgtccttaggagggggtggccttgaggcagagccgtgcctcactgacccccaggggcctcatcctccccatggaatgggctgtatgtcctgccccaacttggcccgcagcaggccagacccccctacccccgcccagagctcagtagccagcctgggtcctgccagggcttctcgagggcttgggggaagaatagatttagtaaagcaggaagatctgttgttacttaacagaaa

SEQ ID NO: 118404 - DNA, 1689 bp, Artificial Sequence
  derived and/or modified sequence
atggccgtgagcagacacctgaccagaggcagaaagatggcccacgtgatcgccgcctgcctgtacctggtgtgcagaaccgagggcaccccccacatgctgctggacctgagcgacctgctgcaggtgaacgtgtacgtgctgggcaagaccttcctgctgctggccagagagctgtgcatcaacgcccccgccatcgacccctgcctgtacatccccagattcgcccacctgctggagttcggcgagaagaaccacgaggtgagcatgaccgccctgagactgctgcagagaatgaagagagactggatgcacaccggcagaagacccagcggcctgtgcggcgccgccctgctggtggccgccagaatgcacgacttcagaagaaccgtgaaggaggtgatcagcgtggtgaaggtgtgcgagagcaccctgagaaagagactgaccgagttcgaggacacccccaccagccagctgaccatcgacgagttcatgaagatcgacctggaggaggagtgcgacccccccagctacaccgccggccagagaaagctgagaatgaagcagctggagcaggtgctgagcaagaagctggaggaggtggagggcgagatcagcagctaccaggacgccatcgagatcgagctggagaacagcagacccaaggccaagggcggcctggccagcctggccaaggacggcagcaccgaggacaccgccagcagcctgtgcggcgaggaggacaccgaggacgaggagctggaggccgccgccagccacctgaacaaggacctgtacagagagctgctgggcggcgcccccggcagcagcgaggccgccggcagccccgagtggggcggcagaccccccgccctgggcagcctgctggaccccctgcccaccgccgccagcctgggcatcagcgacagcatcagagagtgcatcagcagccagagcagcgaccccaaggacgccagcggcgacggcgagctggacctgagcggcatcgacgacctggagatcgacagatacatcctgaacgagagcgaggccagagtgaaggccgagctgtggatgagagagaacgccgagtacctgagagagcagagagagaaggaggccagaatcgccaaggagaaggagctgggcatctacaaggagcacaagcccaagaagagctgcaagagaagagagcccatccaggccagcaccgccagagaggccatcgagaagatgctggagcagaagaagatcagcagcaagatcaactacagcgtgctgagaggcctgagcagcgccggcggcggcagcccccacagagaggacgcccagcccgagcacagcgccagcgccagaaagctgagcagaagaagaacccccgccagcagaagcggcgccgaccccgtgaccagcgtgggcaagagactgagacccctggtgagcacccagcccgccaagaaggtggccaccggcgaggccctgctgcccagcagccccaccctgggcgccgagcccgccagaccccaggccgtgctggtggagagcggccccgtgagctaccacgccgacgaggaggccgacgaggaggagcccgacgaggaggacggcgagccctgcgtgagcgccctgcagatgatgggcagcaacgactacggctgcgacggcgacgaggacgacggctactag

SEQ ID NO: 118405 - DNA, 2034 bp, Artificial Sequence
  derived and/or modified sequence
atgaccggcagagtgtgcagaggctgcggcggcaccgacatcgagctggacgccgccagaggcgacgccgtgtgcaccgcctgcggcagcgtgctggaggacaacatcatcgtgagcgaggtgcagttcgtggagagcagcggcggcggcagcagcgccgtgggccagttcgtgagcctggacggcgccggcaagacccccaccctgggcggcggcttccacgtgaacctgggcaaggagagcagagcccagaccctgcagaacggcagaagacacatccaccacctgggcaaccagctgcagctgaaccagcactgcctggacaccgccttcaacttcttcaagatggccgtgagcagacacctgaccagaggcagaaagatggcccacgtgatcgccgcctgcctgtacctggtgtgcagaaccgagggcaccccccacatgctgctggacctgagcgacctgctgcaggtgaacgtgtacgtgctgggcaagaccttcctgctgctggccagagagctgtgcatcaacgcccccgccatcgacccctgcctgtacatccccagattcgcccacctgctggagttcggcgagaagaaccacgaggtgagcatgaccgccctgagactgctgcagagaatgaagagagactggatgcacaccggcagaagacccagcggcctgtgcggcgccgccctgctggtggccgccagaatgcacgacttcagaagaaccgtgaaggaggtgatcagcgtggtgaaggtgtgcgagagcaccctgagaaagagactgaccgagttcgaggacacccccaccagccagctgaccatcgacgagttcatgaagatcgacctggaggaggagtgcgacccccccagctacaccgccggccagagaaagctgagaatgaagcagctggagcaggtgctgagcaagaagctggaggaggtggagggcgagatcagcagctaccaggacgccatcgagatcgagctggagaacagcagacccaaggccaagggcggcctggccagcctggccaaggacggcagcaccgaggacaccgccagcagcctgtgcggcgaggaggacaccgaggacgaggagctggaggccgccgccagccacctgaacaaggacctgtacagagagctgctgggcggcgcccccggcagcagcgaggccgccggcagccccgagtggggcggcagaccccccgccctgggcagcctgctggaccccctgcccaccgccgccagcctgggcatcagcgacagcatcagagagtgcatcagcagccagagcagcgaccccaaggacgccagcggcgacggcgagctggacctgagcggcatcgacgacctggagatcgacagatacatcctgaacgagagcgaggccagagtgaaggccgagctgtggatgagagagaacgccgagtacctgagagagcagagagagaaggaggccagaatcgccaaggagaaggagctgggcatctacaaggagcacaagcccaagaagagctgcaagagaagagagcccatccaggccagcaccgccagagaggccatcgagaagatgctggagcagaagaagatcagcagcaagatcaactacagcgtgctgagaggcctgagcagcgccggcggcggcagcccccacagagaggacgcccagcccgagcacagcgccagcgccagaaagctgagcagaagaagaacccccgccagcagaagcggcgccgaccccgtgaccagcgtgggcaagagactgagacccctggtgagcacccagcccgccaagaaggtggccaccggcgaggccctgctgcccagcagccccaccctgggcgccgagcccgccagaccccaggccgtgctggtggagagcggccccgtgagctaccacgccgacgaggaggccgacgaggaggagcccgacgaggaggacggcgagccctgcgtgagcgccctgcagatgatgggcagcaacgactacggctgcgacggcgacgaggacgacggctactag

SEQ ID NO: 118406 - DNA, 45 bp, Artificial Sequence
  derived and/or modified sequence
atgaccgccctgagactgctgcagagaatgaagagagactggtag

SEQ ID NO: 118407 - protein, 2109 aa, Artificial Sequence
  derived and/or modified sequence
MDALESLLDEVALEGLDGLCLPALWSRLETRVPPFPLPLEPCTQEFLWRALATHPGISFYEEPRERPDLQLQDRYEEIDLETGILESRRDPVALEDVYPIHMILENKDGIQGSCRYFKERKNITNDIRTKSLQPRCTMVEAFDRWGKKLIIVASQAMRYRALIGQEGDPDLKLPDFSYCILERLGRSRWQGELQRDLHTTAFKVDAGKLHYHRKILNKNGLITMQSHVIRLPTGAQQHSILLLLNRFHVDRRSKYDILMEKLSVMLSTRTNHIETLGKLREELGLCERTFKRLYQYMLNAGLAKVVSLRLQEIHPECGPCKTKKGTDVMVRCLKLLKEFKRNDHDDDEDEEVISKTVPPVDIVFERDMLTQTYDLIERRGTKGISQAEIRVAMNVGKLEARMLCRLLQRFKVVKGFMEDEGRQRTTKYISCVFAEESDLSRQYQREKARSELLTTVSLASMQEESLLPEGEDTFLSESDSEEERSSSKRRGRGSQKDTRASANLRPKTQPHHSTPTKGGWKVVNLHPLKKQPPSFPGAAEERACQSLASRDSLLDTSSVSEPNVSFVSHCADSNSGDIAVIEEVRMENPKESSSSLKTGRHSSGQDKPHETYRLLKRRNLIIEAVTNLRLIESLFTIQKMIMDQEKQEGVSTKCCKKSIVRLVRNLSEEGLLRLYRTTVIQDGIKKKVDLVVHPSMDQNDPLVRSAIEQVRFRISNSSTANRVKTSQPPVPQGEAEEDSQGKEGPSGSGDSQLSASSRSESGRMKKSDNKMGITPLRNYHPIVVPGLGRSLGFLPKMPRLRVVHMFLWYLIYGHPASNTVEKPSFISERRTIKQESGRAGVRPSSSGSAWEACSEAPSKGSQDGVTWEAEVELATETVYVDDASWMRYIPPIPVHRDFGFGWALVSDILLCLPLSIFIQIVQVSYKVDNLEEFLNDPLKKHTLIRFLPRPIRQQLLYKRRYIFSVVENLQRLCYMGLLQFGPTEKFQDKDQVFIFLKKNAVIVDTTICDPHYNLARSSRPFERRLYVLNSMQDVENYWFDLQCVCLNTPLGVVRCPRVRKNSSTDQGSDEEGSLQKEQESAMDKHNLERKCAMLEYTTGSREVVDEGLIPGDGLGAAGLDSSFYGHLKRNWIWTSYIINQAKKENTAAENGLTVRLQTFLSKRPMPLSARGNSRLNIWGEARVGSELCAGWEEQFEVDREPSLDRNRRVRGGKSQKRKRLKKDPGKKIKRKKKGEFPGEKSKRLRYHDEADQSALQRMTRLRVTWSMQEDGLLVLCRIASNVLNTKVKGPFVTWQVVRDILHATFEESLDKTSHSVGRRARYIVKNPQAYLNYKVCLAEVYQDKALVGDFMNRRGDYDDPKVCANEFKEFVEKLKEKFSSALRNSNLEIPDTLQELFARYRVLAIGDEKDQTRKEDELNSVDDIHFLVLQNLIQSTLALSDSQMKSYQSFQTFRLYREYKDHVLVKAFMECQKRSLVNRRRVNHTLGPKKNRALPFVPMSYQLSQTYYRIFTWRFPSTICTESFQFLDRMRAAGKLDQPDRFSFKDQDNNEPTNDMVAFSLDGPGGNCVAVLTLFSLGLISVDVRIPEQIIVVDSSMVENEVIKSLGKDGSLEDDEDEEDDLDEGVGGKRRSMEVKPAQASHTNYLLMRGYYSPGIVSTRNLNPNDSIVVNSCQMKFQLRCTPVPARLRPAAAPLEELTMGTSCLPDTFTKLINPQENTCSLEEFVLQLELSGYSPEDLTAALEILEAIIATGCFGIDKEELRRRFSALEKAGGGRTRTFADCIQALLEQHQVLEVGGNTARLVAMGSAWPWLLHSVRLKDREDADIQREDPQARPLEGSSSEDSPPEGQAPPSHSPRGTKRRASWASENGETDAEGTQMTPAKRPALQDSNLAPSLGPGAEDGAEAQAPSPPPALEDTAAAGAAQEDQEGVGEFSSPGQEQLSGQAQPPEGSEDPRGFTESFGAANISQAARERDCESVCFIGRPWRVVDGHLNLPVCKGMMEAMLYHIMTRPGIPESSLLRHYQGVLQPVAVLELLQGLESLGCIRKRWLRKPRPVSLFSTPVVEEVEVPSSLDESPMAFYEPTLDCTLRLGRVFPHEVNWNKWIHL

SEQ ID NO: 118408 - protein, 1687 aa, Artificial Sequence
  derived and/or modified sequence
MDALESLLDEVALEGLDGLCLPALWSRLETRVPPFPLPLEPCTQEFLWRALATHPGISFYEEPRERPDLQLQDRYEEIDLETGILESRRDPVALEDVYPIHMILENKDGIQGSCRYFKERKNITNDIRTKSLQPRCTMVEAFDRWGKKLIICLPGHAVQGLDRPGGGSRPEAARLLLLHPGTARPVQQGELQRDLHTTAFKVDAGKLHYHRKILNKNGLITMQSHVIRLPTGAQQHSILLLLNRFHVDRRSKYDILMEKLSVMLSTRTNHIETLGKLREELGLCERTFKRLYQYMLNAGLAKVVSLRLQEIHPECGPCKTKKGTDVMVRCLKLLKEFKRNDHDDDEDEEVISKTVPPVDIVFERDMLTQTYDLIERRGTKGISQAEIRVAMNVGKLEARMLCRLLQRFKVVKGFMEDEGRQRTTKYISCVFAEESDLSRQYQREKARSELLTTVSLASMQEESLLPEGEDTFLSESDSEEERSSSKRRGRGSQKDTRASANLRPKTQPHHSTPTKGGWKVVNLHPLKKQPPSFPGAAEERACQSLASRDSLLDTSSVSEPNVSFVSHCADSNSGDIAVIEEVRMENPKESSSSLKTGRHSSGQDKPHETYRLLKRRNLIIEAVTNLRLIESLFTIQKMIMDQEKQEGVSTKCCKKSIVRLVRNLSEEGLLRLYRTTVIQDGIKKKVDLVVHPSMDQNDPLVRSAIEQVRFRISNSSTANRVKTSQPPVPQGEAEEDSQGKEGPSGSGDSQLSASSRSESGRMKKSDNKMGITPLRNYHPIVVPGLGRSLGFLPKMPRLRVVHMFLWYLIYGHPASNTVEKPSFISERRTIKQESGRAGVRPSSSGSAWEACSEAPSKGSQDGVTWEAEVELATETVYVDDASWMRYIPPIPVHRDFGFGWALVSDILLCLPLSIFIQIVQVSYKVDNLEEFLNDPLKKHTLIRFLPRPIRQQLLYKRRYIFSVVENLQRLCYMGLLQFGPTEKFQDKDQVFIFLKKNAVIVDTTICDPHYNLARSSRPFERRLYVLNSMQDVENYWFDLQCVCLNTPLGVVRCPRVRKNSSTDQGSDEEGSLQKEQESAMDKHNLERKCAMLEYTTGSREVVDEGLIPGDGLGAGSIPASTDTSSATGSGPATSSTRPKRRTLPQRMDTVRLQTFLSKRPMPLSARGNSRLNIWGEARVGSELCAGWEEQFEVDREPSLDRNRRVRGGKSQKRKRLKKDPGKKIKRKKKGEFPGEKSKRLRYHDEADQSALQRMTRLRVTWSMQEDGLLVLCRIASNVLNTKVKGPFVTWQVVRDILHATFEESLDKTSHSVGRRARYIVKNPQAYLNYKVCLAEVYQDKALVGDFMNRRGDYDDPKVCANEFKEFVEKLKEKFSSALRNSNLEIPDTLQELFARYRVLAIGDEKDQTRKEDELNSVDDIHFLVLQNLIQSTLALSDSQMKSYQSFQTFRLYREYKDHVLVKAFMECQKRSLVNRRRVNHTLGPKKNRALPFVPMSYQLSQTYYRIFTWRFPSTICTESFQFLDRMRAAGKLDQPDRFSFKDQDNNEPTNDMVAFSLDGPGGNCVAVLTLFSLGLISVDVRIPEQIIVVDSSMVENEVIKSLGKDGSLEDDEDEEDDLDEGVGGKRRSMEVKPAQASHTNYLLMRGYYSPGIVSTRNLNPNDSIVVNSCQMKFQLRCTPVPARLRPA

SEQ ID NO: 118409 - DNA, 7124 bp, Artificial Sequence
  derived and/or modified sequence
cgttgcgcatgcgccccgggcgccgccgactgaagtagcaatggacgcgctggagtcgttgttggacgaagtcgctctggaggggctcgatggcctgtgtctgccagcgctgtggagccggctggagacgcgagtgccgcccttcccgctgcctttggaaccctgcacgcaggagtttctctggcgggccctcgccacgcacccgggcatcagcttctatgaggagcctcgggagcgacccgacctacagctccaggaccggtatgaagaaattgatttggaaactggaattttggagtctaggagggacccggtggctttggaggatgtctaccccattcatatgatcttagagaataaggatggcatccagggctcatgccgctactttaaggagaggaaaaacattaccaatgacatcagaaccaagtccttgcagcctcgctgtacaatggtggaagcctttgacaggtgggggaagaaactgatcatcgttgcctcccaggccatgcggtacagggccttgataggccaggagggggatcccgacctgaagctgcccgacttctcctactgcatcctggaacggctaggccggtccaggtggcaaggggagctccagcgagaccttcacaccactgctttcaaggttgatgctgggaagctgcactatcacagaaaaattttgaacaaaaacgggctgattacaatgcagtcccatgtgatccgattacccactggagcccagcaacactcaatcctcctcctactgaaccggtttcatgtggacaggaggagcaaatacgacatcctcatggagaagctttcggtcatgctgagcacacggactaaccacatagagacgctgggaaagctgagggaagagctggggctgtgcgaaaggacgtttaagcgtctgtaccagtatatgctgaacgccgggctagccaaggtggtgtctcttcgcttgcaagagatccaccctgaatgtggaccttgtaagacaaagaaagggaccgacgtcatggttcggtgcctcaagctgctgaaggaatttaaacggaatgaccatgatgatgacgaggacgaggaggtcatctccaagacagtgcctccagtggacattgtgttcgagcgggatatgctcacacagacctacgacctcattgagcgcagaggcacgaaaggaatttcccaagctgaaatccgagtggctatgaatgtgggaaaactagaagcaagaatgctgtgccgacttcttcaaagattcaaagttgtcaagggattcatggaagacgaaggtcggcagcgaaccaccaagtacatttcctgcgtgtttgcagaggagagcgacctaagccggcagtaccaaagagagaaggcccgcagcgagctcttgaccaccgtgagcctggcgtctatgcaggaggagtcgcttctgcctgaaggcgaggacaccttcctctctgagtcggacagtgaggaggagaggagcagcagcaagcggagaggcagagggtcccagaaagacacaagagcctctgcaaacctccggcccaagacccagcctcatcactccaccccaaccaagggtgggtggaaagttgtaaacctacacccattgaaaaagcagccgccctccttcccaggagctgctgaagagagagcctgccagagccttgccagcagggacagcctcttagataccagcagcgtctcagaacccaacgtgtcctttgtctcccactgtgcggacagcaacagtggtgacatagctgtgatcgaggaggtccggatggaaaacccaaaggagagtagcagttccctgaagactgggaggcacagctcaggccaagacaaaccacacgaaacttaccgactgctgaaacgcaggaatctgatcatagaagctgtcaccaatcttcgcttaatcgagagtttattcacgattcagaagatgatcatggatcaggagaagcaggaaggcgtgtccaccaagtgctgcaagaagtccattgtccgcttggtgcggaacctgtctgaggaaggtctcttgcgattgtatcggaccactgtcattcaagatggcatcaagaagaaggtggatctggtggtgcacccgtccatggaccagaacgaccctctagtgagaagtgccatcgagcaggtccgcttccggatctccaattcaagcacagccaacagggttaaaacttcccagcctccagtgccccaaggggaggcagaagaagacagtcaaggaaaagagggcccaagtggatcaggggactctcagctgagtgcttcctctagatcagaaagtggacggatgaaaaaaagtgataataaaatgggcataaccccgcttagaaattatcaccccattgtagttcccggactggggcgttctctaggatttctgcccaaaatgcctcgcctgcgggtggtccacatgtttctgtggtacctcatctacgggcaccctgccagcaacaccgtggagaagccaagcttcatcagtgaacggagaacgataaagcaggagtcaggcagggcaggcgtccggccgtcctcctctggaagtgcctgggaggcctgctctgaagccccatctaaaggcagccaagatggtgtcacctgggaggctgaagtggagcttgccacggagacagtgtatgtcgacgatgcctcgtggatgcgctacatccccccaatcccagtccacagggacttcggctttggctgggctctcgtcagcgacatcctcctctgccttcccctctccatcttcatccagattgtgcaagtcagctacaaggtggacaacctggaggaatttctgaacgacccgctgaagaagcacacgctgatccgctttctccccaggcccattcggcagcagcttctgtacaagaggcgttacattttttcggtggtggagaaccttcagaggctgtgctacatggggctgctacagtttggtcccacggaaaagtttcaggataaagatcaggtctttatcttcttgaagaagaatgcagtcattgttgacactaccatctgcgacccacattacaacctggcccgcagcagccggcccttcgagaggcgcctctatgtcctgaactcaatgcaggatgtggaaaactactggtttgacctgcagtgcgtctgcctcaacaccccactaggcgtggtgcgctgcccgcgcgtcaggaagaacagcagcacagaccagggcagcgacgaggagggcagcctgcagaaggagcaggagagcgccatggacaagcacaacctggagcgcaagtgcgccatgctggagtacaccactggaagccgtgaggtggtggatgaaggcttgatccctggagatgggctgggtgccgcagggctcgattccagcttctacggacacctcaagcgcaactggatctggaccagctacatcatcaaccaggccaaaaaggagaacactgccgcagagaatggactcacagtgaggctccagacatttctgtccaagcgcccaatgcccctcagtgccagaggcaacagcaggttgaatatttggggggaagcaagagtaggctccgagctctgtgctggctgggaagagcagtttgaggtggaccgagagccctcgctggaccgaaaccggagagtgaggggtgggaaaagccagaagcggaagcggctgaagaaggaccctgggaagaagatcaagagaaagaagaaaggagagttcccaggagaaaaaagcaaaaggctgcgctaccatgatgaagccgaccagagtgccctgcagcggatgacgcggcttcgtgtcacctggtctatgcaggaggatgggctgcttgtgctgtgccgcattgccagcaatgtcctcaacaccaaggtgaagggcccatttgtcacctggcaggtggtacgggacattttgcatgccacgtttgaagagtctttggataaaacatctcattccgttggacgaagagctcgctacatagtcaaaaacccacaggcctatctcaactataaagtgtgcctggccgaggtgtaccaggataaagcacttgttggagatttcatgaatcgaagaggtgactatgatgacccaaaggtttgtgccaacgagtttaaagaatttgtggagaagcttaaagaaaagttcagttcagccctaaggaattctaaccttgaaatcccagacacactccaggagctgttcgccaggtaccgagttttggcaattggggatgaaaaagatcaaaccaggaaagaggatgaacttaacagcgtggatgacatccactttctggtgcttcagaacctgatccagagcacgctggccctctcagacagtcagatgaagtcctaccagtcattccagactttccgcctctatcgggagtacaaggaccacgttcttgtgaaggccttcatggagtgccagaagaggagcttggtcaaccggcgccgggtcaaccacacgctgggccccaagaagaaccgggccctccccttcgtgccaatgtcctaccagctatcccagacctactacaggatttttacgtggcgatttccaagcaccatctgcacggagtcattccagtttttggacagaatgcgggctgccggcaagttggaccagcctgatcgtttctctttcaaagaccaggataataacgagcccacaaacgacatggtggccttttcactggacggccctggaggaaattgtgtggccgtcctgaccctcttctctctgggcctcatttctgtggatgtcaggatcccggagcagatcatcgtggtagacagctcaatggtggagaatgaggtcatcaaaagcttggggaaggacggcagcctggaggatgacgaggatgaagaggatgacttggacgaaggtgtagggggcaagcgccggagcatggaggtgaaacctgcgcaagcctcccacaccaactacctgctgatgaggggctactactcccccggcatcgtcagcacccgcaacctcaaccccaacgacagcattgtggtcaactcctgccagatgaagttccagctccgctgcacccctgtgcccgcccggctcaggcccgctgccgctcctctggaagagctaacaatgggaacctcctgcctccctgatacgttcaccaagctgataaacccccaggaaaacacctgcagcttggaggagtttgtcctccagctggagctgtctgggtatagtcccgaagacctgactgctgccttggagatcttggaagccattatagccacgggttgttttgggattgacaaggaggagctgcgcagacggttctcggccttggagaaggcaggtggtgggcgcaccaggacattcgcagattgcatccaggccctcctggagcagcatcaggtgctggaggtcggtggcaacactgcgcgcctggtagccatgggctctgcctggccttggctcctgcactccgtgcggctgaaagacagagaagacgccgacatccagagagaagacccccaggccagacccctggaggggtcttccagtgaggacagcccccccgaggggcaggcacctccttctcacagcccccggggcaccaagaggcgcgccagctgggccagtgagaatggggagaccgacgccgagggcacccagatgacccctgccaagaggccagcgctccaggactcaaatttggcccccagccttgggcccggagctgaagatggggcagaagcccaggccccatctccacccccagctcttgaagacaccgctgcagcgggagcagcacaggaagaccaagagggtgtcggtgagttcagttccccaggccaagagcagctgagcggccaggcgcagcctccagagggctctgaagaccccagagggttcacagagagtttcggagctgccaacatctcccaggcagcacgggaaagggactgtgagagtgtctgcttcatcggccggccgtggcgtgtcgtggatggccacctgaaccttcctgtatgcaagggtatgatggaggccatgctgtaccacatcatgaccaggcctggcatccccgagagctccctgctgcgccactaccagggggtcctgcagcccgtcgccgtgctggagttgctccagggcctggagtccctcggctgcatccggaagcgctggctgagaaagccaaggcctgtctcgctcttctctacacccgtggtggaagaggtggaagtgccctccagcctggacgagagccccatggctttctatgagcccaccttggactgtaccctccggctgggccgtgtgttcccccacgaggtcaactggaacaagtggatccacctctaggacccctgtgggcgtcccctccctcccagccaccgcctgccacaccactcctgcctggtgctcggcagaccccactgtgccctggccttgggtctgccgagcctcctgcagcaggggacgggtgctttggccagagtcacagactgacacgtttcccactgtactggaactctggaaagaggggctccccgacctgcccatcccccaggctcttctgggccttccccttgggaactggcctcatcacactgggagttggtgcttcttgtctctgggtctccagagtttgccccgcctgtgcacacctcacattccagactctagccatctcggcaggatctcctggctccttgagtgcccaggtgccaccaagaggaagggccttgtgggatacaccttgcagaatagggatcggtgtgccccgctgcgaggggccccccatgggggctgtggcccctccgcaggcaggacatcccaacccctggctgggactgaaccacccagagcggagcggctcccttttcagccttgtgagtcacctggcaggccccagctgggctggctgtccgtgtccctcagcctggctggtgattccttgcaggccagaaatgaagagtccctgtaggttttggttttgtttgttttattttgttctttcaccttttttcctcattaaaaaaaaaaagtccctgtggagtgtacttatttattttttgattaaagggaagtaaaatgcaaaaaaaaaaaaaaaaaa

SEQ ID NO: 118410 - DNA, 6330 bp, Artificial Sequence
  derived and/or modified sequence
atggatgcgctcgaatccctcttagacgaggtggctctggagggcctggacggcctctgtttgcccgcgctgtggagccgactcgaaacccgagtgcctccatttcccttacccctagagccctgtacgcaggagttcctgtggagagctcttgctacacaccccggtatctctttttacgaggagccgagggagagacccgacctgcaactgcaggataggtacgaagagattgacttggagaccggcattctggagagtaggcgcgatcccgtggcccttgaggatgtctacccaatccatatgattctcgagaacaaggatggaatccagggcagttgccgctactttaaggaacgcaagaatatcacgaacgacataagaacgaagtcattgcagccacggtgtactatggtggaggcttttgatcgatggggcaagaaattgattatcgtcgcatcgcaagcaatgagatatagggctctgatcggtcaggaaggtgaccccgatctgaaactacccgatttctcatactgcattctagagcgccttggccggtcgagatggcagggcgagctgcaaagagatttgcatacaactgccttcaaggtggatgcggggaaactgcactatcataggaagatactcaacaagaacggcctgatcaccatgcaatcacacgttatacgactcccaacaggagcacaacaacacagtatcctgctgcttctaaacagatttcatgtggatagacggagtaagtacgatatcttgatggagaagttgtcagttatgttatccacccggacaaatcatattgaaaccctgggtaaattgcgcgaggagctgggtctgtgcgagagaacctttaagcgactctaccaatacatgctgaatgcaggcctggcaaaggttgtgtccttgcggcttcaggaaatccaccccgaatgcggcccttgcaagacaaaaaaaggaaccgatgtcatggtgagatgtctcaagctgctcaaggagtttaaaaggaacgatcatgacgatgacgaagacgaggaggtcattagcaaaacagtgccacccgttgatattgtgttcgagcgggatatgcttactcagacctatgacctgatagagaggcgcggtactaagggcatatctcaagctgaaattagagtggctatgaacgtcggaaaactggaagccagaatgctgtgcagactgctgcagcgattcaaggttgtgaagggctttatggaggacgagggaaggcagagaacaacaaaatatatcagctgcgtgttcgccgaagagagtgacctctctcgacagtaccagcgggaaaaggctcgttcggagctgcttacaactgtgtctctagccagcatgcaggaagaatctctccttccagagggggaggacactttccttagtgagtcagatagcgaagaggagcgctcttcttctaaaaggcgcggccgggggagtcaaaaagacacacgcgcgtcagccaacctgcgtcctaaaacccagccccatcattctactcctaccaaaggtggctggaaggtggtgaacctccaccctctgaagaagcagcctccttcattccccggagcggccgaagagcgtgcctgtcagtctttagcttctagggattccctacttgacacctctagtgtttctgagcccaatgtgtccttcgtatcacattgcgctgactctaacagtggcgatatcgctgttatcgaagaagttagaatggagaatccaaaagagtcctcgtcaagtctgaaaactggcaggcactcaagcggtcaggacaaaccgcatgagacatacagactgctgaaacgtaggaatctgattatcgaagcagtgacaaatcttcgattaatcgaatccctcttcacaatccaaaagatgattatggaccaggaaaagcaggagggagtgagcactaagtgctgcaagaaatccattgttcggctggtgcgtaatctcagtgaggaagggctcctgcgcctgtacaggaccactgttatccaggatgggatcaagaagaaagttgatctggtggtgcatccatctatggatcaaaacgatccgctggtcaggagcgctattgagcaggtgcggttcaggatctctaactcctccacagccaaccgagtgaaaaccagccagccaccagtgccccagggcgaagcagaggaagacagccagggtaaggagggtccctcagggagcggggattcgcaactctctgctagttccaggtctgagagcggcaggatgaagaaaagcgataataaaatgggtataacaccgctccgcaattaccacccaatcgtggtgccaggccttggcagaagccttggattcttaccaaagatgccgcgattgagggtcgtgcacatgtttctgtggtacctcatatacggccatcccgcatccaacactgtcgagaaacctagcttcatttccgagaggagaacgatcaagcaggagtccggacgggccggcgtccgccctagctcatctggcagtgcatgggaggcctgctctgaagcaccaagcaagggatcccaggacggggtgacttgggaagccgaggtcgaactggccacggagaccgtctacgttgacgacgcttcgtggatgcggtatatcccacccatcccagtacaccgagacttcgggttcggatgggctttggtttctgacattttactttgtctaccgcttagtattttcatccaaatcgtccaggtgtcttacaaggtggacaatttagaagagtttctgaacgaccccctgaagaagcatacgctaatccggttcctcccgaggcctatccgtcagcaattgctctacaaaagaaggtatatcttcagcgtagtggagaaccttcagagactgtgttatatgggcctcctgcaattcgggccgacagaaaagttccaggacaaggatcaggtcttcatcttcctgaagaaaaacgcagttattgtagacaccacgatctgtgacccgcattacaatcttgcacgctcctctcggccatttgagagacgattgtacgtactgaactctatgcaggacgttgaaaattactggttcgacctacagtgcgtctgcttaaatacccccctcggagtagtgcgttgcccccgagtgcggaagaatagctccactgaccaaggatccgatgaggagggaagtctgcaaaaagaacaagaaagcgctatggataaacataaccttgaacgcaagtgcgcaatgcttgaatacactacggggagtcgcgaggttgtcgatgagggcttgatccctggcgatggcctaggcgccgctggtctcgactcttctttttacgggcacctgaaacgaaactggatatggactagctacattattaaccaggctaagaaagagaataccgcagccgaaaatggtttgacggtgcggctgcagaccttcttgtctaagcggcctatgcccttgtctgcaagaggaaactcgcggctgaatatctggggggaggcccgggtgggatccgaactttgtgcaggctgggaggagcagttcgaagtggatagagaacccagccttgatagaaataggcgggtccggggcggcaagtcacaaaagaggaagcgcctaaagaaagatcctggaaaaaaaattaagcgcaagaaaaaaggggaatttcctggggagaaatccaaaaggctgagataccacgatgaagcagaccaatctgcgcttcagaggatgactcgcctgcgggtgacgtggtcaatgcaggaggacggtctacttgtattgtgtcgtatagctagtaatgtgctgaatactaaggtgaagggacccttcgtgacttggcaagtggtgagggatatccttcatgctacatttgaagagtcactggataaaacgtcacactctgtggggcgtagggcgcgatatattgtgaagaacccacaggcttacctgaattacaaagtatgcctggcagaagtttatcaggacaaggccctggtgggcgatttcatgaaccgtcgaggggactacgatgaccccaaggtctgtgcaaacgagttcaaggagtttgtagagaagttgaaagagaagttctcgtcggcgctccggaactcaaatctagagatccctgacaccctgcaggaactgttcgccaggtatcgcgtgctagcgatcggtgatgaaaaagatcagacacgaaaggaagacgaattaaattccgtcgatgatatccactttctggttctgcagaacctgatacagtccacactcgctctgagcgactcccaaatgaaatcctatcagtctttccagactttccggctgtatcgtgagtacaaggaccacgtccttgtcaaggctttcatggagtgtcagaaacgcagcctggtcaaccgtagacgggtgaatcatactctgggccccaagaaaaacagagccctgccttttgttcccatgagctatcagctgtcccagacttattaccgcattttcacctggaggtttcctagtaccatttgtactgagtcatttcaatttttggatcgaatgcgcgctgccgggaagcttgatcagccagatcgatttagctttaaagatcaggacaacaatgagccaaccaacgacatggttgcattcagtttagatggccccggcggcaattgcgtggctgttctgaccctgttcagcttaggtttaatctcagtcgatgtgcgaatacctgagcaaattatcgtagtggatagctctatggtggaaaacgaagtcattaagtcccttggaaaggatggctctttggaggacgacgaagatgaagaggatgatctcgacgagggagtggggggcaagaggcgaagcatggaagttaaacccgcccaggccagccacaccaattatctgctcatgaggggttactactccccgggcatagtgtctacacggaatctgaaccccaacgattccatcgtggtgaatagctgtcaaatgaaattccaactcagatgcacgccggtgccagcacgtttacgacccgcagccgccccactggaagagttgactatgggaacgagctgcctgccagacacctttacaaaactcataaacccccaggagaacacctgttccctagaggagttcgtacttcagctagaactgtctggttattcaccagaagacctgaccgctgccttagaaatcctggaagctataatcgccaccggatgtttcgggatagacaaggaggagcttcgaaggcgcttttccgccctggagaaagctggagggggcagaacacgcactttcgctgactgtatccaggctctccttgaacaacatcaagttttagaagtaggtgggaacacagctcgcctggttgccatggggagtgcttggccctggctgcttcactccgttagattaaaggatcgtgaggatgccgacattcagcgagaggatccgcaggccagaccccttgaggggtcatcatcagaagactctcctccagagggccaggcccccccttcacattctcctagaggcactaagagacgcgccagttgggccagtgagaacggtgaaaccgacgcggaaggcacgcagatgaccccagctaagagaccggccctgcaggatagtaacctggccccctctttgggacctggggccgaggacggggcagaagcgcaagccccaagtccccctccagcccttgaggacacagcggcagcaggcgccgcccaagaagaccaggaaggggtaggggagttcagcagcccgggccaagagcaactgtcgggacaggcccagcctcctgagggctccgaggaccccagaggcttcactgagtctttcggcgccgccaatatctctcaagcggctcgggagcgggactgtgaatcggtgtgcttcattggtaggccatggagagtggtggatggccatttaaatctgcctgtctgcaaaggtatgatggaagcaatgctgtatcatattatgaccagacctggcatcccggagtcctccctactgcgccactatcagggcgtccttcagcccgttgctgtgcttgaactgctacagggattagagtcacttggctgcatccggaaacgatggcttagaaaacctaggcccgtgtcccttttttctacacctgtggtggaggaggtggaagtgcccagtagtctggacgaaagtcccatggccttttacgagccaacattagattgtactctccgactcggtcgggtgttcccccacgaagtaaactggaacaaatggatacatctgtag

SEQ ID NO: 118411 - DNA, 5064 bp, Artificial Sequence
  derived and/or modified sequence
atggatgcactggagtctctgctggatgaggtggccctggagggtctggatgggctgtgtctgccagcattatggagcaggctcgagacaagagtccctccattcccgttacctctggagccttgtacccaggaattcctttggagagccctggctacccatccgggtatctcattttacgaagagcctcgagagcggcctgacctacaattgcaagaccggtacgaggagatcgaccttgagaccggtatcctcgagtctagacgggaccccgtggcccttgaggacgtctaccccatccacatgatcctcgagaacaaggatggaatccaagggagctgtagatactttaaggaaaggaagaacatcaccaacgacatcagaaccaagagtcttcagccaaggtgcactatggtggaggcttttgataggtggggaaagaagctgatcatctgcctgccaggacacgccgtacagggtctagaccgccccggtggcgggagccgccccgaagctgcccggttactactgctacacccgggcaccgctcggcctgtgcagcagggggagttacaacgggatctccataccactgcctttaaagttgatgctggaaaactgcactaccatagaaagatcctgaataaaaatgggctgatcaccatgcagagccacgtaattcgtctccccactggagctcagcagcacagcatacttctgctcctgaatcgctttcacgtcgataggcgctcaaagtatgatatcttaatggaaaagctttctgttatgctgtcaaccagaactaatcacatcgagaccctcgggaaactccgggaggaactgggactgtgtgaacggaccttcaaacgcctgtaccagtatatgctcaatgccggtcttgccaaggtggtttccctgaggctgcaggagatccacccagagtgcggtccgtgtaaaactaagaagggtacagatgtgatggtgagatgtctaaagcttctaaaggaattcaagaggaacgaccatgacgatgacgaagacgaagaggtaatctcaaagaccgttccacccgtagatattgtgttcgagagagacatgctgacccagacttatgatctgatagaaagacgcggtacgaaaggaatttcccaggccgaaatcagggtggcaatgaatgtgggcaagctggaggccagaatgctgtgccgcctgttgcagaggttcaaggtggtgaaaggatttatggaggacgagggccgccagcgcacaaccaaatatatcagctgtgtctttgccgaagagagtgacctaagtagacagtatcaacgggaaaaggcaaggtcagagttactgaccactgtttcacttgcttctatgcaggaggaatctttactaccagagggggaggatacgtttttatccgagagtgattccgaagaagaacgcagtagctcaaagaggaggggtcgggggagccagaaggacacacgcgccagcgccaacctgaggccgaagacacagccgcaccacagtaccccaaccaagggcggctggaaagtggtgaaccttcatccactgaagaaacagcctccttcgttcccgggtgccgccgaggagagagcgtgtcagagtcttgcaagccgtgattcacttctggacacctcctcagtgagcgaacccaatgtatcttttgttagtcactgcgctgattctaatagcggagatattgctgtgatcgaagaggttagaatggaaaacccaaaggaaagctccagctccctgaagacggggcgccacagcagcggacaggataagccgcatgaaacttatcgccttctaaagcgcaggaacctgatcatcgaagctgtgacaaatcttaggctgatcgagtcactcttcacgatccaaaagatgattatggaccaggaaaaacaagaaggtgtgagcacaaaatgctgtaagaagtcgattgttcgcctcgtgaggaacctctctgaagagggtctgttgaggctttatcgtacaacggttatccaagatggtatcaaaaagaaggttgatctagtggtgcatccatcgatggaccagaacgaccccttggtgcgatctgcaatagagcaggttcgatttcggatctctaactcatctacggctaaccgagtgaaaacttctcagcccccagtgccacagggcgaagctgaggaagacagccagggcaaagaaggacctagcggctctggtgacagccagctgtcggccagcagtcgctctgagagtggacgtatgaaaaaaagcgacaacaaaatgggaataacccctctgcggaactaccacccaatcgtcgttcctggtctggggaggagcctcggttttctcccaaagatgcccagattgcgggtcgttcacatgttcctttggtatctcatctacggccacccagcgtccaacactgtagagaaaccgtccttcatttccgagcgcaggactataaagcaagaaagcgggcgtgcgggtgtccgcccttcgtcaagtggatctgcgtgggaagcctgtagcgaagctcctagcaagggctcacaagacggagtcacatgggaagcagaggtcgaattagccacagagacggtctatgtcgacgatgcttcatggatgagatacataccaccgatccctgtgcaccgcgactttgggtttggttgggcccttgtgagcgatatcctgttgtgcctgcctctcagcattttcattcagattgttcaggttagctacaaagtggataacctcgaagagtttctgaacgacccattaaagaagcacactctgatccggttcttgcctcggccaatcagacagcaattactctataagagacgctacatattcagcgtggtcgagaaccttcagagactgtgttacatgggtctgcttcaatttggccccaccgagaagtttcaggataaggaccaggtcttcatcttcctgaagaaaaacgccgtcattgttgataccactatctgtgatcctcactacaatttggccaggtccagtcgtccattcgagcgccgattatacgtgctaaactctatgcaggatgttgaaaactactggtttgatctccagtgcgtgtgtctcaataccccgctgggagtggtccgctgccctcgcgtccgcaaaaactcgtcgaccgaccagggaagcgacgaggaggggtccctgcaaaaggaacaggagtctgccatggacaagcacaatcttgaacgcaaatgcgcaatgttagagtacacaacaggctctcgcgaagttgtggacgaaggtcttatccccggtgatgggctcggcgcaggctctatccccgcttccaccgacacatcttccgccaccgggagtggacctgctacatccagcacacggccaaaaaggcgaactttacctcaacgaatggacaccgtccgactgcagacatttctttcaaaaaggccaatgccactgagcgctagaggaaattcacgcctcaacatttggggtgaagcccgcgtaggtagtgagctatgcgctgggtgggaggaacagtttgaggtggacagggaaccgtctctagaccgaaaccggcgcgtgagaggaggtaaatctcaaaaaagaaagcgtttgaagaaagacccagggaagaagatcaagaggaaaaagaaaggggagttcccaggcgagaagtccaaaagattgcgctatcatgacgaagcagaccaatccgcactgcagcgcatgacgaggctgcgtgtgacctggtccatgcaggaagacggactattggtattgtgcagaatcgcatctaacgtgttgaacaccaaagtcaagggaccatttgttacctggcaggttgtgagagacattctccatgcaacattcgaagaaagcctggacaagactagtcactctgtgggcaggcgtgcccggtatatcgtgaagaacccgcaggcttatttgaattacaaggtgtgtttagctgaagtgtaccaggataaagctttggtaggcgattttatgaacaggaggggagactacgacgatccgaaagtctgcgcgaatgagttcaaggagttcgttgaaaaattaaaggaaaaattctctagcgccctgcgcaacagcaaccttgaaatccctgatactctgcaagagctgttcgcccgatatagggtgctggccatcggggatgaaaaggaccagacgaggaaagaggatgaactgaactctgtagacgatattcacttcctcgttctgcagaatctgatccagagtacactggcactgtctgactcacaaatgaagtcatatcagtccttccagacctttagactttatcgtgaatacaaagaccacgtcctagtcaaggcatttatggagtgtcagaagagatctctagtgaataggaggcgggtgaatcatacactgggacccaagaagaatcgcgccctgccctttgtgcctatgtcatatcaattgagtcagacttactacaggattttcacatggcgtttcccctctactatttgcaccgagagctttcaatttctggatcgaatgagggcagccggtaagctggaccagccggacaggttttcatttaaggaccaagacaacaatgagccaaccaatgacatggtcgccttcagtctggacggtcccggtgggaactgcgtcgcagtcctcacgttattttctctgggactcatttcagtcgacgttagaatcccagaacagatcattgtggtcgattcaagtatggtcgagaatgaagttattaaatcactgggtaaagacggaagtctcgaagacgatgaggacgaggaagatgatctggacgaaggcgtcgggggcaagcggcgctctatggaagtcaagcccgcccaggccagtcacaccaattacctcctgatgcgcggatactatagcccgggcatcgttagcacgagaaacctgaaccccaatgactctatcgttgttaattcttgtcagatgaagtttcaactacgatgtacaccggttccagcaaggcttagacccgcctag

SEQ ID NO: 118412 - DNA, 6330 bp, Artificial Sequence
  derived and/or modified sequence
atggatgccctggagagcctgctggatgaggtggccctggagggcctggatggcctgtgcctgcctgccctgtggagccggctggagaccagggtgccccccttccccctgcccctggagccctgcacccaggagttcctgtggagggccctggccacccaccctggcatctccttctatgaggagccccgggagaggccagacctgcagctgcaggacagatatgaggagattgacctggagaccggcatcctggagagccggcgggaccctgtggccctggaggatgtgtaccccatccacatgatcctggagaacaaggatggcatccagggcagctgccgctacttcaaggagaggaagaacatcaccaatgacatccgcaccaagagcctgcagccccgctgcaccatggtggaggcctttgaccgctggggcaagaagctgatcatcgtggccagccaggccatgagataccgggccctgattggccaggagggggaccctgacctgaagctgcctgacttctcctactgcatcctggagcggctgggccgcagccgctggcagggcgagctgcagagggacctgcacaccacagccttcaaggtggatgctgggaagctgcactaccacaggaagatcctgaacaagaatggcctcatcaccatgcagagccacgtgatccggctgcccactggagcccagcagcacagcatcctgctgctgctgaaccgcttccacgtggacagaagaagcaaatatgacatcctgatggagaagctgtctgtgatgctgagcaccaggaccaaccacatcgagaccctgggcaagctgcgggaggagctgggcctgtgtgagaggaccttcaagaggctgtaccagtacatgctgaatgccggcctggccaaggtggtgtccctgcggctgcaggagatccacccagaatgtggcccctgcaagaccaagaagggcacagatgtgatggtgcgctgcctgaagctgctgaaggagttcaagagaaatgaccatgatgatgatgaagatgaggaggtgatcagcaagacagtgccccctgtggacatcgtgtttgagcgggacatgctgacccagacctatgacctgattgaaagaagaggcaccaagggcatcagccaggccgagatccgggtggccatgaatgtgggcaagctggaggccaggatgctgtgccgcctgctgcagcgcttcaaggtggtgaagggcttcatggaggatgagggccggcagaggaccaccaagtacatcagctgtgtgtttgctgaggagagtgacctgagccggcagtaccagcgggagaaggcccggtctgagctgctgaccaccgtgtccctggcctccatgcaggaggagagcctgctgcctgaaggagaggacaccttcctgtctgagagtgacagcgaggaggagaggagcagcagcaagagaagaggccggggcagccagaaggacacccgggccagcgccaacctgcggcccaagacccagccccaccacagcacccccaccaagggcggctggaaggtggtgaacctgcaccccctgaagaagcagccccccagcttccctggagctgctgaggagcgggcctgccagagcctggccagccgggacagcctgctggacaccagctctgtgtctgagcccaacgtgtcctttgtgagccactgtgccgacagcaacagcggggacattgctgtgattgaggaggtgaggatggagaaccccaaggagagcagcagcagcctgaagacaggccgccacagcagcggccaggacaagccccatgagacctaccgcctgctgaagagaagaaacctgatcatcgaggccgtgaccaacctgcggctgattgagagcctcttcaccatccagaagatgatcatggaccaggagaagcaggagggcgtgtccaccaagtgctgcaagaagagcatcgtgcggctggtgaggaacctgtctgaggagggcctgctgcggctgtaccgcaccaccgtcatccaggacggcatcaagaagaaggtggacctggtggtgcaccccagcatggaccagaatgaccccctggtgcgcagcgccatcgagcaggtgcgcttccgcatcagcaacagcagcacagccaacagagtgaagaccagccagccccctgtgccccagggcgaggccgaggaggacagccagggcaaggagggccccagcggcagcggggacagccagctgagcgccagcagccgctctgagagcggccgcatgaagaagagtgacaacaagatgggcatcacccccctgaggaactaccaccccatcgtggtgcccggcctgggccgcagcctgggcttcctgcccaagatgccccggctgcgggtggtgcacatgttcctgtggtacctgatctacggccacccagccagcaacacagtggagaagcccagcttcatcagcgagaggaggaccatcaagcaggagagcggccgggccggcgtgcggcccagcagcagcggcagcgcctgggaggcctgcagcgaggcccccagcaagggcagccaggatggagtgacctgggaggccgaggtggagctggccacagaaacagtgtatgtggatgatgcctcctggatgagatacatcccccccatccctgtgcaccgggactttggcttcggctgggccctggtgtctgacatcctgctgtgcctgcccctgagcatcttcatccagatcgtgcaggtgtcctacaaggtggacaacctggaggagttcctgaatgaccccctgaagaagcacaccctcatccgcttcctgccccggcccatccggcagcagctgctgtacaagaggcgctacatcttctctgtggtggagaacctgcagaggctgtgctacatgggcctgctgcagtttggccccacagagaagttccaggacaaggaccaggtgttcatcttcctgaagaagaatgctgtgattgtggacaccaccatctgtgacccccactacaacctggcccggagcagccggccctttgaaagaaggctgtatgtgctgaacagcatgcaggatgtggagaactactggtttgacctgcagtgtgtgtgcctgaacacccccctgggcgtggtgcgctgcccccgggtgaggaagaacagcagcacagaccagggcagtgatgaggagggcagcctgcagaaggagcaggagagcgccatggacaagcacaacctggagaggaaatgtgccatgctggagtacaccaccggcagccgggaggtggtggatgagggcctcatccctggagatggcctgggcgctgctggcctggacagcagcttctacggccacctgaagaggaactggatctggaccagctacatcatcaaccaggccaagaaggagaacacagctgctgaaaatggcctgactgtgcggctgcagaccttcctgagcaagaggcccatgcccctgagcgcccggggcaacagccggctgaacatctggggcgaggcccgggtgggcagcgagctgtgtgccggctgggaggagcagtttgaggtggaccgggagcccagcctggacaggaacagaagagtgcggggcggcaagagccagaagaggaagaggctgaagaaggaccccgggaagaagatcaagaggaagaagaagggggagttccctggagagaagagcaagaggctgcgctaccatgatgaggccgaccagagcgccctgcagaggatgacccggctgcgggtgacctggagcatgcaggaggatggcctgctggtgctgtgccgcatcgccagcaatgtgctgaacaccaaggtgaagggcccctttgtgacctggcaggtggtgcgggacatcctgcacgccacctttgaggagagcctggacaagaccagccacagcgtgggccggcgggcccgctacatcgtgaagaacccccaggcctacctgaactacaaggtgtgcctggccgaggtgtaccaggacaaggccctggtgggggacttcatgaacagaagaggagactatgatgaccccaaggtgtgtgccaatgagttcaaggagtttgtggagaagctgaaggagaagttcagcagcgccctgaggaacagcaacctggagatcccagacaccctgcaggagctgtttgcccgctacagagtgctggccatcggagatgagaaggaccagaccaggaaagaagatgagctgaacagcgtggatgacatccacttcctggtgctgcagaacctgatccagagcaccctggccctgagtgacagccagatgaagagctaccagagcttccagaccttccggctgtaccgggagtacaaggaccacgtgctggtgaaggccttcatggagtgccagaagaggagcctggtgaacagaagaagagtgaaccacaccctgggccccaagaagaacagagccctgccctttgtgcccatgagctaccagctgagccagacctactaccgcatcttcacctggaggttccccagcaccatctgcacagagagcttccagttcctggacaggatgagagctgctgggaagctggaccagcctgaccgcttctccttcaaggaccaggacaacaatgagcccaccaatgacatggtggccttcagcctggatggccctgggggcaactgtgtggccgtgctgaccctcttcagcctgggcctcatctctgtggatgtgcgcatccctgagcagatcatcgtggtggacagctccatggtggagaatgaggtgatcaagagcctgggcaaggatggcagcctggaggatgatgaagatgaagaagatgacctggatgaaggagtgggcggcaagaggaggtccatggaggtgaagccagcccaggccagccacaccaactacctgctgatgaggggctactacagccctggcatcgtgtccaccaggaacctgaaccccaatgacagcatcgtggtgaacagctgccagatgaagttccagctgcgctgcacccctgtgcctgcccggctgcggcctgctgctgcccccctggaggagctgaccatgggcaccagctgcctgcctgacaccttcaccaagctgatcaacccccaggagaacacctgcagcctggaggagtttgtgctgcagctggagctgagcggctacagccctgaggacctgacagctgccctggagatcctggaggccatcatcgccaccggctgctttggaattgacaaggaggagctgcggcggcgcttcagcgccctggagaaggccggcggcggccgcaccaggacctttgctgactgcatccaggccctgctggagcagcaccaggtgctggaggtgggcggcaacacagcccggctggtggccatgggcagcgcctggccctggctgctgcacagcgtgcggctgaaggacagagaagatgctgacatccagcgggaggacccccaggcccggcccctggagggcagcagcagcgaggacagccccccagagggccaggccccacccagccacagcccccggggcaccaagaggcgggcctcctgggcctctgaaaatggagaaacagatgctgagggcacccagatgaccccagccaagaggcctgccctgcaggacagcaacctggcccccagcctgggccctggagcagaagatggagctgaggcccaggcccccagccccccaccagccctggaggacacagctgctgctggggccgcccaggaggaccaggagggcgtgggggagttcagcagccctggccaggagcagctgagcggccaggcccagcccccagagggcagcgaggacccccggggcttcacagagagctttggagctgccaacatcagccaggccgcccgggagcgggactgtgagagcgtgtgcttcatcggccggccctggagggtggtggatggccacctgaacctgcctgtgtgcaagggcatgatggaggccatgctgtaccacatcatgacccggcccggcatccctgagagcagcctgctgcggcactaccagggcgtgctgcagcctgtggccgtgctggagctgctgcagggcctggagagcctgggctgcatcaggaagcgctggctgaggaagcccaggcctgtgtccctcttcagcacccctgtggtggaggaggtggaggtgcccagcagcctggatgagagccccatggccttctatgagcccaccctggactgcaccctgcggctgggccgggtcttcccccatgaggtgaactggaacaagtggatccacctgtag

SEQ ID NO: 118413 - DNA, 5064 bp, Artificial Sequence
  derived and/or modified sequence
atggatgccctggagagcctgctggatgaggtggccctggagggcctggatggcctgtgcctgcctgccctgtggagccggctggagaccagggtgccccccttccccctgcccctggagccctgcacccaggagttcctgtggagggccctggccacccaccctggcatctccttctatgaggagccccgggagaggccagacctgcagctgcaggacagatatgaggagattgacctggagaccggcatcctggagagccggcgggaccctgtggccctggaggatgtgtaccccatccacatgatcctggagaacaaggatggcatccagggcagctgccgctacttcaaggagaggaagaacatcaccaatgacatccgcaccaagagcctgcagccccgctgcaccatggtggaggcctttgaccgctggggcaagaagctgatcatctgcctgcccggccatgctgtgcagggcctggacaggcctgggggcggcagcaggcctgaggccgcccggctgctgctgctgcaccctggaacagcccggcctgtgcagcagggcgagctgcagagggacctgcacaccacagccttcaaggtggatgctgggaagctgcactaccacaggaagatcctgaacaagaatggcctcatcaccatgcagagccacgtgatccggctgcccactggagcccagcagcacagcatcctgctgctgctgaaccgcttccacgtggacagaagaagcaaatatgacatcctgatggagaagctgtctgtgatgctgagcaccaggaccaaccacatcgagaccctgggcaagctgcgggaggagctgggcctgtgtgagaggaccttcaagaggctgtaccagtacatgctgaatgccggcctggccaaggtggtgtccctgcggctgcaggagatccacccagaatgtggcccctgcaagaccaagaagggcacagatgtgatggtgcgctgcctgaagctgctgaaggagttcaagagaaatgaccatgatgatgatgaagatgaggaggtgatcagcaagacagtgccccctgtggacatcgtgtttgagcgggacatgctgacccagacctatgacctgattgaaagaagaggcaccaagggcatcagccaggccgagatccgggtggccatgaatgtgggcaagctggaggccaggatgctgtgccgcctgctgcagcgcttcaaggtggtgaagggcttcatggaggatgagggccggcagaggaccaccaagtacatcagctgtgtgtttgctgaggagagtgacctgagccggcagtaccagcgggagaaggcccggtctgagctgctgaccaccgtgtccctggcctccatgcaggaggagagcctgctgcctgaaggagaggacaccttcctgtctgagagtgacagcgaggaggagaggagcagcagcaagagaagaggccggggcagccagaaggacacccgggccagcgccaacctgcggcccaagacccagccccaccacagcacccccaccaagggcggctggaaggtggtgaacctgcaccccctgaagaagcagccccccagcttccctggagctgctgaggagcgggcctgccagagcctggccagccgggacagcctgctggacaccagctctgtgtctgagcccaacgtgtcctttgtgagccactgtgccgacagcaacagcggggacattgctgtgattgaggaggtgaggatggagaaccccaaggagagcagcagcagcctgaagacaggccgccacagcagcggccaggacaagccccatgagacctaccgcctgctgaagagaagaaacctgatcatcgaggccgtgaccaacctgcggctgattgagagcctcttcaccatccagaagatgatcatggaccaggagaagcaggagggcgtgtccaccaagtgctgcaagaagagcatcgtgcggctggtgaggaacctgtctgaggagggcctgctgcggctgtaccgcaccaccgtcatccaggacggcatcaagaagaaggtggacctggtggtgcaccccagcatggaccagaatgaccccctggtgcgcagcgccatcgagcaggtgcgcttccgcatcagcaacagcagcacagccaacagagtgaagaccagccagccccctgtgccccagggcgaggccgaggaggacagccagggcaaggagggccccagcggcagcggggacagccagctgagcgccagcagccgctctgagagcggccgcatgaagaagagtgacaacaagatgggcatcacccccctgaggaactaccaccccatcgtggtgcccggcctgggccgcagcctgggcttcctgcccaagatgccccggctgcgggtggtgcacatgttcctgtggtacctgatctacggccacccagccagcaacacagtggagaagcccagcttcatcagcgagaggaggaccatcaagcaggagagcggccgggccggcgtgcggcccagcagcagcggcagcgcctgggaggcctgcagcgaggcccccagcaagggcagccaggatggagtgacctgggaggccgaggtggagctggccacagaaacagtgtatgtggatgatgcctcctggatgagatacatcccccccatccctgtgcaccgggactttggcttcggctgggccctggtgtctgacatcctgctgtgcctgcccctgagcatcttcatccagatcgtgcaggtgtcctacaaggtggacaacctggaggagttcctgaatgaccccctgaagaagcacaccctcatccgcttcctgccccggcccatccggcagcagctgctgtacaagaggcgctacatcttctctgtggtggagaacctgcagaggctgtgctacatgggcctgctgcagtttggccccacagagaagttccaggacaaggaccaggtgttcatcttcctgaagaagaatgctgtgattgtggacaccaccatctgtgacccccactacaacctggcccggagcagccggccctttgaaagaaggctgtatgtgctgaacagcatgcaggatgtggagaactactggtttgacctgcagtgtgtgtgcctgaacacccccctgggcgtggtgcgctgcccccgggtgaggaagaacagcagcacagaccagggcagtgatgaggagggcagcctgcagaaggagcaggagagcgccatggacaagcacaacctggagaggaaatgtgccatgctggagtacaccaccggcagccgggaggtggtggatgagggcctcatccctggagatggcctgggcgccggcagcatcccagccagcacagacaccagcagcgccactggaagtggccctgccaccagcagcacccggcccaagaggaggaccctgccccagaggatggacacagtgcggctgcagaccttcctgagcaagaggcccatgcccctgagcgcccggggcaacagccggctgaacatctggggcgaggcccgggtgggcagcgagctgtgtgccggctgggaggagcagtttgaggtggaccgggagcccagcctggacaggaacagaagagtgcggggcggcaagagccagaagaggaagaggctgaagaaggaccccgggaagaagatcaagaggaagaagaagggggagttccctggagagaagagcaagaggctgcgctaccatgatgaggccgaccagagcgccctgcagaggatgacccggctgcgggtgacctggagcatgcaggaggatggcctgctggtgctgtgccgcatcgccagcaatgtgctgaacaccaaggtgaagggcccctttgtgacctggcaggtggtgcgggacatcctgcacgccacctttgaggagagcctggacaagaccagccacagcgtgggccggcgggcccgctacatcgtgaagaacccccaggcctacctgaactacaaggtgtgcctggccgaggtgtaccaggacaaggccctggtgggggacttcatgaacagaagaggagactatgatgaccccaaggtgtgtgccaatgagttcaaggagtttgtggagaagctgaaggagaagttcagcagcgccctgaggaacagcaacctggagatcccagacaccctgcaggagctgtttgcccgctacagagtgctggccatcggagatgagaaggaccagaccaggaaagaagatgagctgaacagcgtggatgacatccacttcctggtgctgcagaacctgatccagagcaccctggccctgagtgacagccagatgaagagctaccagagcttccagaccttccggctgtaccgggagtacaaggaccacgtgctggtgaaggccttcatggagtgccagaagaggagcctggtgaacagaagaagagtgaaccacaccctgggccccaagaagaacagagccctgccctttgtgcccatgagctaccagctgagccagacctactaccgcatcttcacctggaggttccccagcaccatctgcacagagagcttccagttcctggacaggatgagagctgctgggaagctggaccagcctgaccgcttctccttcaaggaccaggacaacaatgagcccaccaatgacatggtggccttcagcctggatggccctgggggcaactgtgtggccgtgctgaccctcttcagcctgggcctcatctctgtggatgtgcgcatccctgagcagatcatcgtggtggacagctccatggtggagaatgaggtgatcaagagcctgggcaaggatggcagcctggaggatgatgaagatgaagaagatgacctggatgaaggagtgggcggcaagaggaggtccatggaggtgaagccagcccaggccagccacaccaactacctgctgatgaggggctactacagccctggcatcgtgtccaccaggaacctgaaccccaatgacagcatcgtggtgaacagctgccagatgaagttccagctgcgctgcacccctgtgcctgcccggctgcggcctgcctag

SEQ ID NO: 118414 - DNA, 6330 bp, Artificial Sequence
  derived and/or modified sequence
atggacgccctggagagcctgctggacgaggtggccctggagggccttgacggcttgtgtctgcctgctctgtggagtcgcttggaaacacgagttcctccttttccactgccgcttgagccctgcacccaggagttcctctggagggccctggcaacacatccgggaattagcttctacgaggagcctcgtgagagacccgacttgcagctccaggataggtatgaagagattgatctggagaccgggatcctcgaatcccgcagggatcccgtcgcactggaggatgtgtatcccatccacatgatccttgaaaacaaagacggcatccagggtagctgtagatacttcaaggaaaggaagaacattactaacgacattcgaactaagtccctgcagccccgctgtacgatggtcgaggcctttgatcgatggggcaaaaaactcatcattgtggcaagccaggcgatgagatacagggccctaattggccaggaaggagacccagatcttaaattaccagatttctcctattgtatcctggagcgccttgggcggagcagatggcaaggagaattgcagagagacttacacaccaccgcttttaaggttgacgcggggaagctgcattatcaccgtaaaatcctcaataagaacggactgattactatgcaatcccacgtgatccgcctgcctacgggagcccagcagcattctatccttctactccttaacaggttccacgttgataggcggagcaaatacgatattcttatggaaaagctgagcgtgatgttatccactagaaccaatcacattgaaactttaggcaaattaagagaagagcttggtctgtgcgaacgcacttttaagcggctttaccagtatatgcttaatgcgggattggcaaaggtggtgagtctgcgcctacaggaaatccaccccgagtgcggtccttgtaagactaagaagggcactgacgttatggtgcggtgtttgaagcttctcaaggagtttaagaggaacgaccacgatgatgatgaggatgaagaagttatctccaaaactgtgccgcccgtagacatagtgttcgaaagggatatgctgactcagacatacgacctgatcgaaagacgcgggaccaaaggcattagccaggcagagatcagggtcgcaatgaacgtgggaaagctcgaagccaggatgttgtgtagactgttacagcgttttaaggtggtgaagggctttatggaggacgagggaaggcagcgcaccaccaaatatatctcatgcgtgtttgccgaggagtcagacctcagccgacagtaccaaagagaaaaggcacggtccgaactgttgactacagtcagtcttgccagtatgcaggaagagtctctgcttccggagggggaagatacgtttctaagcgaaagcgactcagaggaggagcgctcttcctccaaaaggcgtggtcgaggttcgcaaaaggacactcgtgctagcgctaacctcaggcctaaaacacagccacaccatagtactccgacaaagggcggttggaaagttgtcaatctccacccactgaaaaagcagccacccagtttcccaggtgccgcagaagagagagcttgtcagtctctggcttcgagggattccttgttggacacctcgtccgttagtgagcccaacgtgtcctttgtctcacattgtgctgactcaaattccggcgacatcgccgtcattgaagaagtgagaatggagaaccctaaagaaagcagttccagcctcaaaacggggagacatagttccggtcaagataagccgcatgaaacttacaggctgctgaagaggcgcaatctaatcatagaggctgtgacaaatttgcgtctcatcgagagtctgttcaccatccaaaaaatgattatggatcaggagaagcaggagggtgtgagcaccaagtgttgcaagaaaagcatagttcggctagttaggaatctttccgaggaggggttgctaagactttatcgaaccacagtcatccaagacgggataaaaaagaaggtggatctggtggtacatccatcgatggaccagaacgaccccttggttcgctccgcgattgagcaggtcagattccgcatctcaaatagctcgaccgcaaacagagtgaagacctctcagccacccgtccctcagggagaggcagaagaggactcgcagggaaaggaaggcccgtccggatcaggtgattcacagctctctgcatcgtcgcggtctgagtctggtcgcatgaagaagtcagacaataagatgggcattacaccgttgaggaactatcatcctattgtagtgcctggactgggtcggtcgctgggctttctgccgaaaatgcctcggctgcgggtggttcacatgttcttgtggtatctgatctatggccacccagcctccaacaccgttgagaagccctcatttatttccgaacgtcgcactattaagcaggagagcggacgggctggtgtacgtccctctagcagcgggtccgcctgggaagcttgttctgaggcccctagcaaaggctcacaagacggtgtcacctgggaagccgaggtggaattagcgaccgaaacagtctacgttgacgatgcctcttggatgcggtacattccgcccattccggtgcatcgtgattttgggtttggatgggccctcgtctctgacatcttgctgtgccttccgctcagcatttttatccagatcgtccaggtaagctacaaagttgacaatttagaggagttcctcaatgaccctctgaaaaaacatacgttgattcggttcctgccaaggcctattcgacaacagctactgtataagcggcgctacatttttagtgtggtggagaacctgcagaggctctgttatatgggattgctgcagtttggacccacagagaaatttcaggacaaagaccaggtttttattttcttgaaaaagaatgctgtgatcgtggacacaaccatctgtgacccccactataatctggccagatcctcacgtccttttgaaaggcgcctttatgtgttgaactctatgcaggatgtggaaaactattggtttgacctgcagtgcgtttgtctgaacacaccactgggggtagtcaggtgccccagagtgcggaaaaacagctccaccgatcagggctccgacgaagagggctcactgcagaaagagcaagagtccgcaatggataaacataatctggagcgcaagtgcgccatgcttgagtacacaactggaagtcgtgaggtagttgacgaaggcctgatccctggagacggcctcggcgctgccggcctcgactcatccttttacggacatctgaaaagaaactggatctggacctcttacatcatcaatcaggccaagaaggagaacacagctgcggaaaacggccttactgtacggttacagacgtttttaagcaaacggcctatgccgttgtctgcccggggaaactcccggttgaatatctggggcgaggccagggtcgggtcagagctctgcgcgggctgggaggagcaattcgaagtagaccgggaaccttccctcgaccgaaatagaagagtgcggggaggaaagagccagaagcgtaaaagattgaagaaagatcctggtaagaagatcaaaaggaaaaagaaaggggaatttcctggggagaagtctaagaggctgagataccacgacgaggctgaccagagcgctttacagcgtatgacgagactccgggtgacatggtccatgcaggaggatggacttctagtgctgtgtaggattgcttcgaacgtcttaaacacgaaagtgaaaggaccattcgtgacctggcaggtggtccgagacatattgcacgcaacctttgaagagtccttagacaagacttcccattcagtaggccgcagagccaggtatattgtgaagaacccccaggcctacctcaactacaaagtgtgcttagcggaagtatatcaggataaggctctggtgggcgacttcatgaatcgcagaggtgactatgatgaccctaaagtctgcgcgaacgagtttaaagagtttgtcgagaagctgaaagagaagtttagctccgccctgcgtaactccaacttagagatccctgacacactccaggaactgttcgctcgctatagagtgttagctattggtgatgagaaagaccagacaagaaaagaagacgaactgaactcagttgatgatattcactttctggttttacaaaatctcatccagtcaactctagccctctcagactcccagatgaagtcctaccagtctttccagacattccgtctgtaccgcgaatacaaagaccatgtcttggtgaaggccttcatggagtgccagaaacggtccttggtgaaccgacggcgtgtcaatcacactctgggtccaaagaaaaatagggctcttccctttgtacctatgtcttaccaattgtcccagacttattaccgcatcttcacctggcgctttccatcaactatctgtacagagtcattccagttcctggaccgcatgagggccgcggggaagctggaccaaccagatagattctcgttcaaggaccaggataacaacgagcccacgaatgacatggtggccttcagcctcgacgggcccggcggtaactgtgttgcagtcttaacactcttcagcctcggcctgatctctgtggacgtgcgtattcctgaacagattatcgtggttgactcatccatggtcgagaatgaggtgatcaagtcgctggggaaagacggtagcctggaggatgacgaagatgaggaggatgatcttgacgagggcgtgggcgggaaaagaagatcgatggaggtcaagcctgctcaggccagccacactaactatctgctgatgagaggatactattctcctggcattgtgtccacgcggaacttgaaccccaacgatagcatcgtggtaaacagttgccagatgaagttccagctgaggtgtactccagtcccagctcgcctccgacccgcagccgcgcccctcgaagagctcacaatgggcacgtcttgccttcctgacacttttaccaaattgattaacccccaggagaatacctgcagcttggaggagtttgtcctgcagcttgaacttagcggctattccccggaggacttaacagctgcattggagatattggaggcaattattgccacaggatgctttggcatcgacaaagaagagctgcggcgtcggttcagcgccttagagaaagctggaggaggcagaacgcggacctttgcggattgcattcaggctctcctggaacagcaccaggttttagaggttgggggcaataccgccagactagtggcaatgggctcagcctggccttggctcttacactccgtgcgtctgaaggatcgagaggatgctgatatacagcgcgaagatccccaggctagaccgctggaaggctctagcagcgaagactcgccccctgagggacaggcccccccaagccattctcctcggggtaccaagcgtcgcgccagctgggcatccgaaaatggtgaaaccgacgccgaaggaacccaaatgacccctgcaaagcgccctgctttacaggactctaatctcgccccaagtctgggacctggggctgaagacggagctgaggcccaggccccctctcccccgccggcactggaagatacagctgcagcaggggcggcacaagaggatcaggagggagtgggggagttttcaagcccaggtcaagaacagctctcggggcaggcgcagcctcctgaggggtcagaagatcctagaggctttactgagtcattcggcgcggctaacatctcccaggcagcacgggagagggattgtgagtcagtctgcttcataggtcgcccttggagagtggtggacggacatctgaatttgccagtgtgcaagggtatgatggaggccatgctgtaccacatcatgaccaggccaggcattccagaaagcagtctgctccgccactaccagggggtgttacagccagtggcagtcctagaactgctacagggccttgaaagtctgggatgcatccgtaaaagatggttaaggaagccccggcccgtatctctgttcagcacaccagtagtggaagaggtagaagtgcccagtagcctcgatgaaagtccaatggcattttacgagcccactttggattgtaccctcaggctgggaagggtcttcccacatgaggtgaattggaacaaatggatccatctgtag

SEQ ID NO: 118415 - DNA, 5064 bp, Artificial Sequence
  derived and/or modified sequence
atggacgccctggagagcctgctggacgaggtggccctggagggcctggacggcctctgtctgccagccctgtggtcccgcctggagacgagagtgccgccgtttcctttgccgctcgaaccctgcacccaagaattcttgtggcgcgccctcgcgacccaccccgggatttccttttacgaagagcccagggagcgccctgacctgcagttgcaggatcgctacgaggagatcgacctagaaactggtatcctggaatcgcggcgcgaccccgtggcccttgaggatgtctacccaattcatatgattctggagaataaggatggtattcagggctcctgtaggtacttcaaggaaagaaagaacattacgaatgacattcgaactaagagcctgcaacccagatgtacaatggtggaggctttcgacagatggggtaagaaactgattatctgccttcccggtcatgccgtccaggggttagacaggcctggaggggggagccgtccggaggccgccaggctactccttctgcatccaggtacagcccgtcctgttcaacagggagaactgcagcgcgacctgcacacgacggcattcaaagtggatgccggaaaactgcactaccaccgcaagatcctaaataaaaacggcctgatcacaatgcaatctcatgtgattcggttgcctactggcgcacagcagcactcgatcctcttgctgctgaacaggttccacgtagatcgaagaagcaagtacgacatactgatggaaaagctgtccgtgatgctgagtaccagaactaaccatatcgagacattgggcaagctgcgggaagagctggggctttgcgaacggacgtttaagcggttgtatcaatatatgctgaacgccggattggcaaaggtcgtcagcctgcgactgcaggagattcatcccgaatgtggaccttgcaaaaccaagaaggggactgatgttatggttcgatgtttaaaacttctcaaggaattcaagaggaacgaccacgatgacgatgaggatgaggaggtgatttcgaaaacagttccaccagtagatattgtgttcgagcgggacatgctcacgcagacctacgacctgatagagcgccgaggaactaaagggatctcacaggccgagatcagggttgctatgaatgtgggaaaactggaagccaggatgttgtgccgactgctccagagatttaaggtggtgaagggcttcatggaagacgagggacggcaacggactaccaaatatatatcctgtgtgttcgctgaagagagtgacctgtcccggcaataccaacgggagaaagctcgttccgaactgctcaccacggtgagcctggcctctatgcaggaagagtctcttcttccagaaggcgaggataccttcctgtctgagagtgatagcgaggaagaacggagttctagcaagaggcgcggcagggggagccaaaaagacacccgggcaagcgccaacctgcgtcccaagactcagccccaccactcaaccccaacgaagggcggatggaaggtggtgaatcttcaccccttgaagaagcagcccccaagctttcctggggctgccgaggagcgcgcgtgccagtcactcgcatcacgggactcactactggacacctcatccgtgagtgagcctaacgtgtcttttgtatcacactgtgctgatagcaacagtggtgatatcgccgtcattgaggaagtgcgtatggaaaaccccaaggaatctagctccagcctcaagaccggtcggcattcctctggtcaggataagccccatgagacatacaggctgctcaagagaaggaacctgattattgaggctgtgaccaatttacgcctgatagaaagcctcttcacaattcagaagatgatcatggatcaggaaaaacaggagggagtttccactaagtgttgtaagaagtccatagtgcgactcgtgagaaacctctctgaggagggtcttctgagactatataggacgacagttatacaggatggaatcaaaaagaaagtagatctggtggtacatcctagtatggaccagaacgaccccttggtgaggagcgccatcgagcaggtccgttttcgtataagcaactcaagcaccgccaacagagtaaaaacgtctcagccccccgtgcctcagggagaggccgaggaggattcgcaggggaaagaaggcccatcggggagcggagatagtcagctctctgcttcttcgagatcagagtctggacgaatgaaaaagagcgacaataaaatgggaatcactcctctgcgaaactatcatccaatcgtggttccaggcttgggacgaagcctcggctttttgccgaaaatgccccgattgcgcgtcgtgcacatgttcctgtggtacctgatctatggtcatccggctagcaataccgtcgaaaagccaagttttatatccgaacgacgtacaatcaagcaagagtctgggagggctggggtcaggcctagctcaagtggctctgcctgggaagcatgtagcgaggcacctagtaaggggtcccaagatggggtcacctgggaggcagaggtggaacttgccacagagactgtgtatgtggacgatgcctcttggatgcgctacatccctccaatcccagtgcacagggattttggctttggatgggccttggtatcagacatcctgctgtgtctgcctctgtcaattttcatacagatcgtgcaggtctcatataaggtagacaacctggaggagttcctgaacgaccctttgaaaaagcatacactcatccgctttctgcctcgccccattaggcagcagctactttataagcgccgctacatcttcagcgtcgtcgagaatttacaacgactttgttatatgggattgttacagttcgggccaacagagaagttccaagacaaggaccaggtgttcattttcctgaagaagaatgcggtcatcgtggatactacgatatgcgacccacactacaacctcgcacggtcttctagacccttcgaacgccggttgtatgtgctgaactctatgcaagacgtggagaactattggtttgaccttcagtgcgtctgcctgaatactcccctgggtgtggtccggtgccccagagtccgaaaaaatagctctactgatcaaggatcggacgaggaaggaagcctgcagaaagagcaagagagcgctatggataagcataacctggaacgaaagtgtgctatgcttgaatatacaacagggagtcgtgaagttgtggacgaaggtttgatcccgggcgacggtctaggggccggctcgatcccagctagcaccgacacctcctctgccacaggaagtggcccagcgacatcttccacaagacccaaacggagaacgcttccccagcgtatggacaccgtgcgccttcagacatttctttctaagcggcccatgcctttgagcgccagaggcaacagcagactaaacatctggggggaggcccgcgtagggagcgaactgtgtgccggctgggaggaacagttcgaggtcgatagggaacccagcctcgatcggaaccgcagggttcgcggtggcaagtctcagaagcggaagaggcttaagaaagacccagggaaaaagattaaaagaaaaaagaaaggggaatttccaggggagaagtctaaaaggctccggtaccacgacgaggccgaccagtctgctctgcagcgcatgaccagattgcgtgtgacgtggagtatgcaggaggacgggctgctggtgctgtgccggatcgcttctaacgtgctcaacaccaaggtgaaggggcctttcgtgacttggcaggtagtgcgggatattctgcatgccacgtttgaggagtccctggataaaacaagccacagcgtgggtagacgggctaggtacattgtgaagaaccctcaagcctacctgaattacaaggtttgtctcgctgaggtataccaagacaaagcacttgtgggcgactttatgaaccgaagaggagattacgatgatcctaaggtatgcgctaatgagttcaaagaatttgttgaaaaattgaaggaaaaattctcatcagcattgcgcaactccaatctggaaattcctgatacccttcaggaattgttcgcacgttatcgcgtgctcgctataggcgatgagaaagatcagacccggaaggaggatgagctgaacagcgtagacgacatccactttctggttctccagaacctaattcaaagcactctggcactctctgatagtcaaatgaaaagttatcagtcatttcaaaccttccgtctgtacagggaatataaagatcatgtattggtgaaggcttttatggaatgccaaaagagatccctggtcaataggaggcgtgtcaatcacaccctcggtcccaagaagaaccgcgctctcccgtttgttcccatgtcttatcaactgtctcaaacctactatagaatcttcacttggcgttttccatccaccatatgtactgagagttttcagtttctggaccggatgagagccgcaggtaaactggatcagcccgaccggttcagctttaaggatcaggacaacaacgagccgactaacgacatggtggccttcagcttggatggcccagggggcaactgtgttgccgtcctgacactgttttccctgggccttatctcagttgacgtacgaattccggagcagattatcgttgtcgattccagtatggtggaaaacgaggttatcaaaagcctcggcaaggatggatctctcgaagatgacgaagacgaggaagacgatttagacgagggcgtcggtgggaagcggcggagcatggaggtcaaacctgcacaggcctcgcacacaaactatctgctcatgcggggttattattcgcctggcattgtaagcacccggaatctgaatccaaacgacagcattgtggtgaactcctgtcaaatgaaattccagctgagatgcacacccgtgccagctaggctgaggcctgcttag

SEQ ID NO: 118416 - DNA, 6330 bp, Artificial Sequence
  derived and/or modified sequence
atggacgctctagagtctctgctagacgaggtggctctggagggcctagacggcttatgtctcccggcactctggtctagattagaaactcgtgtgcctccatttcccttgccactggagccctgtacacaggaattcctgtggcgggctttagctactcaccctggcatctctttttatgaagagccacgcgaacgccctgacctacaattgcaggaccgatacgaggaaatagatcttgagactggaatcctcgaaagcagaagggaccccgtggccttggaggatgtttacccaattcatatgattctcgaaaacaaagacggcatccagggatcatgtagatattttaaggaaagaaaaaacattacaaacgacatcagaacaaagtctctgcagccgaggtgtactatggtggaggccttcgacagatggggcaaaaaattgattattgtcgcatcgcaggcaatgagataccgagccctgatcggtcaggagggagatccagatttaaaactacctgacttcagctattgcattctcgagaggctcggacggtcccgttggcagggcgagctgcagcgcgatttgcacacgacagcatttaaagtcgatgccggaaaattgcactaccatcgtaagatcctcaacaaaaacggtttaattacaatgcagtctcatgtcattagactgcccacaggtgcacagcagcattcaatcttgctcctgctcaatcgttttcacgtcgatcgaaggtctaaatacgatatcttaatggaaaaattgtctgttatgttatcgacaaggactaatcatattgagacccttggcaagcttagggaggagcttggcctctgtgagcgtacctttaagcggctgtatcagtacatgctgaatgccggactggcaaaggtggtgagtctgaggctgcaggaaatccaccctgagtgtggaccttgtaagacgaagaaaggtacggacgtaatggtcagatgcctcaagctgctgaaggaatttaagcggaacgatcatgacgatgacgaagacgaggaagtgatctccaaaactgtgcctccggttgatatcgtctttgagagggatatgctgacccaaacatacgatctaattgaacgacgcggaactaagggaatttcgcaggccgagataagggtggcaatgaatgtgggaaagctggaagctcggatgctgtgcagacttctgcaacggtttaaagtcgttaaaggctttatggaagatgaaggcaggcagcgaaccactaaatatataagctgcgtcttcgccgaggagtctgacttgtcaagacagtatcagcgagaaaaagctaggtcggagctgctgaccaccgtgagcctggcgtccatgcaggaggaatccttgcttcccgaaggtgaagacacttttctatcggagtcggattcggaggaagaacgctcttccagcaaacggagggggagagggtctcagaaagacacaagagccagtgccaatctgcggcctaagacgcaaccccatcactctactccaaccaagggagggtggaaggtggtaaacctgcaccctctcaaaaagcaaccaccttctttccccggagctgcagaagaaagagcatgccagtcacttgcgagtagagattcattattggacaccagctctgtaagcgagcctaacgtatccttcgtctcccactgtgcagacagcaactctggtgatatcgctgtgattgaagaggtacgtatggaaaacccgaaggaaagctcatcttccttaaagaccggcaggcattcaagtggccaggacaagccccatgagacctataggttactaaaaaggcggaatctcataattgaggccgtgaccaatctcaggcttatcgagtccctgttcacgatccagaagatgataatggatcaggaaaaacaggagggtgtgtccacaaagtgctgcaaaaagagtatcgtaaggctggttcgcaacctgtccgaggaaggcctgcttagattgtatagaaccaccgtcatccaggacggaattaaaaagaaggttgacctggtggtgcatccttcaatggaccaaaacgatcccctggtacgcagtgctatcgaacaggtgaggttccgtatatctaattctagtaccgccaacagagtaaagacttcccagccacctgtgccacagggtgaagcagaagaggactcacagggtaaggaaggtccttctgggtctggagactcccagctcagcgcgtcttcgaggtccgagagcggcaggatgaagaaaagtgacaacaagatgggtatcaccccattgcggaactaccaccccattgtggtgccaggactaggcaggtccttaggtttcttacctaaaatgccgagactcagagtggtgcatatgtttttatggtatctcatctacggccatcccgcttctaacaccgtggaaaaaccttccttcatttctgaaaggagaaccattaagcaggaaagtgggagggccggtgtccgaccatcaagtagcggttctgcctgggaagcctgctcagaagccccatcaaagggttcccaggacggcgttacatgggaagcagaagtagagctcgctaccgaaaccgtctatgttgatgacgcctcctggatgcgttatattccacctatacccgttcatagagactttggcttcggatgggccctggtgagcgacatcttgctttgtttgcctctcagcatcttcatccagattgtccaagtcagttacaaagtagacaatctagaagagttcctcaacgacccactcaaaaagcacacgttgattaggttcctgcctaggccaattcgccagcaactgctgtacaaacgaaggtatatatttagcgtggttgaaaacctgcaacggctttgctatatgggcctcctgcagtttggtcctaccgagaagttccaggacaaagaccaggtctttatcttcctcaaaaagaacgccgtgatcgtggacactacgatttgtgatccgcactacaatctggccagatcatccaggccatttgagcggaggttatatgtactgaatagtatgcaggacgtggagaattattggtttgatcttcaatgtgtgtgtttgaacacacccctgggggtggtccggtgcccaagagtaagaaagaactcttccacggaccaggggagtgacgaagaaggctccctccagaaagagcaggaaagcgccatggacaaacataacctagaaaggaaatgcgcaatgctggaatacaccactgggagcagagaggttgtggacgagggacttattcccggtgatggcctgggggctgcagggctggacagcagtttttacggccacctgaaacggaactggatctggaccagctacatcataaaccaggcgaaaaaggagaacacggctgcagagaacggcctgaccgtgcgtttgcaaacattcctgtccaaaaggccaatgcctctgtccgccaggggtaattccagactgaatatctggggcgaggccagagtagggtcggagctgtgcgccggttgggaagagcagttcgaagttgatagagaaccctctcttgatcgaaatcggagggtgagaggagggaaaagccagaaaaggaagaggctgaagaaggaccccggaaagaaaattaagcgcaaaaagaaaggcgaattccccggagaaaagagcaaacgacttcgctaccacgatgaagctgaccagtccgcgttgcagcgcatgacgcgcctacgggtaacttggtcaatgcaagaagatggtctcctcgtcctctgcagaattgcctccaacgtgctaaataccaaagtgaaaggacccttcgtgacctggcaggtggtccgcgatattctccacgctacgtttgaggagtcactggataaaactagtcacagtgtgggaagacgcgctcgttacattgtgaagaaccctcaggcctatctgaattacaaagtgtgtctcgctgaggtttatcaggacaaagcactggtgggtgactttatgaaccggagaggcgactacgacgaccctaaggtgtgtgccaatgaatttaaagagttcgttgagaaactcaaggaaaagtttagctcagcactacggaatagcaatctcgaaatccccgacaccctccaggaactttttgcccgttatcgtgtgctggccattggcgacgagaaggatcagacgagaaaggaagacgaactgaactcagtcgatgatattcactttttggtgctccagaatttaatccagtcgacgcttgcgttatcagatagccagatgaagagttatcagagcttccagacctttcggctgtaccgagagtacaaggaccatgtcttggtaaaagcctttatggagtgccagaagcggagcctggttaaccgtaggcgtgtaaaccatacgttgggccctaagaagaaccgtgctttgccattcgtgcccatgtcttaccagctaagccagacctactataggatctttacctggcgctttccttcgacgatctgcacagagtccttccagtttttggataggatgagagcagccggtaaactggaccaaccagatcggtttagttttaaggaccaggataacaatgagcctactaatgatatggtggcattcagtctcgatgggcctggcggaaattgcgttgcagtattaacgctcttcagcttgggcctgatttccgtggatgtgcggatccctgaacaaatcattgttgttgacagcagtatggtggagaatgaagttataaagagtctcggcaaggatggctccctcgaggacgacgaggacgaggaggatgatctggatgaaggagtgggtggaaagagacgtagtatggaagtgaaaccagcacaggcctctcatactaactatttactgatgcgcggttactactcaccgggtatcgtgtccacaaggaatttgaacccaaatgattcaatagtggtaaactcctgtcaaatgaaatttcaactccggtgcacacctgtgccagcacggcttcgcccagccgcagctccactcgaggaactgacaatgggtactagctgtctcccagacacatttactaagctgattaacccccaggaaaacacatgtagcttggaggagttcgtgctacaactggaactttccggatactcaccggaagaccttacagcagcgttggaaattctcgaagccattattgccactggatgcttcgggatcgataaagaggagctgagaagacgtttctccgctttagaaaaggcaggcggagggcgtacccgcacattcgccgactgtatccaggctctcctggagcagcatcaggtgctggaagtcggaggaaacacagccagactcgtcgccatgggttccgcatggccttggttgcttcactcagtgaggctaaaggaccgtgaagatgcagatattcagagagaagatccccaggccaggcccctggagggatcttcttctgaggacagcccaccggaggggcaagcgccaccttcccatagccccaggggaactaagaggagggccagctgggctagtgagaatggcgagactgacgcagaggggacccagatgacaccagcgaagcgccctgccctccaagatagcaacctcgccccatcattaggcccaggtgctgaagatggcgctgaagcccaggcaccttccccgccacctgcccttgaggacaccgcagcggctggagcagcccaggaggatcaagagggagtcggcgaattctcttctcccggtcaagaacaactttccgggcaagcccagcccccagaaggatcagaggatccgaggggcttcaccgagtcctttggagctgccaacattagccaggccgctcgggagcgggactgcgagtcagtgtgcttcatcggtcgcccatggcgggttgtggacgggcatctcaacttgccagtatgtaaggggatgatggaggcaatgctttatcacattatgacaaggccagggatccctgagagttcactcctgcggcactaccagggtgttctccagcccgtggccgtgttggagctgctccaagggctggaaagcctggggtgtatacgcaagaggtggctgagaaaaccacggcctgtctctctgttcagcacacctgtggtcgaggaggtggaggtccccagctctttggatgaaagccctatggcattttatgagcctaccctggactgcacgttaagattgggtcgtgtgttcccacacgaagtgaactggaataagtggattcacctatag

SEQ ID NO: 118417 - DNA, 5063 bp, Artificial Sequence
  derived and/or modified sequence
atggatgccctggaatcactgctggatgaggttgcccttgaaggcctagatggcctatgtctccctgcgctttggtcaagacttgagacacgcgtgccaccgtttccactccccctcgagccatgtacacaagagtttctgtggcgagccctggccacacaccccggtattagcttctacgaagagcctcgcgaacgacctgaccttcagctgcaggacaggtacgaggagatagacttggagacaggcatattggagagccgtcgtgatccagtagctctggaagacgtttaccccatccacatgatccttgagaataaagatgggatacagggctcttgtcggtactttaaagagcgcaagaatattaccaatgacattcggacaaaatccctgcagcctcgctgcactatggtggaggccttcgaccgctggggcaagaagctaataatttgtctgccagggcacgccgttcaagggctggaccgacctggtgggggttccaggcctgaagcagctcgtttactgctgctgcatcccggtactgctagaccggttcagcagggggagcttcagcgagatctccatactaccgcctttaaggtcgatgctggcaagctacactaccacaggaagatcctgaacaagaacggcctcattactatgcaatcccatgtgatccggttaccgacgggggctcaacaacatagcatcctactgctgctcaaccgctttcacgtggacagacgcagcaaatatgatattttgatggaaaaactgtctgtgatgctgagcaccagaactaaccacatagagactctcggtaagctgagggaggaactgggcctgtgcgagagaacattcaaaagactttatcagtacatgctgaacgctggactggcaaaagtcgtgtccttgaggttgcaggaaatacatccagagtgcggcccttgcaagaccaagaagggcaccgatgtcatggtacggtgtctgaagctcttgaaggaattcaaacgcaacgaccacgatgacgatgaggacgaggaagtgatttccaagaccgttcctcccgtggacatcgttttcgaaagggatatgctgactcagacctatgatcttatcgagcggaggggcaccaagggaattagccaggccgagatcagggtagctatgaacgtcggtaaacttgaggccagaatgttgtgtagattgcttcagaggtttaaggtagtaaaaggcttcatggaggatgagggccgtcagcgtacaaccaagtacatcagttgcgtgtttgccgaagaatcagacctaagccgtcagtaccagcgggagaaagccaggagcgagctgctaactactgtcagtctggcttctatgcaagaagagtccctgctcccagagggagaggacactttcctttctgaatctgattccgaagaggagcggtctagcagtaaacgccgaggcagggggagtcagaaagatacccgggcttccgctaatctgcgtcctaaaacccagccacatcatagtacacccactaaaggaggctggaaggtcgttaacctccacccactgaagaaacaacctccttccttccctggtgcggcagaggaaagggcttgccagtcactggcatctagagactccctgctggatacatctagtgtaagcgaaccgaacgtgtcctttgtcagccattgtgcagattctaactcaggagacattgctgtcattgaagaagtccggatggagaatccgaaagaatcctctagctccctcaaaacaggacgccactcctcaggtcaggataagccccacgagacatatagactgcttaagcgcaggaacctgatcatcgaagctgttaccaacctccgcctcatagaatccctgttcacgattcagaagatgatcatggatcaggagaagcaagaaggcgtgtccacaaagtgttgtaagaaatctattgtgcgactggtccggaatctgtccgaagagggactgctgagactgtacagaaccacagttatccaggacggaataaaaaagaaagtcgatctggtcgtgcacccctctatggatcagaatgacccacttgtcagaagcgccatcgagcaagtcagattcaggatttcaaattcgagtactgccaatcgtgtgaagacgagccagccacctgttccgcagggagaggccgaagaggacagccaggggaaggaagggccatctggttcaggagatagtcagctctccgcatccagtcgatccgaatccgggcgaatgaagaaatctgataataagatgggcatcaccccgctgcgcaactaccacccaatcgttgtgcctggtctggggcgaagtttgggatttctacctaagatgcctcgcttgcgtgtcgtgcatatgttcctctggtacctaatttacgggcatccagccagcaacactgtcgagaagccctccttcatcagcgagagacgaacaatcaagcaggagtccggtcgagccggtgttcgcccttcatctagtgggtctgcctgggaggcctgcagcgaggcaccatccaagggatctcaggatggtgtcacatgggaggccgaagtggaactggcaactgaaacagtctatgttgatgatgcatcgtggatgcgctacatcccccctatcccagtgcacagggacttcggctttggatgggccctggtctctgatatacttctctgtctacccctgtcaatatttatacagatagtccaagtgtcatataaggtcgataacttggaggagtttctaaatgatccactgaagaaacacaccttaatcagattcctacccaggcccatcagacagcaacttctgtacaagcggaggtacatcttcagcgtcgttgagaatctgcagcgcctttgctacatggggctgctgcagttcggcccaactgaaaagtttcaggataaggatcaggtgtttatctttctaaagaagaacgctgtgatagtggataccacgatctgtgatcctcattacaacttggccagatcttccagaccctttgagcgcagactctacgtcttgaattccatgcaagacgtcgaaaactattggttcgacctacagtgcgtctgtctgaacactcccttaggagtcgtccgatgccctcgtgttagaaaaaacagtagcactgatcagggctccgatgaggaaggatccctccagaaagagcaggagtcagccatggataaacacaatttggagcggaagtgtgccatgctggagtatacaacagggtctagggaggtggtggatgaggggctgataccaggtgacgggctgggagcaggtagcatccctgcatctacggacacttcgagcgctaccgggtccggcccagccacaagttcaacaaggcccaaaaggaggacattgccacagcggatggatacggttcgtttgcagacctttctttcaaagagaccaatgcctctgtcggcccgtggcaattcgcggctgaacatttggggtgaggccagagttggttcggagctgtgcgcaggctgggaggagcagtttgaggttgatcgcgagccgtctctggacagaaaccgcagggtgaggggaggcaaaagtcaaaagcgaaagagattaaaaaaagaccctggcaagaagattaaaagaaaaaagaagggggagtttcccggagagaagtctaaacggttacggtaccacgacgaggcagatcagagcgctttgcagaggatgactcggctgcgcgtgacctggagtatgcaggaagatgggctgctggttctgtgccgcatagcaagtaacgtgctgaataccaaggtaaaaggcccatttgtgacctggcaggtggtccgtgatatcttgcacgctacattcgaggaatcactggacaaaacctcccactcagtgggcagacgggcacggtacattgtgaaaaatccacaggcatacctgaactacaaggtttgcctcgccgaggtttatcaggacaaagccttggtaggtgatttcatgaaccgcaggggcgactatgatgatcctaaagtgtgtgccaatgagttcaaggagttcgttgaaaaactgaaagaaaagttctcaagcgcactccggaatagtaatcttgagattcctgacaccctgcaggaactgtttgcaagatatagagttttggctattggcgatgaaaaagaccagacacggaaagaggatgagttgaattcggtagatgatattcacttcctggtgcttcaaaacctgatccaaagtactctggcgctctctgacagccaaatgaaaagttaccaaagtttccagacatttcggttgtaccgggagtacaaggatcatgtactggtgaaggcattcatggagtgccaaaaaagaagcttggtgaaccgtcgcagagtgaatcataccctgggcccaaaaaagaatcgagctcttccctttgtccccatgtcatatcagttgagccagacttattatcgaatcttcacctggaggtttccctcgaccatatgcactgagtcatttcagttcctggatcgcatgcgcgcagctgggaaattggatcagccggatagattcagctttaaagatcaagacaacaatgagcccaccaatgacatggtggccttttctcttgatggtccgggtggtaactgcgtggctgtcctcaccctcttcagcctcgggctgattagcgtggatgtcaggattcctgaacagattattgtggtggactcttctatggtggaaaacgaagtgattaaaagcctcgggaaagatggctccctagaggatgatgaagatgaagaggacgacttagacgaaggggtaggaggaaaacgccgaagcatggaggtgaaaccagcccaggccagccatacaaactatctattaatgcgtggctactactctcccggaattgtatcaacccgcaacctgaacccaaatgactcgatcgttgtgaacagctgccagatgaagtttcagctgcggtgtacccctgtcccagctaggctccgcccagctta

SEQ ID NO: 118418 - DNA, 7106 bp, Artificial Sequence
  derived and/or modified sequence
cgttgcgcatgcgccccgggcgccgccgactgaagtagcaatggacgcgctggagtcgttgttggacgaagtcgctctggaggggctcgatggcctgtgtctgccagcgctgtggagccggctggagacgcgagtgccgcccttcccgctgcctttggaaccctgcacgcaggagtttctctggcgggccctcgccacgcacccgggcatcagcttctatgaggagcctcgggagcgacccgacctacagctccaggaccggtatgaagaaattgatttggaaactggaattttggagtctaggagggacccggtggctttggaggatgtctaccccattcatatgatcttagagaataaggatggcatccagggctcatgccgctactttaaggagaggaaaaacattaccaatgacatcagaaccaagtccttgcagcctcgctgtacaatggtggaagcctttgacaggtgggggaagaaactgatcatcgttgcctcccaggccatgcggtacagggccttgataggccaggagggggatcccgacctgaagctgcccgacttctcctactgcatcctggaacggctaggccggtccaggtggcaaggggagctccagcgagaccttcacaccactgctttcaaggttgatgctgggaagctgcactatcacagaaaaattttgaacaaaaacgggctgattacaatgcagtcccatgtgatccgattacccactggagcccagcaacactcaatcctcctcctactgaaccggtttcatgtggacaggaggagcaaatacgacatcctcatggagaagctttcggtcatgctgagcacacggactaaccacatagagacgctgggaaagctgagggaagagctggggctgtgcgaaaggacgtttaagcgtctgtaccagtatatgctgaacgccgggctagccaaggtggtgtctcttcgcttgcaagagatccaccctgaatgtggaccttgtaagacaaagaaagggaccgacgtcatggttcggtgcctcaagctgctgaaggaatttaaacggaatgaccatgatgatgacgaggacgaggaggtcatctccaagacagtgcctccagtggacattgtgttcgagcgggatatgctcacacagacctacgacctcattgagcgcagaggcacgaaaggaatttcccaagctgaaatccgagtggctatgaatgtgggaaaactagaagcaagaatgctgtgccgacttcttcaaagattcaaagttgtcaagggattcatggaagacgaaggtcggcagcgaaccaccaagtacatttcctgcgtgtttgcagaggagagcgacctaagccggcagtaccaaagagagaaggcccgcagcgagctcttgaccaccgtgagcctggcgtctatgcaggaggagtcgcttctgcctgaaggcgaggacaccttcctctctgagtcggacagtgaggaggagaggagcagcagcaagcggagaggcagagggtcccagaaagacacaagagcctctgcaaacctccggcccaagacccagcctcatcactccaccccaaccaagggtgggtggaaagttgtaaacctacacccattgaaaaagcagccgccctccttcccaggagctgctgaagagagagcctgccagagccttgccagcagggacagcctcttagataccagcagcgtctcagaacccaacgtgtcctttgtctcccactgtgcggacagcaacagtggtgacatagctgtgatcgaggaggtccggatggaaaacccaaaggagagtagcagttccctgaagactgggaggcacagctcaggccaagacaaaccacacgaaacttaccgactgctgaaacgcaggaatctgatcatagaagctgtcaccaatcttcgcttaatcgagagtttattcacgattcagaagatgatcatggatcaggagaagcaggaaggcgtgtccaccaagtgctgcaagaagtccattgtccgcttggtgcggaacctgtctgaggaaggtctcttgcgattgtatcggaccactgtcattcaagatggcatcaagaagaaggtggatctggtggtgcacccgtccatggaccagaacgaccctctagtgagaagtgccatcgagcaggtccgcttccggatctccaattcaagcacagccaacagggttaaaacttcccagcctccagtgccccaaggggaggcagaagaagacagtcaaggaaaagagggcccaagtggatcaggggactctcagctgagtgcttcctctagatcagaaagtggacggatgaaaaaaagtgataataaaatgggcataaccccgcttagaaattatcaccccattgtagttcccggactggggcgttctctaggatttctgcccaaaatgcctcgcctgcgggtggtccacatgtttctgtggtacctcatctacgggcaccctgccagcaacaccgtggagaagccaagcttcatcagtgaacggagaacgataaagcaggagtcaggcagggcaggcgtccggccgtcctcctctggaagtgcctgggaggcctgctctgaagccccatctaaaggcagccaagatggtgtcacctgggaggctgaagtggagcttgccacggagacagtgtatgtcgacgatgcctcgtggatgcgctacatccccccaatcccagtccacagggacttcggctttggctgggctctcgtcagcgacatcctcctctgccttcccctctccatcttcatccagattgtgcaagtcagctacaaggtggacaacctggaggaatttctgaacgacccgctgaagaagcacacgctgatccgctttctccccaggcccattcggcagcagcttctgtacaagaggcgttacattttttcggtggtggagaaccttcagaggctgtgctacatggggctgctacagtttggtcccacggaaaagtttcaggataaagatcaggtctttatcttcttgaagaagaatgcagtcattgttgacactaccatctgcgacccacattacaacctggcccgcagcagccggcccttcgagaggcgcctctatgtcctgaactcaatgcaggatgtggaaaactactggtttgacctgcagtgcgtctgcctcaacaccccactaggcgtggtgcgctgcccgcgcgtcaggaagaacagcagcacagaccagggcagcgacgaggagggcagcctgcagaaggagcaggagagcgccatggacaagcacaacctggagcgcaagtgcgccatgctggagtacaccactggaagccgtgaggtggtggatgaaggcttgatccctggagatgggctgggtgccgcagggctcgattccagcttctacggacacctcaagcgcaactggatctggaccagctacatcatcaaccaggccaaaaaggagaacactgccgcagagaatggactcacagtgaggctccagacatttctgtccaagcgcccaatgcccctcagtgccagaggcaacagcaggttgaatatttggggggaagcaagagtaggctccgagctctgtgctggctgggaagagcagtttgaggtggaccgagagccctcgctggaccgaaaccggagagtgaggggtgggaaaagccagaagcggaagcggctgaagaaggaccctgggaagaagatcaagagaaagaagaaaggagagttcccaggagaaaaaagcaaaaggctgcgctaccatgatgaagccgaccagagtgccctgcagcggatgacgcggcttcgtgtcacctggtctatgcaggaggatgggctgcttgtgctgtgccgcattgccagcaatgtcctcaacaccaaggtgaagggcccatttgtcacctggcaggtggtacgggacattttgcatgccacgtttgaagagtctttggataaaacatctcattccgttggacgaagagctcgctacatagtcaaaaacccacaggcctatctcaactataaagtgtgcctggccgaggtgtaccaggataaagcacttgttggagatttcatgaatcgaagaggtgactatgatgacccaaaggtttgtgccaacgagtttaaagaatttgtggagaagcttaaagaaaagttcagttcagccctaaggaattctaaccttgaaatcccagacacactccaggagctgttcgccaggtaccgagttttggcaattggggatgaaaaagatcaaaccaggaaagaggatgaacttaacagcgtggatgacatccactttctggtgcttcagaacctgatccagagcacgctggccctctcagacagtcagatgaagtcctaccagtcattccagactttccgcctctatcgggagtacaaggaccacgttcttgtgaaggccttcatggagtgccagaagaggagcttggtcaaccggcgccgggtcaaccacacgctgggccccaagaagaaccgggccctccccttcgtgccaatgtcctaccagctatcccagacctactacaggatttttacgtggcgatttccaagcaccatctgcacggagtcattccagtttttggacagaatgcgggctgccggcaagttggaccagcctgatcgtttctctttcaaagaccaggataataacgagcccacaaacgacatggtggccttttcactggacggccctggaggaaattgtgtggccgtcctgaccctcttctctctgggcctcatttctgtggatgtcaggatcccggagcagatcatcgtggtagacagctcaatggtggagaatgaggtcatcaaaagcttggggaaggacggcagcctggaggatgacgaggatgaagaggatgacttggacgaaggtgtagggggcaagcgccggagcatggaggtgaaacctgcgcaagcctcccacaccaactacctgctgatgaggggctactactcccccggcatcgtcagcacccgcaacctcaaccccaacgacagcattgtggtcaactcctgccagatgaagttccagctccgctgcacccctgtgcccgcccggctcaggcccgctgccgctcctctggaagagctaacaatgggaacctcctgcctccctgatacgttcaccaagctgataaacccccaggaaaacacctgcagcttggaggagtttgtcctccagctggagctgtctgggtatagtcccgaagacctgactgctgccttggagatcttggaagccattatagccacgggttgttttgggattgacaaggaggagctgcgcagacggttctcggccttggagaaggcaggtggtgggcgcaccaggacattcgcagattgcatccaggccctcctggagcagcatcaggtgctggaggtcggtggcaacactgcgcgcctggtagccatgggctctgcctggccttggctcctgcactccgtgcggctgaaagacagagaagacgccgacatccagagagaagacccccaggccagacccctggaggggtcttccagtgaggacagcccccccgaggggcaggcacctccttctcacagcccccggggcaccaagaggcgcgccagctgggccagtgagaatggggagaccgacgccgagggcacccagatgacccctgccaagaggccagcgctccaggactcaaatttggcccccagccttgggcccggagctgaagatggggcagaagcccaggccccatctccacccccagctcttgaagacaccgctgcagcgggagcagcacaggaagaccaagagggtgtcggtgagttcagttccccaggccaagagcagctgagcggccaggcgcagcctccagagggctctgaagaccccagagggttcacagagagtttcggagctgccaacatctcccaggcagcacgggaaagggactgtgagagtgtctgcttcatcggccggccgtggcgtgtcgtggatggccacctgaaccttcctgtatgcaagggtatgatggaggccatgctgtaccacatcatgaccaggcctggcatccccgagagctccctgctgcgccactaccagggggtcctgcagcccgtcgccgtgctggagttgctccagggcctggagtccctcggctgcatccggaagcgctggctgagaaagccaaggcctgtctcgctcttctctacacccgtggtggaagaggtggaagtgccctccagcctggacgagagccccatggctttctatgagcccaccttggactgtaccctccggctgggccgtgtgttcccccacgaggtcaactggaacaagtggatccacctctaggacccctgtgggcgtcccctccctcccagccaccgcctgccacaccactcctgcctggtgctcggcagaccccactgtgccctggccttgggtctgccgagcctcctgcagcaggggacgggtgctttggccagagtcacagactgacacgtttcccactgtactggaactctggaaagaggggctccccgacctgcccatcccccaggctcttctgggccttccccttgggaactggcctcatcacactgggagttggtgcttcttgtctctgggtctccagagtttgccccgcctgtgcacacctcacattccagactctagccatctcggcaggatctcctggctccttgagtgcccaggtgccaccaagaggaagggccttgtgggatacaccttgcagaatagggatcggtgtgccccgctgcgaggggccccccatgggggctgtggcccctccgcaggcaggacatcccaacccctggctgggactgaaccacccagagcggagcggctcccttttcagccttgtgagtcacctggcaggccccagctgggctggctgtccgtgtccctcagcctggctggtgattccttgcaggccagaaatgaagagtccctgtaggttttggttttgtttgttttattttgttctttcaccttttttcctcattaaaaaaaaaaagtccctgtggagtgtacttatttattttttgattaaagggaagtaaaatgc

SEQ ID NO: 118419 - DNA, 7094 bp, Artificial Sequence
  derived and/or modified sequence
cgttgcgcatgcgccccgggcgccgccgactgaagtagcaatggacgcgctggagtcgttgttggacgaagtcgctctggaggggctcgatggcctgtgtctgccagcgctgtggagccggctggagacgcgagtgccgcccttcccgctgcctttggaaccctgcacgcaggagtttctctggcgggccctcgccacgcacccgggcatcagcttctatgaggagcctcgggagcgacccgacctacagctccaggaccggtatgaagaaattgatttggaaactggaattttggagtctaggagggacccggtggctttggaggatgtctaccccattcatatgatcttagagaataaggatggcatccagggctcatgccgctactttaaggagaggaaaaacattaccaatgacatcagaaccaagtccttgcagcctcgctgtacaatggtggaagcctttgacaggtgggggaagaaactgatcatctgcctcccaggccatgcggtacagggccttgataggccaggagggggatcccgacctgaagctgcccgacttctcctactgcatcctggaacggctaggccggtccagcaaggggagctccagcgagaccttcacaccactgctttcaaggttgatgctgggaagctgcactatcacagaaaaattttgaacaaaaacgggctgattacaatgcagtcccatgtgatccgattacccactggagcccagcaacactcaatcctcctcctactgaaccggtttcatgtggacaggaggagcaaatacgacatcctcatggagaagctttcggtcatgctgagcacacggactaaccacatagagacgctgggaaagctgagggaagagctggggctgtgcgaaaggacgtttaagcgtctgtaccagtatatgctgaacgccgggctagccaaggtggtgtctcttcgcttgcaagagatccaccctgaatgtggaccttgtaagacaaagaaagggaccgacgtcatggttcggtgcctcaagctgctgaaggaatttaaacggaatgaccatgatgatgacgaggacgaggaggtcatctccaagacagtgcctccagtggacattgtgttcgagcgggatatgctcacacagacctacgacctcattgagcgcagaggcacgaaaggaatttcccaagctgaaatccgagtggctatgaatgtgggaaaactagaagcaagaatgctgtgccgacttcttcaaagattcaaagttgtcaagggattcatggaagacgaaggtcggcagcgaaccaccaagtacatttcctgcgtgtttgcagaggagagcgacctaagccggcagtaccaaagagagaaggcccgcagcgagctcttgaccaccgtgagcctggcgtctatgcaggaggagtcgcttctgcctgaaggcgaggacaccttcctctctgagtcggacagtgaggaggagaggagcagcagcaagcggagaggcagagggtcccagaaagacacaagagcctctgcaaacctccggcccaagacccagcctcatcactccaccccaaccaagggtgggtggaaagttgtaaacctacacccattgaaaaagcagccgccctccttcccaggagctgctgaagagagagcctgccagagccttgccagcagggacagcctcttagataccagcagcgtctcagaacccaacgtgtcctttgtctcccactgtgcggacagcaacagtggtgacatagctgtgatcgaggaggtccggatggaaaacccaaaggagagtagcagttccctgaagactgggaggcacagctcaggccaagacaaaccacacgaaacttaccgactgctgaaacgcaggaatctgatcatagaagctgtcaccaatcttcgcttaatcgagagtttattcacgattcagaagatgatcatggatcaggagaagcaggaaggcgtgtccaccaagtgctgcaagaagtccattgtccgcttggtgcggaacctgtctgaggaaggtctcttgcgattgtatcggaccactgtcattcaagatggcatcaagaagaaggtggatctggtggtgcacccgtccatggaccagaacgaccctctagtgagaagtgccatcgagcaggtccgcttccggatctccaattcaagcacagccaacagggttaaaacttcccagcctccagtgccccaaggggaggcagaagaagacagtcaaggaaaagagggcccaagtggatcaggggactctcagctgagtgcttcctctagatcagaaagtggacggatgaaaaaaagtgataataaaatgggcataaccccgcttagaaattatcaccccattgtagttcccggactggggcgttctctaggatttctgcccaaaatgcctcgcctgcgggtggtccacatgtttctgtggtacctcatctacgggcaccctgccagcaacaccgtggagaagccaagcttcatcagtgaacggagaacgataaagcaggagtcaggcagggcaggcgtccggccgtcctcctctggaagtgcctgggaggcctgctctgaagccccatctaaaggcagccaagatggtgtcacctgggaggctgaagtggagcttgccacggagacagtgtatgtcgacgatgcctcgtggatgcgctacatccccccaatcccagtccacagggacttcggctttggctgggctctcgtcagcgacatcctcctctgccttcccctctccatcttcatccagattgtgcaagtcagctacaaggtggacaacctggaggaatttctgaacgacccgctgaagaagcacacgctgatccgctttctccccaggcccattcggcagcagcttctgtacaagaggcgttacattttttcggtggtggagaaccttcagaggctgtgctacatggggctgctacagtttggtcccacggaaaagtttcaggataaagatcaggtctttatcttcttgaagaagaatgcagtcattgttgacactaccatctgcgacccacattacaacctggcccgcagcagccggcccttcgagaggcgcctctatgtcctgaactcaatgcaggatgtggaaaactactggtttgacctgcagtgcgtctgcctcaacaccccactaggcgtggtgcgctgcccgcgcgtcaggaagaacagcagcacagaccagggcagcgacgaggagggcagcctgcagaaggagcaggagagcgccatggacaagcacaacctggagcgcaagtgcgccatgctggagtacaccactggaagccgtgaggtggtggatgaaggcttgatccctggagatgggctgggtgccggctcgattccagcttctacggacacctcaagcgcaactggatctggaccagctacatcatcaaccaggccaaaaaggagaacactgccgcagagaatggacacagtgaggctccagacatttctgtccaagcgcccaatgcccctcagtgccagaggcaacagcaggttgaatatttggggggaagcaagagtaggctccgagctctgtgctggctgggaagagcagtttgaggtggaccgagagccctcgctggaccgaaaccggagagtgaggggtgggaaaagccagaagcggaagcggctgaagaaggaccctgggaagaagatcaagagaaagaagaaaggagagttcccaggagaaaaaagcaaaaggctgcgctaccatgatgaagccgaccagagtgccctgcagcggatgacgcggcttcgtgtcacctggtctatgcaggaggatgggctgcttgtgctgtgccgcattgccagcaatgtcctcaacaccaaggtgaagggcccatttgtcacctggcaggtggtacgggacattttgcatgccacgtttgaagagtctttggataaaacatctcattccgttggacgaagagctcgctacatagtcaaaaacccacaggcctatctcaactataaagtgtgcctggccgaggtgtaccaggataaagcacttgttggagatttcatgaatcgaagaggtgactatgatgacccaaaggtttgtgccaacgagtttaaagaatttgtggagaagcttaaagaaaagttcagttcagccctaaggaattctaaccttgaaatcccagacacactccaggagctgttcgccaggtaccgagttttggcaattggggatgaaaaagatcaaaccaggaaagaggatgaacttaacagcgtggatgacatccactttctggtgcttcagaacctgatccagagcacgctggccctctcagacagtcagatgaagtcctaccagtcattccagactttccgcctctatcgggagtacaaggaccacgttcttgtgaaggccttcatggagtgccagaagaggagcttggtcaaccggcgccgggtcaaccacacgctgggccccaagaagaaccgggccctccccttcgtgccaatgtcctaccagctatcccagacctactacaggatttttacgtggcgatttccaagcaccatctgcacggagtcattccagtttttggacagaatgcgggctgccggcaagttggaccagcctgatcgtttctctttcaaagaccaggataataacgagcccacaaacgacatggtggccttttcactggacggccctggaggaaattgtgtggccgtcctgaccctcttctctctgggcctcatttctgtggatgtcaggatcccggagcagatcatcgtggtagacagctcaatggtggagaatgaggtcatcaaaagcttggggaaggacggcagcctggaggatgacgaggatgaagaggatgacttggacgaaggtgtagggggcaagcgccggagcatggaggtgaaacctgcgcaagcctcccacaccaactacctgctgatgaggggctactactcccccggcatcgtcagcacccgcaacctcaaccccaacgacagcattgtggtcaactcctgccagatgaagttccagctccgctgcacccctgtgcccgcccggctcaggcccgctgccgctcctctggaagagctaacaatgggaacctcctgcctccctgatacgttcaccaagctgataaacccccaggaaaacacctgcagcttggaggagtttgtcctccagctggagctgtctgggtatagtcccgaagacctgactgctgccttggagatcttggaagccattatagccacgggttgttttgggattgacaaggaggagctgcgcagacggttctcggccttggagaaggcaggtggtgggcgcaccaggacattcgcagattgcatccaggccctcctggagcagcatcaggtgctggaggtcggtggcaacactgcgcgcctggtagccatgggctctgcctggccttggctcctgcactccgtgcggctgaaagacagagaagacgccgacatccagagagaagacccccaggccagacccctggaggggtcttccagtgaggacagcccccccgaggggcaggcacctccttctcacagcccccggggcaccaagaggcgcgccagctgggccagtgagaatggggagaccgacgccgagggcacccagatgacccctgccaagaggccagcgctccaggactcaaatttggcccccagccttgggcccggagctgaagatggggcagaagcccaggccccatctccacccccagctcttgaagacaccgctgcagcgggagcagcacaggaagaccaagagggtgtcggtgagttcagttccccaggccaagagcagctgagcggccaggcgcagcctccagagggctctgaagaccccagagggttcacagagagtttcggagctgccaacatctcccaggcagcacgggaaagggactgtgagagtgtctgcttcatcggccggccgtggcgtgtcgtggatggccacctgaaccttcctgtatgcaagggtatgatggaggccatgctgtaccacatcatgaccaggcctggcatccccgagagctccctgctgcgccactaccagggggtcctgcagcccgtcgccgtgctggagttgctccagggcctggagtccctcggctgcatccggaagcgctggctgagaaagccaaggcctgtctcgctcttctctacacccgtggtggaagaggtggaagtgccctccagcctggacgagagccccatggctttctatgagcccaccttggactgtaccctccggctgggccgtgtgttcccccacgaggtcaactggaacaagtggatccacctctaggacccctgtgggcgtcccctccctcccagccaccgcctgccacaccactcctgcctggtgctcggcagaccccactgtgccctggccttgggtctgccgagcctcctgcagcaggggacgggtgctttggccagagtcacagactgacacgtttcccactgtactggaactctggaaagaggggctccccgacctgcccatcccccaggctcttctgggccttccccttgggaactggcctcatcacactgggagttggtgcttcttgtctctgggtctccagagtttgccccgcctgtgcacacctcacattccagactctagccatctcggcaggatctcctggctccttgagtgcccaggtgccaccaagaggaagggccttgtgggatacaccttgcagaatagggatcggtgtgccccgctgcgaggggccccccatgggggctgtggcccctccgcaggcaggacatcccaacccctggctgggactgaaccacccagagcggagcggctcccttttcagccttgtgagtcacctggcaggccccagctgggctggctgtccgtgtccctcagcctggctggtgattccttgcaggccagaaatgaagagtccctgtaggttttggttttgtttgttttattttgttctttcaccttttttcctcattaaaaaaaaaaagtccctgtggagtgtacttatttattttttgattaaagggaagtaaaatgc

SEQ ID NO: 118420 - DNA, 6330 bp, Artificial Sequence
  derived and/or modified sequence
atggacgccctggagagcctgctggacgaggtggccctggagggcctggacggcctgtgcctgcccgccctgtggagcagactggagaccagagtgccccccttccccctgcccctggagccctgcacccaggagttcctgtggagagccctggccacccaccccggcatcagcttctacgaggagcccagagagagacccgacctgcagctgcaggacagatacgaggagatcgacctggagaccggcatcctggagagcagaagagaccccgtggccctggaggacgtgtaccccatccacatgatcctggagaacaaggacggcatccagggcagctgcagatacttcaaggagagaaagaacatcaccaacgacatcagaaccaagagcctgcagcccagatgcaccatggtggaggccttcgacagatggggcaagaagctgatcatcgtggccagccaggccatgagatacagagccctgatcggccaggagggcgaccccgacctgaagctgcccgacttcagctactgcatcctggagagactgggcagaagcagatggcagggcgagctgcagagagacctgcacaccaccgccttcaaggtggacgccggcaagctgcactaccacagaaagatcctgaacaagaacggcctgatcaccatgcagagccacgtgatcagactgcccaccggcgcccagcagcacagcatcctgctgctgctgaacagattccacgtggacagaagaagcaagtacgacatcctgatggagaagctgagcgtgatgctgagcaccagaaccaaccacatcgagaccctgggcaagctgagagaggagctgggcctgtgcgagagaaccttcaagagactgtaccagtacatgctgaacgccggcctggccaaggtggtgagcctgagactgcaggagatccaccccgagtgcggcccctgcaagaccaagaagggcaccgacgtgatggtgagatgcctgaagctgctgaaggagttcaagagaaacgaccacgacgacgacgaggacgaggaggtgatcagcaagaccgtgccccccgtggacatcgtgttcgagagagacatgctgacccagacctacgacctgatcgagagaagaggcaccaagggcatcagccaggccgagatcagagtggccatgaacgtgggcaagctggaggccagaatgctgtgcagactgctgcagagattcaaggtggtgaagggcttcatggaggacgagggcagacagagaaccaccaagtacatcagctgcgtgttcgccgaggagagcgacctgagcagacagtaccagagagagaaggccagaagcgagctgctgaccaccgtgagcctggccagcatgcaggaggagagcctgctgcccgagggcgaggacaccttcctgagcgagagcgacagcgaggaggagagaagcagcagcaagagaagaggcagaggcagccagaaggacaccagagccagcgccaacctgagacccaagacccagccccaccacagcacccccaccaagggcggctggaaggtggtgaacctgcaccccctgaagaagcagccccccagcttccccggcgccgccgaggagagagcctgccagagcctggccagcagagacagcctgctggacaccagcagcgtgagcgagcccaacgtgagcttcgtgagccactgcgccgacagcaacagcggcgacatcgccgtgatcgaggaggtgagaatggagaaccccaaggagagcagcagcagcctgaagaccggcagacacagcagcggccaggacaagccccacgagacctacagactgctgaagagaagaaacctgatcatcgaggccgtgaccaacctgagactgatcgagagcctgttcaccatccagaagatgatcatggaccaggagaagcaggagggcgtgagcaccaagtgctgcaagaagagcatcgtgagactggtgagaaacctgagcgaggagggcctgctgagactgtacagaaccaccgtgatccaggacggcatcaagaagaaggtggacctggtggtgcaccccagcatggaccagaacgaccccctggtgagaagcgccatcgagcaggtgagattcagaatcagcaacagcagcaccgccaacagagtgaagaccagccagccccccgtgccccagggcgaggccgaggaggacagccagggcaaggagggccccagcggcagcggcgacagccagctgagcgccagcagcagaagcgagagcggcagaatgaagaagagcgacaacaagatgggcatcacccccctgagaaactaccaccccatcgtggtgcccggcctgggcagaagcctgggcttcctgcccaagatgcccagactgagagtggtgcacatgttcctgtggtacctgatctacggccaccccgccagcaacaccgtggagaagcccagcttcatcagcgagagaagaaccatcaagcaggagagcggcagagccggcgtgagacccagcagcagcggcagcgcctgggaggcctgcagcgaggcccccagcaagggcagccaggacggcgtgacctgggaggccgaggtggagctggccaccgagaccgtgtacgtggacgacgccagctggatgagatacatcccccccatccccgtgcacagagacttcggcttcggctgggccctggtgagcgacatcctgctgtgcctgcccctgagcatcttcatccagatcgtgcaggtgagctacaaggtggacaacctggaggagttcctgaacgaccccctgaagaagcacaccctgatcagattcctgcccagacccatcagacagcagctgctgtacaagagaagatacatcttcagcgtggtggagaacctgcagagactgtgctacatgggcctgctgcagttcggccccaccgagaagttccaggacaaggaccaggtgttcatcttcctgaagaagaacgccgtgatcgtggacaccaccatctgcgacccccactacaacctggccagaagcagcagacccttcgagagaagactgtacgtgctgaacagcatgcaggacgtggagaactactggttcgacctgcagtgcgtgtgcctgaacacccccctgggcgtggtgagatgccccagagtgagaaagaacagcagcaccgaccagggcagcgacgaggagggcagcctgcagaaggagcaggagagcgccatggacaagcacaacctggagagaaagtgcgccatgctggagtacaccaccggcagcagagaggtggtggacgagggcctgatccccggcgacggcctgggcgccgccggcctggacagcagcttctacggccacctgaagagaaactggatctggaccagctacatcatcaaccaggccaagaaggagaacaccgccgccgagaacggcctgaccgtgagactgcagaccttcctgagcaagagacccatgcccctgagcgccagaggcaacagcagactgaacatctggggcgaggccagagtgggcagcgagctgtgcgccggctgggaggagcagttcgaggtggacagagagcccagcctggacagaaacagaagagtgagaggcggcaagagccagaagagaaagagactgaagaaggaccccggcaagaagatcaagagaaagaagaagggcgagttccccggcgagaagagcaagagactgagataccacgacgaggccgaccagagcgccctgcagagaatgaccagactgagagtgacctggagcatgcaggaggacggcctgctggtgctgtgcagaatcgccagcaacgtgctgaacaccaaggtgaagggccccttcgtgacctggcaggtggtgagagacatcctgcacgccaccttcgaggagagcctggacaagaccagccacagcgtgggcagaagagccagatacatcgtgaagaacccccaggcctacctgaactacaaggtgtgcctggccgaggtgtaccaggacaaggccctggtgggcgacttcatgaacagaagaggcgactacgacgaccccaaggtgtgcgccaacgagttcaaggagttcgtggagaagctgaaggagaagttcagcagcgccctgagaaacagcaacctggagatccccgacaccctgcaggagctgttcgccagatacagagtgctggccatcggcgacgagaaggaccagaccagaaaggaggacgagctgaacagcgtggacgacatccacttcctggtgctgcagaacctgatccagagcaccctggccctgagcgacagccagatgaagagctaccagagcttccagaccttcagactgtacagagagtacaaggaccacgtgctggtgaaggccttcatggagtgccagaagagaagcctggtgaacagaagaagagtgaaccacaccctgggccccaagaagaacagagccctgcccttcgtgcccatgagctaccagctgagccagacctactacagaatcttcacctggagattccccagcaccatctgcaccgagagcttccagttcctggacagaatgagagccgccggcaagctggaccagcccgacagattcagcttcaaggaccaggacaacaacgagcccaccaacgacatggtggccttcagcctggacggccccggcggcaactgcgtggccgtgctgaccctgttcagcctgggcctgatcagcgtggacgtgagaatccccgagcagatcatcgtggtggacagcagcatggtggagaacgaggtgatcaagagcctgggcaaggacggcagcctggaggacgacgaggacgaggaggacgacctggacgagggcgtgggcggcaagagaagaagcatggaggtgaagcccgcccaggccagccacaccaactacctgctgatgagaggctactacagccccggcatcgtgagcaccagaaacctgaaccccaacgacagcatcgtggtgaacagctgccagatgaagttccagctgagatgcacccccgtgcccgccagactgagacccgccgccgcccccctggaggagctgaccatgggcaccagctgcctgcccgacaccttcaccaagctgatcaacccccaggagaacacctgcagcctggaggagttcgtgctgcagctggagctgagcggctacagccccgaggacctgaccgccgccctggagatcctggaggccatcatcgccaccggctgcttcggcatcgacaaggaggagctgagaagaagattcagcgccctggagaaggccggcggcggcagaaccagaaccttcgccgactgcatccaggccctgctggagcagcaccaggtgctggaggtgggcggcaacaccgccagactggtggccatgggcagcgcctggccctggctgctgcacagcgtgagactgaaggacagagaggacgccgacatccagagagaggacccccaggccagacccctggagggcagcagcagcgaggacagcccccccgagggccaggccccccccagccacagccccagaggcaccaagagaagagccagctgggccagcgagaacggcgagaccgacgccgagggcacccagatgacccccgccaagagacccgccctgcaggacagcaacctggcccccagcctgggccccggcgccgaggacggcgccgaggcccaggcccccagccccccccccgccctggaggacaccgccgccgccggcgccgcccaggaggaccaggagggcgtgggcgagttcagcagccccggccaggagcagctgagcggccaggcccagccccccgagggcagcgaggaccccagaggcttcaccgagagcttcggcgccgccaacatcagccaggccgccagagagagagactgcgagagcgtgtgcttcatcggcagaccctggagagtggtggacggccacctgaacctgcccgtgtgcaagggcatgatggaggccatgctgtaccacatcatgaccagacccggcatccccgagagcagcctgctgagacactaccagggcgtgctgcagcccgtggccgtgctggagctgctgcagggcctggagagcctgggctgcatcagaaagagatggctgagaaagcccagacccgtgagcctgttcagcacccccgtggtggaggaggtggaggtgcccagcagcctggacgagagccccatggccttctacgagcccaccctggactgcaccctgagactgggcagagtgttcccccacgaggtgaactggaacaagtggatccacctgtag

SEQ ID NO: 118421 - DNA, 5064 bp, Artificial Sequence
  derived and/or modified sequence
atggacgccctggagagcctgctggacgaggtggccctggagggcctggacggcctgtgcctgcccgccctgtggagcagactggagaccagagtgccccccttccccctgcccctggagccctgcacccaggagttcctgtggagagccctggccacccaccccggcatcagcttctacgaggagcccagagagagacccgacctgcagctgcaggacagatacgaggagatcgacctggagaccggcatcctggagagcagaagagaccccgtggccctggaggacgtgtaccccatccacatgatcctggagaacaaggacggcatccagggcagctgcagatacttcaaggagagaaagaacatcaccaacgacatcagaaccaagagcctgcagcccagatgcaccatggtggaggccttcgacagatggggcaagaagctgatcatctgcctgcccggccacgccgtgcagggcctggacagacccggcggcggcagcagacccgaggccgccagactgctgctgctgcaccccggcaccgccagacccgtgcagcagggcgagctgcagagagacctgcacaccaccgccttcaaggtggacgccggcaagctgcactaccacagaaagatcctgaacaagaacggcctgatcaccatgcagagccacgtgatcagactgcccaccggcgcccagcagcacagcatcctgctgctgctgaacagattccacgtggacagaagaagcaagtacgacatcctgatggagaagctgagcgtgatgctgagcaccagaaccaaccacatcgagaccctgggcaagctgagagaggagctgggcctgtgcgagagaaccttcaagagactgtaccagtacatgctgaacgccggcctggccaaggtggtgagcctgagactgcaggagatccaccccgagtgcggcccctgcaagaccaagaagggcaccgacgtgatggtgagatgcctgaagctgctgaaggagttcaagagaaacgaccacgacgacgacgaggacgaggaggtgatcagcaagaccgtgccccccgtggacatcgtgttcgagagagacatgctgacccagacctacgacctgatcgagagaagaggcaccaagggcatcagccaggccgagatcagagtggccatgaacgtgggcaagctggaggccagaatgctgtgcagactgctgcagagattcaaggtggtgaagggcttcatggaggacgagggcagacagagaaccaccaagtacatcagctgcgtgttcgccgaggagagcgacctgagcagacagtaccagagagagaaggccagaagcgagctgctgaccaccgtgagcctggccagcatgcaggaggagagcctgctgcccgagggcgaggacaccttcctgagcgagagcgacagcgaggaggagagaagcagcagcaagagaagaggcagaggcagccagaaggacaccagagccagcgccaacctgagacccaagacccagccccaccacagcacccccaccaagggcggctggaaggtggtgaacctgcaccccctgaagaagcagccccccagcttccccggcgccgccgaggagagagcctgccagagcctggccagcagagacagcctgctggacaccagcagcgtgagcgagcccaacgtgagcttcgtgagccactgcgccgacagcaacagcggcgacatcgccgtgatcgaggaggtgagaatggagaaccccaaggagagcagcagcagcctgaagaccggcagacacagcagcggccaggacaagccccacgagacctacagactgctgaagagaagaaacctgatcatcgaggccgtgaccaacctgagactgatcgagagcctgttcaccatccagaagatgatcatggaccaggagaagcaggagggcgtgagcaccaagtgctgcaagaagagcatcgtgagactggtgagaaacctgagcgaggagggcctgctgagactgtacagaaccaccgtgatccaggacggcatcaagaagaaggtggacctggtggtgcaccccagcatggaccagaacgaccccctggtgagaagcgccatcgagcaggtgagattcagaatcagcaacagcagcaccgccaacagagtgaagaccagccagccccccgtgccccagggcgaggccgaggaggacagccagggcaaggagggccccagcggcagcggcgacagccagctgagcgccagcagcagaagcgagagcggcagaatgaagaagagcgacaacaagatgggcatcacccccctgagaaactaccaccccatcgtggtgcccggcctgggcagaagcctgggcttcctgcccaagatgcccagactgagagtggtgcacatgttcctgtggtacctgatctacggccaccccgccagcaacaccgtggagaagcccagcttcatcagcgagagaagaaccatcaagcaggagagcggcagagccggcgtgagacccagcagcagcggcagcgcctgggaggcctgcagcgaggcccccagcaagggcagccaggacggcgtgacctgggaggccgaggtggagctggccaccgagaccgtgtacgtggacgacgccagctggatgagatacatcccccccatccccgtgcacagagacttcggcttcggctgggccctggtgagcgacatcctgctgtgcctgcccctgagcatcttcatccagatcgtgcaggtgagctacaaggtggacaacctggaggagttcctgaacgaccccctgaagaagcacaccctgatcagattcctgcccagacccatcagacagcagctgctgtacaagagaagatacatcttcagcgtggtggagaacctgcagagactgtgctacatgggcctgctgcagttcggccccaccgagaagttccaggacaaggaccaggtgttcatcttcctgaagaagaacgccgtgatcgtggacaccaccatctgcgacccccactacaacctggccagaagcagcagacccttcgagagaagactgtacgtgctgaacagcatgcaggacgtggagaactactggttcgacctgcagtgcgtgtgcctgaacacccccctgggcgtggtgagatgccccagagtgagaaagaacagcagcaccgaccagggcagcgacgaggagggcagcctgcagaaggagcaggagagcgccatggacaagcacaacctggagagaaagtgcgccatgctggagtacaccaccggcagcagagaggtggtggacgagggcctgatccccggcgacggcctgggcgccggcagcatccccgccagcaccgacaccagcagcgccaccggcagcggccccgccaccagcagcaccagacccaagagaagaaccctgccccagagaatggacaccgtgagactgcagaccttcctgagcaagagacccatgcccctgagcgccagaggcaacagcagactgaacatctggggcgaggccagagtgggcagcgagctgtgcgccggctgggaggagcagttcgaggtggacagagagcccagcctggacagaaacagaagagtgagaggcggcaagagccagaagagaaagagactgaagaaggaccccggcaagaagatcaagagaaagaagaagggcgagttccccggcgagaagagcaagagactgagataccacgacgaggccgaccagagcgccctgcagagaatgaccagactgagagtgacctggagcatgcaggaggacggcctgctggtgctgtgcagaatcgccagcaacgtgctgaacaccaaggtgaagggccccttcgtgacctggcaggtggtgagagacatcctgcacgccaccttcgaggagagcctggacaagaccagccacagcgtgggcagaagagccagatacatcgtgaagaacccccaggcctacctgaactacaaggtgtgcctggccgaggtgtaccaggacaaggccctggtgggcgacttcatgaacagaagaggcgactacgacgaccccaaggtgtgcgccaacgagttcaaggagttcgtggagaagctgaaggagaagttcagcagcgccctgagaaacagcaacctggagatccccgacaccctgcaggagctgttcgccagatacagagtgctggccatcggcgacgagaaggaccagaccagaaaggaggacgagctgaacagcgtggacgacatccacttcctggtgctgcagaacctgatccagagcaccctggccctgagcgacagccagatgaagagctaccagagcttccagaccttcagactgtacagagagtacaaggaccacgtgctggtgaaggccttcatggagtgccagaagagaagcctggtgaacagaagaagagtgaaccacaccctgggccccaagaagaacagagccctgcccttcgtgcccatgagctaccagctgagccagacctactacagaatcttcacctggagattccccagcaccatctgcaccgagagcttccagttcctggacagaatgagagccgccggcaagctggaccagcccgacagattcagcttcaaggaccaggacaacaacgagcccaccaacgacatggtggccttcagcctggacggccccggcggcaactgcgtggccgtgctgaccctgttcagcctgggcctgatcagcgtggacgtgagaatccccgagcagatcatcgtggtggacagcagcatggtggagaacgaggtgatcaagagcctgggcaaggacggcagcctggaggacgacgaggacgaggaggacgacctggacgagggcgtgggcggcaagagaagaagcatggaggtgaagcccgcccaggccagccacaccaactacctgctgatgagaggctactacagccccggcatcgtgagcaccagaaacctgaaccccaacgacagcatcgtggtgaacagctgccagatgaagttccagctgagatgcacccccgtgcccgccagactgagacccgcctag

SEQ ID NO: 118422 - protein, 1108 aa, Artificial Sequence
  derived and/or modified sequence
MFLGLGRFSRLVLWFAAFRKLLGHHGLASAKFLWCLCLLSVMSLPQQVWTLPYKIGVVGPWACDSLFSKALPEVAARLAIERINRDPSFDLSYSFEYVILNEDCQTSRALSSFISHHQMASGFIGPTNPGYCEAASLLGNSWDKGIFSWACVNYELDNKISYPTFSRTLPSPIRVLVTVMKYFQWAHAGVISSDEDIWVHTANRVASALRSHGLPVGVVLTTGQDSQSMRKALQRIHQADRIRIIIMCMHSALIGGETQMHLLECAHDLKMTDGTYVFVPYDALLYSLPYKHTPYRVLRNNPKLREAYDAVLTITVESQEKTFYQAFTEAAARGEIPEKLEFDQVSPLFGTIYNSIYFIAQAMNNAMKENGQAGAASLVQHSRNMQFHGFNQLMRTDSNGNGISEYVILDTNLKEWELHSTYTVDMEMELLRFGGTPIHFPGGRPPRADAKCWFAEGKICHGGIDPAFAMMVCLTLLIALLSINGFAYFIRRRINKIQLIKGPNRILLTLEDVTFINPHFGSKRGSRASVSFQITSEVQSGRSPRLSFSSGSLTPATYENSNIAIYEGDWVWLKKFSLGDFGDLKSIKSRASDVFEMMKDLRHENINPLLGFFYDSGMFAIVTEFCSRGSLEDILTNQDVKLDWMFKSSLLLDLIKGMKYLHHREFVHGRLKSRNCVVDGRFVLKVTDYGFNDILEMLRLSEEESSMEELLWTAPELLRAPRGSRLGSFAGDVYSFAIIMQEVMVRGTPFCMMDLPAQEIINRLKKPPPVYRPVVPPEHAPPECLQLMKQCWAEAAEQRPTFDEIFNQFKTFNKGKKTNIIDSMLRMLEQYSSNLEDLIRERTEELEIEKQKTEKLLTQMLPPSVAESLKKGCTVEPEGFDLVTLYFSDIVGFTTISAMSEPIEVVDLLNDLYTLFDAIIGSHDVYKVETIGDAYMVASGLPKRNGSRHAAEIANMSLDILSSVGTFKMRHMPEVPVRIRIGLHSGPVVAGVVGLTMPRYCLFGDTVNTASRMESTGLPYRIHVSLSTVTILQNLSEGYEVELRGRTELKGKGTEETFWLIGKKGFMKPLPVPPPVDKDGQVGHGLQPVEIAAFQRRKAERQLVRNKP

SEQ ID NO: 118423 - DNA, 3327 bp, Artificial Sequence
  derived and/or modified sequence
atgttcctgggcctgggcagattcagcagactggtgctgtggttcgccgccttcagaaagctgctgggccaccacggcctggccagcgccaagttcctgtggtgcctgtgcctgctgagcgtgatgagcctgccccagcaggtgtggaccctgccctacaagatcggcgtggtgggcccctgggcctgcgacagcctgttcagcaaggccctgcccgaggtggccgccagactggccatcgagagaatcaacagagaccccagcttcgacctgagctacagcttcgagtacgtgatcctgaacgaggactgccagaccagcagagccctgagcagcttcatcagccaccaccagatggccagcggcttcatcggccccaccaaccccggctactgcgaggccgccagcctgctgggcaacagctgggacaagggcatcttcagctgggcctgcgtgaactacgagctggacaacaagatcagctaccccaccttcagcagaaccctgcccagccccatcagagtgctggtgaccgtgatgaagtacttccagtgggcccacgccggcgtgatcagcagcgacgaggacatctgggtgcacaccgccaacagagtggccagcgccctgagaagccacggcctgcccgtgggcgtggtgctgaccaccggccaggacagccagagcatgagaaaggccctgcagagaatccaccaggccgacagaatcagaatcatcatcatgtgcatgcacagcgccctgatcggcggcgagacccagatgcacctgctggagtgcgcccacgacctgaagatgaccgacggcacctacgtgttcgtgccctacgacgccctgctgtacagcctgccctacaagcacaccccctacagagtgctgagaaacaaccccaagctgagagaggcctacgacgccgtgctgaccatcaccgtggagagccaggagaagaccttctaccaggccttcaccgaggccgccgccagaggcgagatccccgagaagctggagttcgaccaggtgagccccctgttcggcaccatctacaacagcatctacttcatcgcccaggccatgaacaacgccatgaaggagaacggccaggccggcgccgccagcctggtgcagcacagcagaaacatgcagttccacggcttcaaccagctgatgagaaccgacagcaacggcaacggcatcagcgagtacgtgatcctggacaccaacctgaaggagtgggagctgcacagcacctacaccgtggacatggagatggagctgctgagattcggcggcacccccatccacttccccggcggcagaccccccagagccgacgccaagtgctggttcgccgagggcaagatctgccacggcggcatcgaccccgccttcgccatgatggtgtgcctgaccctgctgatcgccctgctgagcatcaacggcttcgcctacttcatcagaagaagaatcaacaagatccagctgatcaagggccccaacagaatcctgctgaccctggaggacgtgaccttcatcaacccccacttcggcagcaagagaggcagcagagccagcgtgagcttccagatcaccagcgaggtgcagagcggcagaagccccagactgagcttcagcagcggcagcctgacccccgccacctacgagaacagcaacatcgccatctacgagggcgactgggtgtggctgaagaagttcagcctgggcgacttcggcgacctgaagagcatcaagagcagagccagcgacgtgttcgagatgatgaaggacctgagacacgagaacatcaaccccctgctgggcttcttctacgacagcggcatgttcgccatcgtgaccgagttctgcagcagaggcagcctggaggacatcctgaccaaccaggacgtgaagctggactggatgttcaagagcagcctgctgctggacctgatcaagggcatgaagtacctgcaccacagagagttcgtgcacggcagactgaagagcagaaactgcgtggtggacggcagattcgtgctgaaggtgaccgactacggcttcaacgacatcctggagatgctgagactgagcgaggaggagagcagcatggaggagctgctgtggaccgcccccgagctgctgagagcccccagaggcagcagactgggcagcttcgccggcgacgtgtacagcttcgccatcatcatgcaggaggtgatggtgagaggcacccccttctgcatgatggacctgcccgcccaggagatcatcaacagactgaagaagcccccccccgtgtacagacccgtggtgccccccgagcacgccccccccgagtgcctgcagctgatgaagcagtgctgggccgaggccgccgagcagagacccaccttcgacgagatcttcaaccagttcaagaccttcaacaagggcaagaagaccaacatcatcgacagcatgctgagaatgctggagcagtacagcagcaacctggaggacctgatcagagagagaaccgaggagctggagatcgagaagcagaagaccgagaagctgctgacccagatgctgccccccagcgtggccgagagcctgaagaagggctgcaccgtggagcccgagggcttcgacctggtgaccctgtacttcagcgacatcgtgggcttcaccaccatcagcgccatgagcgagcccatcgaggtggtggacctgctgaacgacctgtacaccctgttcgacgccatcatcggcagccacgacgtgtacaaggtggagaccatcggcgacgcctacatggtggccagcggcctgcccaagagaaacggcagcagacacgccgccgagatcgccaacatgagcctggacatcctgagcagcgtgggcaccttcaagatgagacacatgcccgaggtgcccgtgagaatcagaatcggcctgcacagcggccccgtggtggccggcgtggtgggcctgaccatgcccagatactgcctgttcggcgacaccgtgaacaccgccagcagaatggagagcaccggcctgccctacagaatccacgtgagcctgagcaccgtgaccatcctgcagaacctgagcgagggctacgaggtggagctgagaggcagaaccgagctgaagggcaagggcaccgaggagaccttctggctgatcggcaagaagggcttcatgaagcccctgcccgtgcccccccccgtggacaaggacggccaggtgggccacggcctgcagcccgtggagatcgccgccttccagagaagaaaggccgagagacagctggtgagaaacaagccctag

SEQ ID NO: 118424 - DNA, 3327 bp, Artificial Sequence
  derived and/or modified sequence
atgtttttgggtctgggacgtttctcaagactcgtcctgtggttcgcagcttttagaaaactcttgggacaccacggactggcctccgcaaagtttttatggtgtctgtgcttgctgtcagtgatgtccctgcctcaacaggtctggaccctgccatataagataggcgtggttggcccttgggcatgcgattccctcttttccaaagctctacctgaagtggccgcccggctggcgatcgagcggataaaccgagatccctcctttgatctgtcctattcctttgagtatgtgatcctgaacgaggactgtcagaccagtagagcactgtcttcttttatctcccaccaccaaatggctagcgggttcatcggaccaaccaacccaggctattgtgaagctgcttctttgttgggcaacagctgggacaaggggatcttttcctgggcatgcgtgaactatgaattggataacaagatatcttatcccactttcagtagaacactgccgtcgcctattcgggttctagtgacggtgatgaaatactttcagtgggcccacgccggggttattagctcagacgaggacatctgggtccacactgccaatagggttgcttccgcgctccgtagccacggacttccagtcggcgtcgtactcaccaccggtcaggattcccagtccatgcgcaaagccctgcagagaatccatcaagctgacagaatcagaattataataatgtgcatgcattctgcccttataggcggcgagacacaaatgcacttgctcgagtgtgcccatgacctgaagatgaccgacggaacgtacgtcttcgttccttatgatgccctgctatactcgctgccttataaacatactccctaccgagtactccgcaataaccccaagctgcgtgaggcttatgacgctgtgctgacgataacagttgagtcccaggagaaaactttctaccaggccttcaccgaggcagccgccagaggggagatacccgagaaacttgaatttgaccaggtgtccccattgttcggtactatttacaactccatttattttatcgcccaagctatgaacaatgctatgaaagaaaacgggcaggccggagcggcctctctcgtgcagcactctaggaacatgcagtttcacggattcaatcagttgatgcgcacggattccaatggaaatgggatctctgagtacgtgatcctggatacaaatctaaaagagtgggagttgcactctacctacaccgttgacatggagatggaacttctgagattcggcggcactccaattcatttcccaggtggaaggccgcctcgggctgacgcgaaatgctggtttgccgaagggaagatttgccatggtggtattgatcctgcctttgccatgatggtgtgtcttacgcttctgatcgctctactgagcattaacggcttcgcatactttatccggaggagaataaacaagatccagctgatcaaaggacccaacaggattctgttgacattggaagacgtcacgtttatcaatcctcacttcggctctaaacgcggatccagagcctctgtctcctttcaaattacatcagaagtacagtctggtagatccccacggctctccttctcctccggaagcctgacacccgctacctacgaaaacagcaacatcgcgatctatgagggggattgggtgtggctgaaaaagtttagcctgggcgattttggggaccttaaatcaatcaagtctcgggcctcagatgtgttcgagatgatgaaggacctgcgtcatgaaaacattaacccactgctgggtttcttctacgattctggcatgttcgccatcgtgaccgagttttgtagccgtggatccctggaagacatactgacgaatcaagacgttaagttagactggatgtttaaatcatcattgcttttggatcttatcaagggaatgaagtatctgcaccatcgcgagtttgtgcacggcaggctgaagagtcggaactgtgtcgttgatggccggttcgttctgaaagtaacagactatggttttaatgacatcctggaaatgttgaggttgagtgaggaggaatcctcgatggaggaattgttgtggaccgcgcctgaactgctgagagcaccgagggggagtcggctgggctcgttcgcaggagacgtttacagtttcgccattatcatgcaggaggtgatggtgcgtggcaccccattttgtatgatggatctgcccgcacaggagatcataaaccggctaaagaaaccccccccggtttacagacccgtggtaccacccgagcacgccccgcctgaatgtctacagctcatgaaacagtgttgggctgaggccgctgagcaacgacctacatttgatgagatatttaaccagttcaagacattcaacaagggcaagaagaccaacataatagacagtatgctgcgcatgttagagcagtatagttccaatctcgaagatctgataagagagcgaacagaggagctggaaatcgaaaagcaaaagacagagaagctgctcacacaaatgctcccaccgtctgtcgctgaaagcctgaagaagggctgtacagttgaaccagaaggtttcgatctggtaaccttatacttcagtgacatagtcggctttaccaccatcagtgcgatgtctgagcctatcgaagttgtagatctgctaaatgacctgtatactcttttcgacgctataattgggtctcacgacgtttacaaggtcgagaccataggcgacgcttatatggttgcttctgggctaccgaagcgcaacgggtctagacacgccgctgaaattgctaatatgtcattggatatcctaagcagcgtgggcacattcaagatgcgtcacatgccagaagtgccagtaaggataagaatcggcctccacagcggacctgttgtggccggagtcgtcgggctcaccatgccgcgctactgtctctttggcgacaccgtcaatactgccagccgcatggaatcaactggcctaccatacagaatacacgtctccttgtctaccgtgacaattttgcagaatctgagcgaaggatatgaggtggagctccgaggccgaaccgaactgaaaggcaagggcaccgaggaaaccttttggctgattggtaaaaagggattcatgaaacctttgccagtgcctcctcccgtggataaggatggacaggtggggcatggccttcagcctgtggagatcgccgcctttcagcgccgaaaggccgagaggcaattggtaaggaacaaaccttag

SEQ ID NO: 118425 - DNA, 3327 bp, Artificial Sequence
  derived and/or modified sequence
atgttcctgggcctgggccgcttcagccggctggtgctgtggtttgctgccttcaggaagctgctgggccaccacggcctggccagcgccaagttcctgtggtgcctgtgcctgctgtctgtgatgagcctgccccagcaggtgtggaccctgccctacaagattggagtggtgggcccctgggcctgtgacagcctcttcagcaaggccctgcctgaggtggccgcccggctggccatcgagcgcatcaacagagaccccagctttgacctgagctacagctttgaatatgtgatcctgaatgaagactgccagaccagccgggccctgagcagcttcatcagccaccaccagatggccagcggcttcatcggccccaccaaccctggctactgtgaggccgccagcctgctgggcaacagctgggacaagggcatcttctcctgggcctgtgtgaactatgagctggacaacaagatctcctaccccaccttcagcaggaccctgcccagccccatccgggtgctggtgacagtgatgaagtacttccagtgggcccacgccggggtcatcagcagtgatgaggacatctgggtgcacacagccaacagagtggccagcgccctgcggagccacggcctgcctgtgggcgtggtgctgaccaccggccaggacagccagagcatgaggaaggccctgcagaggatccaccaggccgaccgcatccgcatcatcatcatgtgcatgcacagcgccctgattggaggagagacccagatgcacctgctggagtgtgcccatgacctgaagatgacagatggcacctacgtgtttgtgccctatgatgccctgctgtacagcctgccctacaagcacaccccctacagagtgctgaggaacaaccccaagctgcgggaggcctatgatgctgtgctgaccatcaccgtggagagccaggagaagaccttctaccaggccttcacagaggccgccgcccggggggagatccctgagaagctggagtttgaccaggtgagccccctgtttggcaccatctacaacagcatctacttcatcgcccaggccatgaacaatgccatgaaggaaaatggccaggccggggccgccagcctggtgcagcacagcaggaacatgcagttccacggcttcaaccagctgatgaggacagacagcaatggaaatggcatcagtgaatatgtgatcctggacaccaacctgaaggagtgggagctgcacagcacctacacagtggacatggagatggagctgctgcgctttggaggcacccccatccacttccctgggggccggccccccagggcagatgccaagtgctggtttgctgagggcaagatctgccacggcggcatcgaccctgcctttgccatgatggtgtgcctgaccctgctgattgccctgctgagcatcaatggatttgcctacttcatcagaagacgcatcaacaagatccagctgatcaagggccccaaccgcatcctgctgaccctggaggatgtgaccttcatcaacccccacttcggcagcaagaggggcagccgggcctctgtgtccttccagatcaccagcgaggtgcagagcggccgcagcccccggctgtccttcagcagcggcagcctgaccccagccacctatgagaacagcaacatcgccatctatgaaggagactgggtgtggctgaagaagttcagcctgggggactttggagacctgaagagcatcaagagccgggccagtgatgtgtttgagatgatgaaggacctgcggcatgagaacatcaaccccctgctgggcttcttctatgacagcggcatgtttgccatcgtgacagagttctgcagccggggcagcctggaggacatcctgaccaaccaggatgtgaagctggactggatgttcaagagcagcctgctgctggacctgatcaagggcatgaagtacctgcaccaccgggagtttgtgcacggccgcctgaagagcaggaactgtgtggtggatggccgctttgtgctgaaggtgacagattatggcttcaatgacatcctggagatgctgcggctgtctgaggaggagagctccatggaggagctgctgtggacagcccctgagctgctgcgggccccccggggcagccggctgggcagctttgctggagatgtgtacagctttgccatcatcatgcaggaggtgatggtgcggggcacccccttctgcatgatggacctgcctgcccaggagatcatcaaccggctgaagaagcccccacctgtgtacagacctgtggtgcccccagagcacgcccccccagaatgtctgcagctgatgaagcagtgctgggccgaggccgctgagcagaggcccacctttgatgagatcttcaaccagttcaagaccttcaacaagggcaagaagaccaacatcatcgacagcatgctgaggatgctggagcagtacagcagcaacctggaggacctgatccgggagaggacagaggagctggagattgagaagcagaagacagagaagctgctgacccagatgctgccccccagcgtggccgagagcctgaagaagggctgcaccgtggagcctgagggctttgacctggtgaccctgtacttcagtgacatcgtgggcttcaccaccatcagcgccatgtctgagcccatcgaggtggtggacctgctgaatgacctgtacaccctgtttgatgccatcatcggcagccatgatgtgtacaaggtggagaccatcggagatgcctacatggtggccagcggcctgcccaagagaaatggcagcagacatgctgctgagatcgccaacatgagcctggacatcctgagctctgtgggcaccttcaagatgaggcacatgcctgaggtgcctgtgcgcatcagaattggcctgcacagcggccctgtggtggccggcgtggtgggcctgaccatgccccgctactgcctgtttggagacacagtgaacacagccagcaggatggagagcacaggcctgccctaccgcatccacgtgtccctgagcacagtgaccatcctgcagaacctgtctgagggctatgaggtggagctgcggggccgcacagagctgaagggcaagggcacagaggagaccttctggctgattggcaagaagggcttcatgaagcccctgcctgtgcccccacctgtggacaaggatggccaggtgggccacggcctgcagcctgtggagattgctgccttccagaggaggaaggccgagcggcagctggtgaggaacaagccctag

SEQ ID NO: 118426 - DNA, 3327 bp, Artificial Sequence
  derived and/or modified sequence
atgttcctgggcctgggccggttcagccggctggtgctgtggttcgccgctttcagaaaactcctgggtcatcatggtctggctagcgcaaagttcctgtggtgtctctgcctgttatccgttatgtcactgcctcaacaggtgtggactctgccctacaaaattggggtcgtcggtccatgggcctgcgacagtctgttctccaaggccctgcctgaggtggcagctaggctagcaatcgaaagaataaatcgtgatccttccttcgatttgtcttacagcttcgagtacgtgatcttaaacgaagattgccaaacgagtcgcgcgctctcatcctttatcagccaccatcaaatggcaagcggattcattggcccgactaatcccggctactgcgaggcggcatctctgttgggcaactcctgggataaaggaatctttagctgggcatgcgtgaactacgaactggacaataaaattagttacccgaccttcagtcgcacgctgcccagcccaattagagtgctggttactgtaatgaaatattttcagtgggctcatgccggcgtgatttcctccgatgaggacatatgggtccataccgcaaaccgcgtggcttctgccctccgctcccatggactccctgtgggtgtcgtgctcaccacggggcaggatagtcagtctatgcgaaaggcgctgcagcggattcatcaagcggataggatacgaatcatcatcatgtgcatgcacagcgctctcatcggtggcgaaactcagatgcacctcctggaatgcgctcatgatttgaaaatgacggatgggacatacgtgttcgtcccctacgacgccctactgtacagtctgccatataagcataccccctatcgcgtcctcagaaacaatcctaaactcagggaagcctatgacgctgtcctgaccattaccgtcgagagtcaggaaaagacgttttaccaggctttcacagaagcggccgccagaggagagattccagagaagttagagtttgaccaggtgtccccactgttcggcaccatctacaattctatttacttcatcgcccaagctatgaacaacgccatgaaggaaaacggtcaggcgggcgctgcctctcttgtgcaacattcccggaatatgcagttccatggctttaatcaactgatgcggactgactccaacggtaatgggatctctgagtacgtgatactggacacaaatctcaaagaatgggagcttcattccacctacacggtcgacatggaaatggaattactgcgcttcggaggaacccctatacattttcccggtggacgccctcctagagccgacgccaagtgttggtttgccgaaggaaaaatttgtcacgggggcattgatccagccttcgctatgatggtgtgcctaacattactgattgcccttctctctatcaatggatttgcttacttcattaggagacgtattaataaaattcagctgataaagggccctaatcggattcttctgaccctggaagacgttaccttcatcaacccacactttggatccaagagagggtcccgcgcttccgtgagcttccagatcactagtgaggttcagtcaggccgttctccgcgtctttccttcagctctggctcgcttactcccgccacctacgaaaatagcaatattgccatttacgaaggggattgggtgtggttgaaaaagttcagtctgggcgactttggagaccttaagtcaattaagagtcgggcaagcgatgtcttcgaaatgatgaaggacctgcggcacgagaatatcaacccactgctaggatttttctacgacagcggtatgtttgccatcgttactgagttttgcagtcggggatcattggaagatatactcactaaccaggacgtcaagctggactggatgttcaaatcctctcttctcctggatctcatcaaaggtatgaagtacttgcatcacagggaattcgttcatgggagactcaaatctagaaattgcgtcgtggacggcagattcgtcctaaaggtgacggattacggatttaatgatatcttggaaatgctgaggttgtccgaggaggagtcaagtatggaggagttattgtggaccgcacctgaactgttgcgcgcaccccgaggctctcggttgggatcattcgctggggacgtgtactcatttgccataatcatgcaagaggtcatggtaagagggacgcccttttgcatgatggatctgccagcacaggagatcattaatcggctgaagaaacctccaccagtgtatagacccgtggtgcctcccgaacacgcaccaccggaatgcctgcaactgatgaagcagtgttgggcagaagcggccgagcagaggccaacgtttgatgagatctttaatcagttcaagacctttaacaaaggaaaaaaaactaacatcatcgattctatgttgcggatgcttgaacagtactcctctaatttggaggacctaattagggaacggaccgaagaactggagatcgagaagcagaaaacggaaaagttgttaactcagatgctgcccccctccgtcgctgaaagcctgaagaagggatgtactgttgagccggaggggttcgacctggttaccctttacttctctgacatcgtgggctttaccactatcagcgccatgagtgagcccattgaggtggtggatctcctcaacgacttgtatacgctctttgatgcaattatcggatctcatgatgtgtacaaggtcgagactatcggagatgcctatatggtcgcttcaggcctcccaaaacggaacgggtctagacacgcagctgaaattgccaacatgagtcttgacatcctctcttcggtggggacatttaaaatgcggcacatgcccgaggtgccggtgcggatcaggatcgggctccattccggcccagttgtagccggagtcgtcggcctgaccatgccccggtactgcctttttggcgacacagtgaacaccgccagcagaatggagtcgacgggcctgccctacagaatacacgtctccctatctactgttactatcctgcagaatctaagcgagggctacgaggtggaactgcgggggcgaacagagcttaaaggaaagggaactgaggaaaccttctggctgattggaaaaaaggggtttatgaagcctctgccagtaccgccccctgttgacaaagatggacaggtgggccacgggctccaaccggtggaaatagcagctttccagcgcaggaaagctgagcgacagttggtaaggaataaaccatag

SEQ ID NO: 118427 - DNA, 3327 bp, Artificial Sequence
  derived and/or modified sequence
atgtttctaggcctcggaagattcagtcgcctagtgctttggttcgccgcattcagaaaactgctagggcaccacgggctagcttccgcaaaatttctgtggtgtttgtgtctgctctccgtcatgtccctgccccagcaagtgtggactctaccgtataaaatcggtgtggtaggtccttgggcttgtgactccctgtttagtaaggcactgccggaagtagcagccaggctcgccatcgagaggataaatagagatcctagctttgacctgagttacagcttcgagtatgttattttaaacgaagactgccaaacgtctcgcgcactcagtagctttatcagccaccaccaaatggcaagcgggttcattgggcctacgaatccagggtattgcgaagccgctagtctgctgggcaacagctgggacaagggtatctttagctgggcctgcgtgaactatgagcttgacaacaagattagctacccgaccttttcccggactctgcctagccccatcagggttttagtgacggtaatgaagtacttccagtgggctcatgcaggcgtgatctcctccgatgaggacatctgggtccacactgcaaatagagtggcttcagcccttcgctctcacggacttcccgttggggtggtgctgaccactggccaggactcacaatccatgcgcaaagctctgcaacggattcatcaagccgatcgaatccgaattatcattatgtgtatgcactccgcgctcatcggcggagagacccagatgcatttgctggaatgcgcacatgaccttaaaatgacggatggaacatatgtcttcgtgccatatgacgctctgctgtattcgctgccctacaagcatacaccttaccgggtgctgcggaacaatcctaagctgcgagaggcatacgatgcagtactgactatcactgtagagtcccaggaaaagactttctaccaggccttcacagaagccgctgccaggggggagatccccgaaaaactggaattcgatcaggtctctcctctgtttgggacaatctataattccatctatttcattgcccaggccatgaataacgctatgaaggagaacgggcaggcaggagccgcaagtctggtgcagcattcccggaacatgcaattccacgggtttaatcagctaatgcggacagatagtaacggcaatggtataagcgaatacgtgattctggacacaaaccttaaagaatgggagctccacagcacctacactgttgatatggagatggagctgctgcggttcggagggacccctatccattttcccggtggtcggccaccaagggctgacgccaaatgctggttcgctgaaggaaagatatgtcatggcggaatcgatcccgctttcgcaatgatggtctgcctcaccctcctgattgcgctgctttctattaatggcttcgcctactttatcaggcgacggataaataagatccagctgataaaagggccaaatcggatactgctcaccctcgaagatgtgacctttattaatccccatttcggcagtaaacgcggtagtagggctagtgtttcatttcagataacttccgaggttcagagtggacggtcccctaggctgagtttttcttctggctccttaacacccgcaacatatgaaaattcaaatattgccatctacgagggggattgggtgtggcttaaaaagttttccctgggggattttggcgatttgaagtccatcaagagccgggcatctgatgtctttgagatgatgaaggacctaaggcacgaaaatattaatcccttgctaggcttcttctacgattccggaatgttcgcaatagttactgagttctgtagtcgaggcagtctggaagacatcttaactaatcaggacgttaaactcgactggatgttcaaaagttccctcttgctcgacttaatcaaggggatgaaataccttcatcacagggagtttgtgcacgggaggcttaagtcccgcaactgcgtggtcgacggtcgcttcgtactcaaagtcaccgactatggatttaatgatatcctggagatgctaagattgtctgaagaggagagctctatggaggagttgctgtggactgctcccgagttgctcagggcccctcgcggatcccgcctcggaagctttgctggggacgtatacagcttcgccatcatcatgcaggaggtgatggtgaggggaactccattctgcatgatggacctgcccgcacaagaaataattaaccgccttaagaagccgccaccggtttaccgacccgtagtcccgcctgaacacgcacctccggagtgccttcagctgatgaagcagtgctgggcggaggcagcggagcagaggcccactttcgatgagatatttaaccagtttaagacatttaacaagggtaagaaaaccaacatcatagacagtatgctacggatgttggaacaatatagttctaaccttgaagatctgattcgcgagcgcaccgaggagctcgaaatcgagaaacaaaaaaccgaaaaactccttacccaaatgcttccccctagcgtggccgagtctctgaagaagggctgcactgtcgaacccgagggtttcgatcttgtaaccctgtacttctcggacattgtggggttcaccactatctccgctatgtctgaacctatagaggtggtggatctccttaatgacttatataccctatttgatgcaatcattgggtcacatgatgtgtacaaggtggaaactatcggggatgcctatatggtcgcatccggtctgccgaagcggaatggctcgagacatgctgctgagattgccaatatgtcactagacattctttcatccgtgggaacttttaaaatgagacacatgccggaagtccccgtaagaatacgaatcgggctccattccgggcctgttgtggcgggagtggttgggttgaccatgccacggtattgtctcttcggtgacacagtgaatactgcaagtaggatggagtcaactggcttaccctataggatccatgtgtcgttgtccactgtaaccatcctgcagaacctctcagaggggtacgaagtcgagctgcgagggagaacagagcttaaagggaagggcaccgaggaaacgttttggctcataggcaaaaagggctttatgaaaccactacctgtccctccccctgtggataaggacggccaggtcggacacggtctgcagcccgtggaaatcgccgctttccaacgtcggaaagccgagagacaacttgttagaaacaagccctag

SEQ ID NO: 118428 - DNA, 3714 bp, Artificial Sequence
  derived and/or modified sequence
tctgcggatgctgaagagtgattttcaaaacatttactaacgctttcaattatttaccccattaatggaatttgtcaacagactggagtccttgacaggattgtgaatgcatagaggatgcaaagaaatggacacactgaggtagctatgccagtggtctgcatgcgcaggcagtaaactgaagacatttgagcggtgaattacttggcatttggaaacaccaccgtctgtgtcgggaaagcagaataactctccagtatctcgtcattagcttgctggaagcaggagggctatgttcctgggactcgggcgcttttctcgccttgttctctggtttgcggctttcaggaaactgctgggacaccatggccttgcatctgccaagttcctgtggtgcttgtgccttctgtctgtcatgtcccttccgcagcaggtgtggacactcccctacaagataggggtggtgggcccttgggcttgtgattcgctgttttcaaaggccctgcctgaggttgctgcgcgattagccattgagcgaatcaaccgggacccatcttttgacctgagttattcttttgaatacgtgattctcaatgaagactgccagacttcgagggctctctccagtttcatttcccaccaccagatggcctcaggatttattggacctaccaaccctggctactgcgaggcagcctcgctcctgggaaacagctgggacaaaggaattttctcttgggcttgtgtgaattatgaattagacaataaaattagctacccgaccttttctcggacactcccttctcccatccgggtgcttgtaactgtcatgaaatatttccagtgggctcatgctggagtcatttcctcagatgaagacatttgggtgcatacagccaatcgagtcgcaagtgctcttcggagccacggcttacctgtaggggtcgtcctgaccacaggacaagacagccaaagcatgcggaaagccctccagaggattcaccaggcagacagaattcgcataatcatcatgtgtatgcattcagctttgattgggggagagactcagatgcatctcttggaatgtgctcatgatctgaaaatgactgatggaacctacgtctttgttccttatgatgccctgctctacagtttaccttataagcacaccccctaccgggtcctaaggaacaacccaaagctccgggaagcctatgatgcagtgttgaccattacagtggagtcccaagaaaagaccttctatcaagccttcacagaggcagcagcaagaggtgaaattcctgagaagctggagttcgatcaagtttcaccgttgtttggaaccatctacaattcaatttactttatcgcacaagccatgaataatgctatgaaagaaaatggacaggctggtgctgccagcctggttcagcattccagaaacatgcagttccatggattcaaccagttgatgaggacagattcaaatggaaatggaatttcagaatatgtaatcctggacaccaacttgaaagaatgggaactccatagcacctacactgtggacatggaaatggagctgctacgtttcggagggacccctattcacttccctggtggcaggccccctagagcagatgcaaaatgctggtttgcagaagggaagatctgccatggaggcatcgaccctgcctttgccatgatggtctgccttactttgcttatagccctgctgtctattaatggatttgcttactttataaggcgtcgtataaataaaatccagttgatcaaaggacccaatagaattctactgactttggaggatgtaacgtttatcaatccccactttggcagtaagagaggaagtcgtgccagtgtaagcttccagattacctcagaggtccaaagtgggaggtccccaagactctccttttcttcagggagtctaactccagctacctatgaaaactccaacatagcgatttatgagggtgattgggtgtggctgaaaaagttctcccttggagattttggagaccttaagtccatcaaatcaagagcaagtgatgtgttcgaaatgatgaaggacttgcgtcatgagaatattaaccctttattgggtttcttctatgattcggggatgtttgccattgtgacagaattctgttcccgagggagcctagaagacatactgacaaatcaagatgtgaaacttgactggatgtttaaatcatcactcttgctggatctcataaagggcatgaagtacttacaccacagagagtttgttcatgggaggctaaagtctcgaaactgtgtggtagatgggcgttttgtactaaaagtgacagattatggctttaacgacatcttagaaatgctgagactctctgaagaggaatcttctatggaagagctgctgtggacggcccctgaactgttgagagctccaagaggcagcaggttaggttcttttgcaggagatgtctatagctttgccatcatcatgcaagaagtgatggtccggggtaccccattctgcatgatggatctgccagctcaagaaatcataaacagacttaagaagcctcctcctgtgtacagaccagtagttcctcctgagcatgcccctccagaatgtctccagctgatgaagcagtgctgggctgaggctgcagaacaacgaccaacttttgatgaaatatttaaccagtttaaaacttttaataaagggaagaagaccaatattattgattctatgcttcggatgttggagcaatattctagcaacttggaagatttgattcgggagcggactgaagagctggaaattgaaaaacagaaaacggaaaagcttctaacacagatgctaccaccatcagttgctgaatctctcaaaaagggctgcacagttgaacctgagggctttgacttggtcaccttgtacttcagcgacattgtgggcttcacaaccatttcagccatgagtgagcccattgaggtcgtggatcttctgaatgacctgtacacactctttgatgcaataattggcagtcatgatgtctacaaggtagagaccattggagatgcctacatggtggcttcaggcctcccaaagaggaatggcagtaggcatgcagctgagattgcaaacatgtccttagatatcctgagctctgtgggcactttcaagatgcggcacatgccagaagtgccggtccgaattcgaattggccttcactcagggccggttgttgctggagtggtgggcctcaccatgcccagatactgcttgtttggagacactgtgaacacagcttctcggatggaatctacaggcttaccttatcgcattcatgtcagtctcagcactgttacaattcttcaaaatctgagtgagggctatgaagtggagcttcgaggaagaacagagctcaagggcaaaggcacagaggaaaccttctggctgattgggaaaaaaggcttcatgaagccccttcctgtgcccccaccagtggacaaagatgggcaagtgggccatggcctgcaaccagtggagattgcagccttccaaagaagaaaagcagaaaggcagttggtgagaaacaagccataaggggcaaagggctccaggatttgaatcttctcttggtgaggcaatgggaaagctcacttcagttcaagaaattgttctgcctgggcaagaaatta

SEQ ID NO: 118429 - protein, 578 aa, Artificial Sequence
  derived and/or modified sequence
MRQQDAPKPTPAACRCSGLARRVLTIAFALLILGLMTWAYAAGVPLASDRYGLLAFGLYGAFLSAHLVAQSLFAYLEHRRVAAAARGPLDAATARSVALTISAYQEDPAYLRQCLASARALLYPRARLRVLMVVDGNRAEDLYMVDMFREVFADEDPATYVWDGNYHQPWEPAAAGAVGAGAYREVEAEDPGRLAVEALVRTRRCVCVAQRWGGKREVMYTAFKALGDSVDYVQVCDSDTRLDPMALLELVRVLDEDPRVGAVGGDVRILNPLDSWVSFLSSLRYWVAFNVERACQSYFHCVSCISGPLGLYRNNLLQQFLEAWYNQKFLGTHCTFGDDRHLTNRMLSMGYATKYTSRSRCYSETPSSFLRWLSQQTRWSKSYFREWLYNALWWHRHHAWMTYEAVVSGLFPFFVAATVLRLFYAGRPWALLWVLLCVQGVALAKAAFAAWLRGCLRMVLLSLYAPLYMCGLLPAKFLALVTMNQSGWGTSGRRKLAANYVPLLPLALWALLLLGGLVRSVAHEARADWSGPSRAAEAYHLAAGAGAYVGYWVAMLTLYWVGVRRLCRRRTGGYRVQV

SEQ ID NO: 118430 - DNA, 1737 bp, Artificial Sequence
  derived and/or modified sequence
atgagacagcaggacgcccccaagcccacccccgccgcctgcagatgcagcggcctggccagaagagtgctgaccatcgccttcgccctgctgatcctgggcctgatgacctgggcctacgccgccggcgtgcccctggccagcgacagatacggcctgctggccttcggcctgtacggcgccttcctgagcgcccacctggtggcccagagcctgttcgcctacctggagcacagaagagtggccgccgccgccagaggccccctggacgccgccaccgccagaagcgtggccctgaccatcagcgcctaccaggaggaccccgcctacctgagacagtgcctggccagcgccagagccctgctgtaccccagagccagactgagagtgctgatggtggtggacggcaacagagccgaggacctgtacatggtggacatgttcagagaggtgttcgccgacgaggaccccgccacctacgtgtgggacggcaactaccaccagccctgggagcccgccgccgccggcgccgtgggcgccggcgcctacagagaggtggaggccgaggaccccggcagactggccgtggaggccctggtgagaaccagaagatgcgtgtgcgtggcccagagatggggcggcaagagagaggtgatgtacaccgccttcaaggccctgggcgacagcgtggactacgtgcaggtgtgcgacagcgacaccagactggaccccatggccctgctggagctggtgagagtgctggacgaggaccccagagtgggcgccgtgggcggcgacgtgagaatcctgaaccccctggacagctgggtgagcttcctgagcagcctgagatactgggtggccttcaacgtggagagagcctgccagagctacttccactgcgtgagctgcatcagcggccccctgggcctgtacagaaacaacctgctgcagcagttcctggaggcctggtacaaccagaagttcctgggcacccactgcaccttcggcgacgacagacacctgaccaacagaatgctgagcatgggctacgccaccaagtacaccagcagaagcagatgctacagcgagacccccagcagcttcctgagatggctgagccagcagaccagatggagcaagagctacttcagagagtggctgtacaacgccctgtggtggcacagacaccacgcctggatgacctacgaggccgtggtgagcggcctgttccccttcttcgtggccgccaccgtgctgagactgttctacgccggcagaccctgggccctgctgtgggtgctgctgtgcgtgcagggcgtggccctggccaaggccgccttcgccgcctggctgagaggctgcctgagaatggtgctgctgagcctgtacgcccccctgtacatgtgcggcctgctgcccgccaagttcctggccctggtgaccatgaaccagagcggctggggcaccagcggcagaagaaagctggccgccaactacgtgcccctgctgcccctggccctgtgggccctgctgctgctgggcggcctggtgagaagcgtggcccacgaggccagagccgactggagcggccccagcagagccgccgaggcctaccacctggccgccggcgccggcgcctacgtgggctactgggtggccatgctgaccctgtactgggtgggcgtgagaagactgtgcagaagaagaaccggcggctacagagtgcaggtgtag

SEQ ID NO: 118431 - DNA, 1737 bp, Artificial Sequence
  derived and/or modified sequence
atgaggcagcaggatgcccccaaaccaacccccgcggcctgtcggtgttccggcctggccagacgggtgctcacaatagcctttgctctgctgatcctcggcctaatgacttgggcctacgctgctggcgttcctctggcctccgaccgttatgggttgctggcgttcggcctgtacggagcgttcctaagtgcacatctggttgctcagtcccttttcgcttatttagagcatcgccgagtggcggccgctgcaagaggtcctctggacgctgcgacggctaggtcagtcgcccttaccataagtgcctaccaggaagaccccgcatacctgaggcagtgcttagcttctgcaagggcattgctgtatcctcgcgcaagactgcgggtcctgatggtggttgacggcaatcgagcggaagacctgtatatggtcgacatgttccgtgaggtctttgccgatgaggatccagcaacatacgtgtgggacgggaattatcatcagccttgggaacccgctgccgcaggggcggtcggtgcaggggcttatagagaggtggaggctgaggaccctggcaggctggccgtggaggctctggtgaggacacgtcggtgcgtatgcgtggcgcagcggtggggcgggaaacgagaagtaatgtatactgccttcaaagctttgggtgatagcgttgattatgttcaggtttgcgattccgataccaggctggaccccatggccctgttagaactggtgcgggtgctggacgaagacccgcgcgtaggagctgtcgggggggacgtgagaattcttaatcctctggattcttgggtgtctttccttagctccctccgatactgggttgcattcaacgtggagagggcctgccagtcatatttccactgtgtgagctgcattagcggacctttgggattataccgcaataacctgctgcaacagttcctcgaagcatggtacaaccagaagttcctaggcacccactgcacgttcggagacgacaggcacctgaccaacagaatgctgagcatgggttacgccactaaatatacctccagaagtagatgttatagcgaaactccgagctcatttctccgttggctttctcaacaaactcggtggagtaagtcctattttcgggagtggctctacaacgcactctggtggcaccgccaccatgcctggatgacctatgaggccgttgtaagcgggctgttccccttcttcgtggcagctacagtacttcggctgttctatgcaggtcggccttgggcgctcctgtgggttctcctatgcgtgcagggggttgctttggctaaagctgcattcgccgcgtggttgaggggctgtctgcgtatggtcctgctgtcgttgtatgcacctctgtacatgtgcggcttgcttcctgcaaaatttctggccctcgtgacgatgaaccagtcgggatgggggacaagcggacgcagaaagctggccgccaactatgtgcccttattacccttggctctgtgggctttgcttttgcttggggggttagtgcgatcggtagcccacgaggcccgagccgactggagtgggccatccagggccgctgaagcctatcacttagcggcaggggctggagcctatgttggatactgggtggccatgctcacattatattgggtgggcgtgcgccgcctgtgcaggcgacgcaccggcggctacagggtgcaggtgtag

SEQ ID NO: 118432 - DNA, 1737 bp, Artificial Sequence
  derived and/or modified sequence
atgaggcagcaggatgcccccaagcccaccccagctgcctgccgctgcagcggcctggccaggagagtgctgaccatcgcctttgccctgctgatcctgggcctgatgacctgggcctatgctgctggggtgcccctggccagtgacagatatggcctgctggccttcggcctgtatggagccttcctgagcgcccacctggtggcccagagcctgtttgcctacctggagcacagaagagtggccgccgccgcccggggccccctggatgctgccacagcccggtctgtggccctgaccatcagcgcctaccaggaggaccctgcctacctgcggcagtgcctggccagcgcccgggccctgctgtacccccgggcccggctgcgggtgctgatggtggtggatggcaacagagctgaggacctgtacatggtggacatgttccgggaggtgtttgctgatgaagatcctgccacctacgtgtgggatggcaactaccaccagccctgggagcctgctgctgctggagctgtgggcgctggggcctaccgggaggtggaggctgaagatcctggccgcctggccgtggaggccctggtgaggacccggcgctgtgtgtgtgtggcccagcgctggggcggcaagcgggaggtgatgtacacagccttcaaggccctgggggacagcgtggactatgtgcaggtgtgtgacagcgacacccggctggaccccatggccctgctggagctggtgcgggtgctggatgaggacccccgggtgggcgctgtgggcggagatgtgcgcatcctgaaccccctggacagctgggtgtccttcctgagcagcctgcgctactgggtggccttcaacgtggagcgggcctgccagagctacttccactgtgtgtcctgcatcagcggccccctgggcctgtacagaaacaacctgctgcagcagttcctggaggcctggtacaaccagaagttcctgggcacccactgcacctttggagatgacagacacctgaccaacaggatgctgtccatgggctacgccaccaagtacaccagccgcagccgctgctacagcgagacccccagcagcttcctgcgctggctgagccagcagacccgctggagcaagagctacttccgggagtggctgtacaatgccctgtggtggcaccgccaccacgcctggatgacctatgaagctgtggtgtctggcctcttccccttctttgtggccgccaccgtgctgcggctcttctacgccggccggccctgggccctgctgtgggtgctgctgtgtgtgcagggcgtggccctggccaaggccgcctttgctgcctggctgcggggctgcctgaggatggtgctgctgagcctgtatgcccccctgtacatgtgtggcctgctgcctgccaagttcctggccctggtgaccatgaaccagagcggctggggcaccagcggccgcaggaagctggccgccaactacgtgcccctgctgcccctggccctgtgggccctgctgctgctgggcggcctggtgcgctctgtggcccacgaggcccgggctgactggagcggccccagcagagctgctgaggcctaccacctggccgccggggccggggcctacgtgggctactgggtggccatgctgaccctgtactgggtgggcgtgcggcggctgtgcagaagaagaactggaggctacagagtgcaggtgtag

SEQ ID NO: 118433 - DNA, 1737 bp, Artificial Sequence
  derived and/or modified sequence
atgcggcagcaggacgcccccaagcccacccccgccgcctgccggtgttccggattagccaggcgtgtgctgacgattgcatttgcactgctgatcctgggtcttatgacatgggcatacgctgcaggcgtccctctcgcttccgaccgctacggactgcttgcatttgggctgtacggggcattcctgagcgctcatctcgttgctcagagtctgttcgcttatttagagcacaggagagtggccgcagccgcgagaggaccgctggacgccgccaccgctcggagtgtcgcactgacgatctctgcgtaccaagaggaccccgcctacctgagacagtgtctggcctcggcacgagctcttttatatccacgcgctcggctgagagtcctcatggtggtggatgggaatagagccgaggacctgtatatggttgatatgtttagggaggtgttcgccgatgaagaccccgctacctatgtgtgggatggcaactatcaccagccatgggaaccagccgcggctggtgcggtgggagcaggagcatatcgggaggtggaggcggaggaccccggtcgcctggccgtggaggcactcgtgcggactcgccgctgcgtttgcgttgcacagcgctggggtgggaagcgcgaggtgatgtacacggcttttaaggctctaggcgactcggtggattacgtgcaggtctgcgactccgatactaggctggaccccatggcccttttggaactggtgcgggtcctggatgaggatccacgggtgggcgcagttggaggcgacgtaagaattttgaatccactcgactcatgggtgagcttcctgagctcactgcggtactgggttgcatttaatgtagagcgggcctgtcaatcgtacttccactgtgtatcctgtatatctgggcctctgggcttgtatcgtaacaatctgcttcagcaattcctggaggcctggtataaccagaagtttttgggtacccactgtacattcggcgacgataggcatcttaccaaccggatgctttctatgggatacgctacgaagtacacttcaaggtctagatgctactctgaaacaccctccagcttcttgcgctggctgagccagcagacccgatggtctaagtcctactttagggaatggctgtataatgccctgtggtggcatcggcatcacgcatggatgacatatgaagccgttgtctccgggcttttccctttctttgtagcagcgaccgtgcttcgcctgttttacgccggccgaccatgggcccttctttgggtattgttgtgtgtccagggggtcgcccttgctaaggcggcctttgcagcctggctccgcgggtgcctgcggatggtgttgcttagtttgtatgcgcccctctatatgtgcggcttgcttcctgcaaagtttctggcacttgtaactatgaaccagtctgggtggggaacatcaggaaggcgaaaattggcggccaactatgtaccactcctacccctggcactgtgggcgctgctccttttgggcggcctcgtccgcagcgttgctcacgaagctagagctgattggtctgggccgtcacgagccgccgaggcctaccacctggcagcaggcgcaggggcctacgtcggctactgggtggctatgttgaccctgtattgggttggggttcgtcggctttgtagacgccgcaccgggggctaccgggtgcaagtgtag

SEQ ID NO: 118434 - DNA, 1737 bp, Artificial Sequence
  derived and/or modified sequence
atgaggcagcaggacgcaccgaaaccaactcccgctgcctgccgttgttctggattggctaggagagtattgactattgcatttgccctgcttatcctgggactcatgacctgggcttacgcagccggagtgcccctggcgtctgaccgttacggactcttagctttcggcctttacggagcttttctgagcgcccacctcgttgctcagtcgcttttcgcgtatctggagcaccgccgagtcgccgcagcagctagagggcctcttgacgcagcaacggcacgcagcgtggcgctcacaatctccgcttaccaggaagacccagcttatctgcggcagtgcctcgcctcagcacgtgccctgctttatcctcgcgcacggcttagagttctcatggttgtggacggaaatcgcgctgaggacctctacatggttgacatgtttcgagaagtatttgctgacgaggacccagctacttatgtgtgggatggcaactatcaccagccctgggagcccgctgcagccggagccgttggcgcaggcgcttatcgcgaggttgaagcggaagatcccggtagactggccgtcgaagctcttgtcagaacccgtaggtgtgtgtgtgtggcccaacgttggggcggaaagagggaagtgatgtacaccgcgtttaaagctctcggcgactcagttgattatgtgcaggtctgcgattcagatacacgcctcgatcctatggctctgctggagctcgtgcgggtgttggacgaagacccacgcgtgggtgccgtcgggggtgacgtaaggattctgaacccactcgacagctgggtgtctttcctaagttctctgcggtactgggtggccttcaacgtggagagagcttgccagagttattttcattgtgtgtcatgcataagcggtcctcttggactatataggaacaacctgctgcagcagtttctcgaggcctggtacaatcagaagttcttaggaacccattgcactttcggtgatgatcggcatctcactaatcggatgttgagtatgggatacgctacgaaatacactagcagaagccggtgctactccgagacgccgtcctcttttctgaggtggctgagccagcagactaggtggagtaaaagttacttcagggagtggctctacaatgctctatggtggcaccgccatcacgcttggatgacatatgaagccgtggtcagcgggctgttccccttcttcgtcgccgctactgtgctgcgcttgttctacgcaggtaggccatgggccttgctgtgggtgctcctatgcgtgcagggcgtagccctggcaaaagccgcattcgctgcctggctcagaggctgtctgcgtatggtcttgcttagcctctatgcacccctgtatatgtgtggcctcctccctgcaaaatttcttgccctcgttacaatgaatcagagcggatggggtacgtctggcaggagaaaactcgccgcaaactacgtcccattgttaccattagcactgtgggccctgctccttctcgggggactcgtccggtcggtggctcacgaagccagggcggactggtctggcccttcaagagcggctgaggcctaccatctcgctgccggtgcaggagcctatgttgggtattgggtggccatgctgaccttgtattgggtgggggtccgtcgcctgtgccggagacgcactggcggatacagagtgcaggtttag

SEQ ID NO: 118435 - DNA, 2087 bp, Artificial Sequence
  derived and/or modified sequence
cggagagaagagagagcccggccagacccactgcgatgagacagcaggacgcgcccaagcccactcctgcagcctgccgctgctccggcctggcccggagggtgctgaccatcgccttcgccctgctcatcctgggcctcatgacctgggcctacgccgccggggtgccgctggcctccgatcgctacggcctcctggccttcggcctctacggggccttcctttcagcgcacctggtggcgcagagcctcttcgcgtacctggagcaccggcgggtggcggcggcggcgcgggggccgctggatgcagccaccgcgcgcagtgtggcgctgaccatctccgcctaccaggaggaccccgcgtacctgcgccagtgcctggcgtccgcccgcgccctgctgtacccgcgcgcgcggctgcgcgtcctcatggtggtggatggcaaccgcgccgaggacctctacatggtcgacatgttccgcgaggtcttcgctgacgaggaccccgccacgtacgtgtgggacggcaactaccaccagccctgggaacccgcggcggcgggcgcggtgggcgccggagcctatcgggaggtggaggcggaggatcctgggcggctggcagtggaggcgctggtgaggactcgcaggtgcgtgtgcgtggcgcagcgctggggcggcaagcgcgaggtcatgtacacagccttcaaggcgctcggagattcggtggactacgtgcaggtctgtgactcggacacaaggttggaccccatggcactgctggagctcgtgcgggtactggacgaggacccccgggtaggggctgttggtggggacgtgcggatccttaaccctctggactcctgggtcagcttcctaagcagcctgcgatactgggtagccttcaatgtggagcgggcttgtcagagctacttccactgtgtatcctgcatcagcggtcctctaggcctatataggaataacctcttgcagcagtttcttgaggcctggtacaaccagaagttcctgggtacccactgtacttttggggatgaccggcacctcaccaaccgcatgctcagcatgggttatgctaccaagtacacctccaggtcccgctgctactcagagacgccctcgtccttcctgcggtggctgagccagcagacacgctggtccaagtcgtacttccgtgagtggctgtacaacgcgctctggtggcaccggcaccatgcgtggatgacctacgaggcggtggtctccggcctgttccccttcttcgtggcggccactgtgctgcgtctgttctacgcgggccgcccttgggcgctgctgtgggtgctgctgtgcgtgcagggcgtggcactggccaaggcggccttcgcggcctggctgcggggctgcctgcgcatggtgcttctgtcgctctacgcgcccctctacatgtgtggcctcctgcctgccaagttcctggcgctagtcaccatgaaccagagtggctggggcacctcgggccggcggaagctggccgctaactacgtccctctgctgcccctggcgctctgggcgctgctgctgcttgggggcctggtccgcagcgtagcacacgaggccagggccgactggagcggcccttcccgcgcagccgaggcctaccacttggccgcgggggccggcgcctacgtgggctactgggtggccatgttgacgctgtactgggtgggcgtgcggaggctttgccggcggcggaccgggggctaccgcgtccaggtgtgagtccagccacgcggatgccgcctcaagggtcttcaggggaggccagaggagagctgctgggccccgagccacgaacttgctgggtggttctctgggcctcagtttccctcctctgcaaaacgagggggtcagcccaagattcttcagtctggactatattgggactgggacttctgggtctccagggagggtatttattggtcagggtgtgggatctgaggagtggagggaaagggtcctgctttctcctcgttcttatttaatctccatttctactgtgtgatcaggatgtaataaagaattttatttattttc

SEQ ID NO: 118436 - protein, 131 aa, Artificial Sequence
  derived and/or modified sequence
MNLPSTKVSWAAVTLLLLLLLLPPALLSSGAAAQPLPDCCRQKTCSCRLYELLHGAGNHAAGILTLGKRRSGPPGLQGRLQRLLQASGNHAAGILTMGRRAGAEPAPRPCLGRRCSAPAAASVAPGGQSGI

SEQ ID NO: 118437 - DNA, 225 bp, Artificial Sequence
  derived and/or modified sequence
atgtttgtgatcatcagcctgcacaactgtgtggtgatcagctttgtgctcttcctgtttggaggcaacaacttcatccagaacttctacctgccccagaactacatcgaccagttcctgctgaccagcttccccaccttcacctctgtgggcgtgctgattgtgctggtgctgtgcagcgccttcctgctgctgtggcagggcgagggcgtgaacctgaggtag

SEQ ID NO: 118438 - DNA, 396 bp, Artificial Sequence
  derived and/or modified sequence
atgaacctaccatcaacaaaggtatcttgggccgctgttacccttctgctactcctcctgctcctgcctccagcgttactcagtagcggagctgctgctcaacctttgcctgactgttgccggcagaaaacatgctcatgcagattatacgagcttttgcacggcgcaggcaatcacgccgcaggaatcctgaccttaggcaagagacggtcaggcccgcccggtcttcaggggcggcttcaacggctgctacaggcgtctggcaaccatgctgccggcattctgaccatgggcagacgggccggagccgagcccgctcctaggccttgtttaggcaggcggtgtagcgctccggcggcagcgagcgtcgcgccggggggacagagtggaatctag

SEQ ID NO: 118439 - DNA, 577 bp, Artificial Sequence
  derived and/or modified sequence
cacaattgacagcctcaaggttcctggctttttgaaccaccacagacatctcctttcccggctaccccaccctgagcgccagacaccatgaaccttccttccacaaaggtctcctgggccgccgtgacgctactgctgctgctgctgctgctgccgcccgcgctgttgtcgtccggggcggctgcacagcccctgcccgactgctgtcgtcaaaagacttgctcttgccgcctctacgagctgctgcacggcgcgggcaatcacgcggccggcatcctcacgctgggcaagcggaggtccgggcccccgggcctccagggtcggctgcagcgcctcctgcaggccagcggcaaccacgccgcgggcatcctgaccatgggccgccgcgcaggcgcagagccagcgccgcgcccctgcctcgggcgccgctgttccgccccggccgccgcctccgtcgcgcccggaggacagtccgggatctgagtcgttcttcgggccctgtcctggcccaggcctctgccctctgcccacccagcgtcagcccccagaaaaaaggcaataaagacgagtctccatt

SEQ ID NO: 118440 - DNA, 396 bp, Artificial Sequence
  derived and/or modified sequence
atgaacctgcccagcaccaaggtgtcctgggccgctgtgaccctgctgctgctgctgctgctgctgcccccagccctgctgagcagtggagctgctgcccagcccctgcctgactgctgccggcagaagacctgcagctgccgcctgtatgagctgctgcacggggccggcaaccacgccgccggcatcctgaccctgggcaagagaagaagtggccccccaggcctgcagggccgcctgcagaggctgctgcaggccagcggcaaccacgccgccggcatcctgaccatgggcagaagagctggagctgagcccgccccccggccctgcctgggccgccgctgcagcgccccagctgctgcctctgtggcccctgggggccagagcggcatctag

SEQ ID NO: 118441 - DNA, 396 bp, Artificial Sequence
  derived and/or modified sequence
atgaacctgcccagcaccaaggtgagctgggccgccgtgaccctgttgttactgctgctgctgctccctccagccctgctctcttcaggcgcggccgcacaacctctcccagattgctgtcggcaaaagacatgtagttgtcgtctttacgaactgcttcacggcgctggcaaccatgctgcagggatcctcacactcgggaagcggcggtcagggccaccaggcctccagggtaggctgcagcgtttattgcaggcaagcggaaatcatgccgcgggcatcttaactatgggtcgcagagcaggagccgagcccgccccaaggccgtgtttaggcagacggtgtagtgctcccgccgcggcgagcgtggcccctggtgggcagtcagggatctag

SEQ ID NO: 118442 - DNA, 396 bp, Artificial Sequence
  derived and/or modified sequence
atgaatctgccatcgaccaaggtgtcatgggctgcagtcaccctgctgctgcttctgctgctcctgccaccagctctgctttcctctggagctgctgctcagccgcttccagactgttgccgccaaaagacttgctcttgccgtctgtatgagttactccatggcgctgggaatcacgcagccggaatcctgactctgggaaagcggaggagcggaccccctggactgcaggggcgactccaacgacttttacaggcatcaggcaaccacgcggcaggcattcttaccatgggcaggcgggcaggtgctgagcctgcgcctagaccctgcctgggcaggcgctgtagcgcaccagccgcagctagtgtggccccaggtggccagtccggcatttag

SEQ ID NO: 118443 - DNA, 396 bp, Artificial Sequence
  derived and/or modified sequence
atgaacctgcccagcaccaaggtgagctgggccgccgtgaccctgctgctgctgctgctgctgctgccccccgccctgctgagcagcggcgccgccgcccagcccctgcccgactgctgcagacagaagacctgcagctgcagactgtacgagctgctgcacggcgccggcaaccacgccgccggcatcctgaccctgggcaagagaagaagcggcccccccggcctgcagggcagactgcagagactgctgcaggccagcggcaaccacgccgccggcatcctgaccatgggcagaagagccggcgccgagcccgcccccagaccctgcctgggcagaagatgcagcgcccccgccgccgccagcgtggcccccggcggccagagcggcatctag

SEQ ID NO: 118444 - protein, 444 aa, Artificial Sequence
  derived and/or modified sequence
MSGTKLEDSPPCRNWSSASELNETQEPFLNPTDYDDEEFLRYLWREYLHPKEYEWVLIAGYIIVFVVALIGNVLVCVAVWKNHHMRTVTNYFIVNLSLADVLVTITCLPATLVVDITETWFFGQSLCKVIPYLQTVSVSVSVLTLSCIALDRWYAICHPLMFKSTAKRARNSIVIIWIVSCIIMIPQAIVMECSTVFPGLANKTTLFTVCDERWGGEIYPKMYHICFFLVTYMAPLCLMVLAYLQIFRKLWCRQIPGTSSVVQRKWKPLQPVSQPRGPGQPTKSRMSAVAAEIKQIRARRKTARMLMIVLLVFAICYLPISILNVLKRVFGMFAHTEDRETVYAWFTFSHWLVYANSAANPIIYNFLSGKFREEFKAAFSCCCLGVHHRQEDRLTRGRTSTESRKSLTTQISNFDNISKLSEQVVLTSISTLPAANGAGPLQNW

SEQ ID NO: 118445 - DNA, 1335 bp, Artificial Sequence
  derived and/or modified sequence
atgagcggcaccaagctggaggacagccccccctgcagaaactggagcagcgccagcgagctgaacgagacccaggagcccttcctgaaccccaccgactacgacgacgaggagttcctgagatacctgtggagagagtacctgcaccccaaggagtacgagtgggtgctgatcgccggctacatcatcgtgttcgtggtggccctgatcggcaacgtgctggtgtgcgtggccgtgtggaagaaccaccacatgagaaccgtgaccaactacttcatcgtgaacctgagcctggccgacgtgctggtgaccatcacctgcctgcccgccaccctggtggtggacatcaccgagacctggttcttcggccagagcctgtgcaaggtgatcccctacctgcagaccgtgagcgtgagcgtgagcgtgctgaccctgagctgcatcgccctggacagatggtacgccatctgccaccccctgatgttcaagagcaccgccaagagagccagaaacagcatcgtgatcatctggatcgtgagctgcatcatcatgatcccccaggccatcgtgatggagtgcagcaccgtgttccccggcctggccaacaagaccaccctgttcaccgtgtgcgacgagagatggggcggcgagatctaccccaagatgtaccacatctgcttcttcctggtgacctacatggcccccctgtgcctgatggtgctggcctacctgcagatcttcagaaagctgtggtgcagacagatccccggcaccagcagcgtggtgcagagaaagtggaagcccctgcagcccgtgagccagcccagaggccccggccagcccaccaagagcagaatgagcgccgtggccgccgagatcaagcagatcagagccagaagaaagaccgccagaatgctgatgatcgtgctgctggtgttcgccatctgctacctgcccatcagcatcctgaacgtgctgaagagagtgttcggcatgttcgcccacaccgaggacagagagaccgtgtacgcctggttcaccttcagccactggctggtgtacgccaacagcgccgccaaccccatcatctacaacttcctgagcggcaagttcagagaggagttcaaggccgccttcagctgctgctgcctgggcgtgcaccacagacaggaggacagactgaccagaggcagaaccagcaccgagagcagaaagagcctgaccacccagatcagcaacttcgacaacatcagcaagctgagcgagcaggtggtgctgaccagcatcagcaccctgcccgccgccaacggcgccggccccctgcagaactggtag

SEQ ID NO: 118446 - DNA, 1335 bp, Artificial Sequence
  derived and/or modified sequence
atgagcggaaccaagctggaagattcacccccatgtcgcaactggtcctctgcctcagagctgaatgagacacaggagcccttcctaaatcctactgactacgacgatgaagagttcctcagatatctgtggcgggagtatctgcatcctaaggagtacgagtgggtgctaattgcagggtatattattgtgttcgtcgtggctctgatcggtaatgtccttgtgtgtgtggctgtgtggaaaaaccaccacatgcgcacagtgacaaactacttcattgttaatctgtccctggcggacgttctcgtcaccatcacctgcttgcccgccactctggtcgtggatatcaccgagacatggttttttggacaaagcctttgcaaagtgatcccctaccttcagacggtaagcgtgagcgtgtccgtgttaacactctcatgcatcgccctggacagatggtacgccatttgtcatcctctgatgttcaagtctactgctaaaagggcccgcaattctatcgtgattatttggattgtgtcttgcattatcatgattcctcaagcaatagtgatggaatgttcaacggtcttccctggactcgctaataagactaccctgttcactgtgtgtgacgagcggtggggtggggagatatatccaaagatgtaccatatctgcttcttcctcgttacctatatggctcccctgtgtctcatggtcctggcgtacctccagatcttccggaaactgtggtgcagacagatcccaggtacatcctccgtagtccaacgcaaatggaaacctctgcagcctgtgagccaaccccgaggccccggccagcccaccaagtcacggatgtccgccgtcgctgccgaaatcaagcagattcgggccagacggaaaacagcgagaatgttaatgatagtcctgctagtttttgctatctgctatcttcctatatcaatcctaaatgtgctgaagagagtttttggaatgttcgcacacactgaagatagggaaacagtgtatgcgtggttcacatttagtcactggttggtttacgccaattctgctgccaaccccattatatacaacttcctcagcggcaaatttcgcgaggagttcaaggccgcattctcctgctgctgcttgggcgtgcatcatcggcaagaagataggctgaccagaggaaggaccagtacggaatctagaaagagcctgaccacacagataagtaatttcgacaacatctccaaactatcagagcaggtagtgctgaccagcattagcacactcccggcagccaatggggccggtcctctccagaactggtag

SEQ ID NO: 118447 - DNA, 1837 bp, Artificial Sequence
  derived and/or modified sequence
gactgagtgctggaatgaggagtaattgagcttcagctgagccggacgtagctttctcctcctggtgtcattgctgcagcctccagtgccgggtccctagttcctcagctgcctatcttcccggtgcaacatcgcctgtaaagacagcaaagccaccgcagaagttgcccggcagaagactccggaggcattggctcagtaacttttcacgtcattttctgctcgggagccccttctagcctctccgcgcagcctttcccaccgcaaatcaccagtgctcatggggcaggcggagaggagcttgcagcattgagcggaaccggacttgagcccgtgatgtccggcaccaaattggaggactcccccccttgtcgcaactggtcatctgcttcggagctgaatgaaactcaagagccctttttaaaccccaccgactatgacgacgaggaattcctgcggtacctgtggagggaatacctgcacccgaaagaatatgagtgggtcctgatcgccgggtacatcatcgtgttcgtcgtggctctcattgggaacgtcctggtttgtgtggcagtgtggaagaaccaccacatgaggacggtaaccaactacttcatagtcaatctttctctggctgatgtgctcgtgaccatcacctgccttccagccacactggtcgtggatatcactgagacctggttttttggacagtccctttgcaaagtgattccttatctacagaccgtgtcggtgtctgtgtctgtcctcacactgagctgtatcgccttggatcggtggtatgcaatctgtcaccctttgatgtttaagagcacagcaaagcgggcccgtaacagcattgtcatcatctggattgtctcctgcattataatgattcctcaggccatcgtcatggagtgcagcaccgtgttcccaggcttagccaataaaaccaccctctttacggtgtgtgatgagcgctggggtggtgaaatttatcccaagatgtaccacatctgtttctttctggtgacatacatggcaccactgtgtctcatggtgttggcttatctgcaaatatttcgcaaactctggtgtcgacagatccctggaacatcatctgtagttcagagaaaatggaagcccctgcagcctgtttcacagcctcgagggccaggacagccaacgaagtcccggatgagcgctgtggcggctgaaataaagcagatccgagccagaaggaaaacagcccggatgttgatgattgtgcttttggtatttgcaatttgctatctaccaattagcatcctcaatgtgctaaagagagtatttgggatgtttgcccatactgaagacagagagactgtgtatgcctggtttaccttttcacactggcttgtatatgccaatagtgctgcgaatccaattatttataattttctcagtggaaaatttcgagaggaatttaaagctgcgttttcttgctgttgccttggagttcaccatcgccaggaggatcggctcaccaggggacgaactagcacagagagccggaagtccttgaccactcaaatcagcaactttgataacatatcaaaactttctgagcaagttgtgctcactagcataagcacactcccagcagccaatggagcaggaccacttcaaaactggtagaatatttattcatatgacaaggatacctgagtaaaactatcctttttaaaatcactgggaacagaaattttattatcctatgatgtgaagctaaaattacttgtggatcttttttttttttaatctattgctctttggaaataaaaaaaaagtcagtttaaaatga

SEQ ID NO: 118448 - DNA, 1335 bp, Artificial Sequence
  derived and/or modified sequence
atgagcggcaccaagctggaggacagccccccctgcaggaactggagcagcgccagcgagctgaatgagacccaggagcccttcctgaaccccacagattatgatgatgaggagttcctgcgctacctgtggagggagtacctgcaccccaaggagtatgagtgggtgctgattgctggctacatcatcgtgtttgtggtggccctgattggaaatgtgctggtgtgtgtggccgtgtggaagaaccaccacatgaggacagtgaccaactacttcatcgtgaacctgagcctggctgatgtgctggtgaccatcacctgcctgcctgccaccctggtggtggacatcacagagacctggttcttcggccagagcctgtgcaaggtgatcccctacctgcagacagtgtctgtgtctgtgtctgtgctgaccctgagctgcatcgccctggaccgctggtacgccatctgccaccccctgatgttcaagagcacagccaagagggccaggaacagcatcgtcatcatctggatcgtgtcctgcatcatcatgatcccccaggccatcgtgatggagtgcagcacagtgtttcctggcctggccaacaagaccaccctcttcaccgtgtgtgatgagcgctggggcggggagatctaccccaagatgtaccacatctgcttcttcctggtgacctacatggcccccctgtgcctgatggtgctggcctacctgcagatcttcaggaagctgtggtgccggcagatccctggcaccagctctgtggtgcagaggaagtggaagcccctgcagcctgtgtcccagccccggggccctggccagcccaccaagagcaggatgtctgctgtggccgctgagatcaagcagatccgggcccggaggaagacagccaggatgctgatgattgtgctgctggtgtttgccatctgctacctgcccatcagcatcctgaatgtgctgaagagggtgtttggcatgtttgcccacacagaagatcgggagaccgtgtatgcctggttcaccttcagccactggctggtgtatgccaacagcgctgccaaccccatcatctacaacttcctgagcggcaagttccgggaggagttcaaggccgccttcagctgctgctgcctgggcgtgcaccaccggcaggaggaccggctgacccggggccgcaccagcacagagagcaggaagagcctgaccacccagatcagcaactttgacaacatcagcaagctgtctgagcaggtggtgctgaccagcatcagcaccctgcctgctgccaacggggccggccccctgcagaactggtag

SEQ ID NO: 118449 - DNA, 1335 bp, Artificial Sequence
  derived and/or modified sequence
atgagcggcaccaagctggaggacagccccccctgccggaactggtctagtgctagcgaacttaacgaaacgcaggagccatttttaaaccctaccgattacgatgacgaggagtttctcaggtacctgtggagagagtacttacaccctaaggagtatgaatgggtgctcatcgccggttacatcatcgtgtttgttgtagcattgatcgggaatgtccttgtttgcgtggcagtgtggaagaatcaccacatgcgcaccgtgacaaattatttcatcgtgaatctcagccttgcggacgttcttgtcacgataacctgcctgcctgccactctagtcgtcgatattacggagacctggttcttcgggcagtctctctgtaaagtgattccttacctccagacagtgagtgtttccgtgtctgtgctgactctgtcctgtattgctctggatcgatggtacgcaatctgccatcctctgatgtttaagtcaacagccaagagggcccgaaattctatcgtaataatctggattgtaagctgtatcatcatgatcccacaggccattgtcatggaatgtagcaccgtattccccggattagccaataagactaccctgtttactgtttgtgacgaacggtggggaggggagatctatccaaaaatgtaccatatctgtttttttcttgtgacttatatggcacctttgtgcttgatggtccttgcttatctgcagattttccgcaaactttggtgccggcaaatcccaggcacgtcatctgtcgtacaacgcaagtggaaaccactgcaacctgtgtcacaaccccgtggtcccggccaacctacaaagagcagaatgagcgcagtggcggctgagataaaacagatcagggctcgcaggaagaccgctcgcatgctgatgatcgttttgctcgtattcgctatatgctatctgccgatcagcattctcaacgtcctcaaacgcgtgttcggaatgttcgctcataccgaggatcgcgaaacagtttacgcctggttcacctttagtcattggctggtgtacgcgaatagcgctgcaaatcctattatttataactttctctccggcaagtttcgggaggagtttaaggctgctttctcttgctgttgtctgggtgtgcatcataggcaggaagatagactgaccaggggccgaaccagtacagaaagccgaaagagcttaactacgcaaatttctaacttcgacaatatatctaagctgagcgagcaagtagttctgacctccattagtacgttgcccgcagctaatggagcagggcccctgcagaactggtag

SEQ ID NO: 118450 - DNA, 1335 bp, Artificial Sequence
  derived and/or modified sequence
atgtcagggactaagctcgaggattcgcccccatgcagaaattggtctagcgccagcgaactaaacgagacacaggaaccattcctcaaccctactgattatgatgacgaagagtttctgcggtacctgtggcgcgagtaccttcatcccaaagaatatgagtgggttttaatcgcaggctacataatcgtgttcgtggtggctttgataggtaacgtgctggtgtgtgtggccgtgtggaagaaccatcacatgcgcactgttactaactattttatcgtaaacttgagtctggccgacgttttggttactatcacatgcctgcctgccactttagtggtcgacattacagaaacctggttttttgggcagtctctctgcaaggttataccctatctgcagacggtatctgttagtgtatcagttctaaccttgtcctgcatagccctcgataggtggtacgccatttgccaccccttgatgtttaagtcaactgccaagagagcccgtaacagcattgtgattatctggatcgtgtcttgtatcataatgattccccaggctatcgtcatggagtgtagtacagtattccccggattggcgaataaaacaaccctgtttacagtgtgcgatgaaaggtgggggggagagatttatccgaaaatgtaccatatttgttttttcctagtgacatacatggcacccctgtgtctgatggtgctggcatacctgcagattttcagaaagttgtggtgcaggcaaattcctggcacaagctccgtagtacagcgcaagtggaagcccctgcagcctgtctcacagcctcggggaccgggacagccgactaagtcccgaatgtccgctgtggccgctgagatcaagcagatcagggcgagaagaaagacggctcgtatgctgatgattgtgctgctggtctttgctatatgctatctgccaattagcatcttaaacgtgcttaaaagggttttcggtatgttcgcacacaccgaagaccgcgagactgtttacgcctggttcaccttttcccattggctcgtgtacgcaaatagcgccgcaaacccaattatttacaactttctgtccggcaagttccgtgaggaattcaaagcagccttttcctgttgctgcctgggagtgcatcacaggcaagaagacaggctcacccgtggacggactagtaccgaatccagaaagtccctgaccacgcagatcagtaacttcgacaatatatctaagctctccgagcaggtggtactaacgagcatctccactttaccagcggctaatggcgctgggccactccagaactggtag

SEQ ID NO: 118451 - protein, 582 aa, Artificial Sequence
  derived and/or modified sequence
MRSPPCGLLRWFGGPLLASWCRCHLRFRAFGTSAGWYRAFPAPPPLLPPACPSPRDYRPHVSLSPFLSRPSRGGSSSSSSSRRRSPVAAVAGEPMAYSQGGGKKKVCYYYDGDIGNYYYGQGHPMKPHRIRMTHNLLLNYGLYRKMEIYRPHKATAEEMTKYHSDEYIKFLRSIRPDNMSEYSKQMQRFNVGEDCPVFDGLFEFCQLSTGGSVAGAVKLNRQQTDMAVNWAGGLHHAKKSEASGFCYVNDIVLAILELLKYHQRVLYIDIDIHHGDGVEEAFYTTDRVMTVSFHKYGEYFPGTGDLRDIGAGKGKYYAVNFPMRDGIDDESYGQIFKPIISKVMEMYQPSAVVLQCGADSLSGDRLGCFNLTVKGHAKCVEVVKTFNLPLLMLGGGGYTIRNVARCWTYETAVALDCEIPNELPYNDYFEYFGPDFKLHISPSNMTNQNTPEYMEKIKQRLFENLRMLPHAPGVQMQAIPEDAVHEDSGDEDGEDPDKRISIRASDKRIACDEEFSDSEDEGEGGRRNVADHKKGAKKARIEEDKKETEDKKTDVKEEDKSKDNSGEKTDTKGTKSEQLSNP

SEQ ID NO: 118452 - protein, 488 aa, Artificial Sequence
  derived and/or modified sequence
MAYSQGGGKKKVCYYYDGDIGNYYYGQGHPMKPHRIRMTHNLLLNYGLYRKMEIYRPHKATAEEMTKYHSDEYIKFLRSIRPDNMSEYSKQMQRFNVGEDCPVFDGLFEFCQLSTGGSVAGAVKLNRQQTDMAVNWAGGLHHAKKSEASGFCYVNDIVLAILELLKYHQRVLYIDIDIHHGDGVEEAFYTTDRVMTVSFHKYGEYFPGTGDLRDIGAGKGKYYAVNFPMRDGIDDESYGQIFKPIISKVMEMYQPSAVVLQCGADSLSGDRLGCFNLTVKGHAKCVEVVKTFNLPLLMLGGGGYTIRNVARCWTYETAVALDCEIPNELPYNDYFEYFGPDFKLHISPSNMTNQNTPEYMEKIKQRLFENLRMLPHAPGVQMQAIPEDAVHEDSGDEDGEDPDKRISIRASDKRIACDEEFSDSEDEGEGGRRNVADHKKGAKKARIEEDKKETEDKKTDVKEEDKSKDNSGEKTDTKGTKSEQLSNP

SEQ ID NO: 118453 - DNA, 6656 bp, Artificial Sequence
  derived and/or modified sequence
agtggatgcgctcacctccctgcggcctcctgaggtggtttggtggccccctcctcgcgagttggtgccgctgccacctccgattccgagctttcggcacctctgccgggtggtaccgagccttcccggcgccccctcctctcctcccaccggcctgcccttccccgcgggactatcgcccccacgtttccctcagcccttttctctcccggccgagccgcggcggcagcagcagcagcagcagcagcaggaggaggagcccggtggcggcggtggccggggagcccatggcgtacagtcaaggaggcggcaaaaaaaaagtctgctactactacgacggtgatattggaaattattattatggacagggtcatcccatgaagcctcatagaatccgcatgacccataacttgctgttaaattatggcttatacagaaaaatggaaatatataggccccataaagccactgccgaagaaatgacaaaatatcacagtgatgagtatatcaaatttctacggtcaataagaccagataacatgtctgagtatagtaagcagatgcagagatttaatgttggagaagattgtccagtgtttgatggactctttgagttttgtcagctctcaactggcggttcagttgctggagctgtgaagttaaaccgacaacagactgatatggctgttaattgggctggaggattacatcatgctaagaaatcagaagcatcaggattctgttacgttaatgatattgtgcttgccatccttgaattactaaagtatcatcagagagtcttatatattgatatagatattcatcatggtgatggtgttgaagaagctttttatacaacagatcgtgtaatgacggtatcattccataaatatggggaatactttcctggcacaggagacttgagggatattggtgctggaaaaggcaaatactatgctgtcaattttccaatgagagatggtatagatgatgagtcatatgggcagatatttaagcctattatctcaaaggtgatggagatgtatcaacctagtgctgtggtattacagtgtggtgcagactcattatctggtgatagactgggttgtttcaatctaacagtcaaaggtcatgctaaatgtgtagaagttgtaaaaacttttaacttaccattactgatgcttggaggaggtggctacacaatccgtaatgttgctcgatgttggacatatgagactgcagttgcccttgattgtgagattcccaatgagttgccatataatgattactttgagtattttggaccagacttcaaactgcatattagtccttcaaacatgacaaaccagaacactccagaatatatggaaaagataaaacagcgtttgtttgaaaatttgcgcatgttacctcatgcacctggtgtccagatgcaagctattccagaagatgctgttcatgaagacagtggagatgaagatggagaagatccagacaagagaatttctattcgagcatcagacaagcggatagcttgtgatgaagaattctcagattctgaggatgaaggagaaggaggtcgaagaaatgtggctgatcataagaaaggagcaaagaaagctagaattgaagaagataagaaagaaacagaggacaaaaaaacagacgttaaggaagaagataaatccaaggacaacagtggtgaaaaaacagataccaaaggaaccaaatcagaacagctcagcaacccctgaatttgacagtctcaccaatttcagaaaatcattaaaaagaaaatattgaaaggaaaatgttttctttttgaagacttctggcttcattttatactactttggcatggactgtatttattttcaaatggctttttcgtttttgtttttcttggcaagttttattgtgagtttttctaattatgaagcaaaatttcttttctccaccatgctttatgtgatagtatttaaaattgatgtgagttattatgtcaaaaaaactgatctattaaagaagtaattggcctttctgagctgatttttccatcttttgtaattatctttattaaaaaattgtacttggattatcttttgtctgtttattactacaatatgaagtcttgtttcagtggctaatgacatcatttctgtagacttacaatacactctaggtgaaagataatgattacagcttgaaagataactatttgctgtttctttgggaagagtatttatagtaattattacttatctttgcaatagaaattctaccaccttgccctctatagcttagccagttagtatcagtgaagattaacatcccattacaatttatgaaataatacagactctgcaattgagatgtaggagttctttgagttgacccaaagattctcaaaattgaaatggaaattctgaattgaaagaagaaactgaccagaacttgtattgaccagacttgcctatagtatattgctggtttaaaatggaacctgcagacaaaacctgtttcttttactgcatttacatggcatccaggttccattattatttacgtgacatccaggtttctaactcaaggaaataaacacaactgatttatcattcagcaactacttattgtgtgtctgcccattttaagactgtaggagtgtaactgaatataatggaaaaatgctttcactcagagcttacactcagagcttacattctagtagcaggaagcagacaaatgggggtaactcctgctactaagatgtgcaaagaagacaaaacattttaggaacttgccaaaatcagtgaaatctccctttttgtcaggcccacattgattcttttgagattaaaaattacagaatgccagaagataattcagtcaaaagtatttctcttcagtgcagtaaaatattaaaagaaaaaatatttctctacaagcctcttaaatgtttcagacattcacaatagcacctagacttttgtaatgaacagctgtgcacccaccccgacttaacaaatattttacttttgctatatttgcttcggtgtttttttcttaaaatacaccgaaattgaagctctctttgtgtactttgtcgtttgtaatcctccctccctcccagccttaagaagtaatcaccattgtgattattttatccatgtttttgtgaatattttacccatgtttttgtacttttgctacatatttgttatcaatctgtaaacctttatgacattaggaactaagaaacttagtcccttcgttagggggataatgaaatgtatttagtgtttgtgaaacatagatggtatgtatttggacaattctgtaactttgctttttttatttttatttttccatagcttattggggaacaggtggtgtttggttacatgattaagttctttagtggtgatttgtgggattttggtggacccatcacccaagcagtgtacactgcaccctatttgtaatcttttatccctcgcccccctcccaccatgcctcccgtctaccatgatgatcctgttttaaataagaaaataccatttcgcaggctccagatgttctggcatcctccctgtggatttcccagtgcctgcagctcacaggacaacaggggctgtggtagagtcacctatgagatcctggagtagtggatggaggagatggaacagtgaagacggaaactgagctcagtatccgggtgccaggagacaaaggccctttgctttttttcatttaatattctgatctacccctgttgacacatgttaagtatagttcattttgactgctatgtattatgttccattgtgtgaacatactgaaattgtacacttcaatactatactggatctccttgggtgtatttaagaggttttgtttttctaagtagttggttatatacaactaaaacctcaagagaactatctaaagcaatttcagcaaggtgatttggtacagcattaataaacagaaatcagtaacacttagtgaccaagtctgttggaagaacaaagacccccatttgtaataacaaaatttttagaaataatatgtaaagaagctatggttcttgtgtctagtaaggtcaatgtaacatagtaagatgtcagaataccctaatactttaaaaaattcatataggataaaaatgatatttgaaattggcaaggaaagacattattttgtaagtggaattgggacaacaactggtaaccaaatggaaaacccagttttctgccctccactagaagatttaaataggaaaagataaaactaccaaaaacctaaactcttaaagcaaatggattgaagaaggcctaagtgtgacaccaaactcaactataaaagatatatttgataacaaaaaaaaaattagttcagtggaccaacaaaaacttagaagacaagtcaagaaaaatgacaaaagacagagtgggaggcagatttgtaactcatccaggtcaaaaggctcatatctaaagatagtagaggaacaaaatgtataaggatgtgaactgggaaacaaatacatataaatagtttgtaaatatgaaaagatctttaacctcagtaaataaaaagctatagagagacttattttttaacttagttttttaaacctattatgtttatttattttttctttttttgagacggagtctcgctgttgcccaggctggtgtgcaatggcgcaatctcggctcactgcaacctccgcctcccaggttgaagccattctcctgcctcagcctcctgagtagctgggattacaggcgcctgtcaccacgcccagctaattgttcgcatttttagtagagacggggtttcactatgttggccaggctggcctcgaactcctgacctcatgatccacccaccttggccttccaaagtgctgggattacaggtgtgagctgccgcacctggctgtttatctcttttttttagagaaaggatctcggtcacccaggatggagtgtggtagcctgatcatatctcactacatcttagaacttctaggcttagggtattctcccacctcagcctcccaagtagctgggactacaagtgtgcaccatcacacctagctgatttttacatttttattttggagagatggtgtctccctgtgttgcccaggctggtcacaaactcctaggctcaagcgattctcctgactcaggcatgagccaccgtacccggcctaaacctatcatgttacagacttagaaagcaactattgtcaagtgtttgaggaaactcaggtcaggtttggtaaactaagatattaactcaagtaaagctctttaattcatttaatgaaggtgccacattgtctcagttctctatggcatgggtgaatgctgttctaagtcagcattggtactctaagctagttacatcatatctaagctttgcccttctaccagagctgctagcattctgtcaatgggcaattatttgaagttcttacattgaagttagtcacctacatcttctgttttttatggttttgatgtagtaatactgctgaagtttttttgataactgcgattcataatatttgttattcatattgtgatataaatgataagggcttttgaaaacaagtagtaatcatttcaatagcttaggatctccaccataatcttaggaaaattactaacctctgtgcctcagttgcttcatcatttaaaatgaggaaaataatagtccctacttaataggtttgttgtgaggattgagttaataacatagttaatgctcagtaagggttagctgctatttttttttcttttttttttgaaagagtctcactctgttgcccaggttggagtgcagtggcatgatcttggctcactgcatcctctgcttcctaggttcaggtgattctcatgcttcagcctcccaagcagctgggagtacaggtgtgcaccaccacacctggctaatttttgtatatttagtagagacgggttctcaccatattgtccaggctggtcttgaactccttacctcaaatgatccacccgcctgggcctcccaaagtgctgggattacaagcatgagccaccgcgcctggcttgctattgttatgaggtaaaggtagatagatgggtgagagtggtgccaggggaagtgttaaatttttgagtgttcctttagatgccagatgggttgtatctgagccttttattgcagtttgatgcctactagtgtgaagactactaggtcatagtggatagagaagcaatcttttggagacctgattttagcaaggatacgaataatatttgacaactttggggggatcttgatgcctctgtaatttactcaaggataatctcaagaaaaatggcattaagtagattacagaaaaaatagaactatcatattgttattattggctatttacatgagcaatgcggagaaatgtttaggattacagcatttagaagcttctcaattgctgcatttcctcactgtaccacaagatggcagatactgcatttaaaatttttttttctgtgtgttttctcttatagtcacttggtggccatgtaacaagcagagcaacatgtattaacagattctttttgaatgcaatattggattaaaaactttgaattaaactacaa

SEQ ID NO: 118454 - DNA, 1749 bp, Artificial Sequence
  derived and/or modified sequence
atgagaagccccccctgcggcctgctgagatggttcggcggccccctgctggccagctggtgcagatgccacctgagattcagagccttcggcaccagcgccggctggtacagagccttccccgcccccccccccctgctgccccccgcctgccccagccccagagactacagaccccacgtgagcctgagccccttcctgagcagacccagcagaggcggcagcagcagcagcagcagcagcagaagaagaagccccgtggccgccgtggccggcgagcccatggcctacagccagggcggcggcaagaagaaggtgtgctactactacgacggcgacatcggcaactactactacggccagggccaccccatgaagccccacagaatcagaatgacccacaacctgctgctgaactacggcctgtacagaaagatggagatctacagaccccacaaggccaccgccgaggagatgaccaagtaccacagcgacgagtacatcaagttcctgagaagcatcagacccgacaacatgagcgagtacagcaagcagatgcagagattcaacgtgggcgaggactgccccgtgttcgacggcctgttcgagttctgccagctgagcaccggcggcagcgtggccggcgccgtgaagctgaacagacagcagaccgacatggccgtgaactgggccggcggcctgcaccacgccaagaagagcgaggccagcggcttctgctacgtgaacgacatcgtgctggccatcctggagctgctgaagtaccaccagagagtgctgtacatcgacatcgacatccaccacggcgacggcgtggaggaggccttctacaccaccgacagagtgatgaccgtgagcttccacaagtacggcgagtacttccccggcaccggcgacctgagagacatcggcgccggcaagggcaagtactacgccgtgaacttccccatgagagacggcatcgacgacgagagctacggccagatcttcaagcccatcatcagcaaggtgatggagatgtaccagcccagcgccgtggtgctgcagtgcggcgccgacagcctgagcggcgacagactgggctgcttcaacctgaccgtgaagggccacgccaagtgcgtggaggtggtgaagaccttcaacctgcccctgctgatgctgggcggcggcggctacaccatcagaaacgtggccagatgctggacctacgagaccgccgtggccctggactgcgagatccccaacgagctgccctacaacgactacttcgagtacttcggccccgacttcaagctgcacatcagccccagcaacatgaccaaccagaacacccccgagtacatggagaagatcaagcagagactgttcgagaacctgagaatgctgccccacgcccccggcgtgcagatgcaggccatccccgaggacgccgtgcacgaggacagcggcgacgaggacggcgaggaccccgacaagagaatcagcatcagagccagcgacaagagaatcgcctgcgacgaggagttcagcgacagcgaggacgagggcgagggcggcagaagaaacgtggccgaccacaagaagggcgccaagaaggccagaatcgaggaggacaagaaggagaccgaggacaagaagaccgacgtgaaggaggaggacaagagcaaggacaacagcggcgagaagaccgacaccaagggcaccaagagcgagcagctgagcaacccctag

SEQ ID NO: 118455 - DNA, 1467 bp, Artificial Sequence
  derived and/or modified sequence
atggcctacagccagggcggcggcaagaagaaggtgtgctactactacgacggcgacatcggcaactactactacggccagggccaccccatgaagccccacagaatcagaatgacccacaacctgctgctgaactacggcctgtacagaaagatggagatctacagaccccacaaggccaccgccgaggagatgaccaagtaccacagcgacgagtacatcaagttcctgagaagcatcagacccgacaacatgagcgagtacagcaagcagatgcagagattcaacgtgggcgaggactgccccgtgttcgacggcctgttcgagttctgccagctgagcaccggcggcagcgtggccggcgccgtgaagctgaacagacagcagaccgacatggccgtgaactgggccggcggcctgcaccacgccaagaagagcgaggccagcggcttctgctacgtgaacgacatcgtgctggccatcctggagctgctgaagtaccaccagagagtgctgtacatcgacatcgacatccaccacggcgacggcgtggaggaggccttctacaccaccgacagagtgatgaccgtgagcttccacaagtacggcgagtacttccccggcaccggcgacctgagagacatcggcgccggcaagggcaagtactacgccgtgaacttccccatgagagacggcatcgacgacgagagctacggccagatcttcaagcccatcatcagcaaggtgatggagatgtaccagcccagcgccgtggtgctgcagtgcggcgccgacagcctgagcggcgacagactgggctgcttcaacctgaccgtgaagggccacgccaagtgcgtggaggtggtgaagaccttcaacctgcccctgctgatgctgggcggcggcggctacaccatcagaaacgtggccagatgctggacctacgagaccgccgtggccctggactgcgagatccccaacgagctgccctacaacgactacttcgagtacttcggccccgacttcaagctgcacatcagccccagcaacatgaccaaccagaacacccccgagtacatggagaagatcaagcagagactgttcgagaacctgagaatgctgccccacgcccccggcgtgcagatgcaggccatccccgaggacgccgtgcacgaggacagcggcgacgaggacggcgaggaccccgacaagagaatcagcatcagagccagcgacaagagaatcgcctgcgacgaggagttcagcgacagcgaggacgagggcgagggcggcagaagaaacgtggccgaccacaagaagggcgccaagaaggccagaatcgaggaggacaagaaggagaccgaggacaagaagaccgacgtgaaggaggaggacaagagcaaggacaacagcggcgagaagaccgacaccaagggcaccaagagcgagcagctgagcaacccctag

SEQ ID NO: 118456 - DNA, 1749 bp, Artificial Sequence
  derived and/or modified sequence
atgcggagcccaccatgcgggctgctgcggtggttcggcggcccacttctggcatcgtggtgtaggtgccatctgcgattcagagcctttggcacatcagccggatggtacagagcctttcctgctcccccacctttgctgccccccgcctgtccgtcaccccgcgactacagaccccatgtgagcctctcgcccttcttaagccggccttcaaggggtggttcgtctagctcctcctcgagtcggaggcgtagtccagtcgcagccgttgctggtgagcctatggcatacagccagggcgggggtaagaaaaaagtttgttactattatgatggggacatcggaaattattactatgggcagggacatcccatgaagccccatcgaatccgcatgacccacaacctgttactgaattatggcctttatcggaaaatggagatttacaggccacataaggcaacagcggaagaaatgacaaagtaccattctgatgagtacatcaagttcctgcggagcataaggcctgataacatgtccgagtacagtaagcagatgcaacgctttaacgttggcgaggattgtcccgtgtttgacggactcttcgagttctgccaactcagtactggcgggtctgtcgccggcgcagttaaattgaatcggcaacaaacagacatggctgtgaactgggccggcgggcttcaccacgcgaaaaaaagtgaggcctccggattctgttatgtcaacgacattgtcctggctattctggaactcctgaaataccatcagagggtgttgtatattgatattgatattcaccatggagatggcgtggaggaggctttctacactaccgaccgggtgatgacagtgtcctttcataagtatggagagtacttccctggaactggggacttgcgagatatcggagcgggcaagggaaaatattatgccgtgaatttccccatgagagatggtattgacgacgagtcttacggacaaatttttaagcccatcattagcaaagtcatggagatgtaccaacctagcgccgttgtcttacagtgcggcgcagattcattgtccggcgacagactggggtgctttaaccttacagtgaagggccatgcgaagtgcgtggaggttgtcaaaacctttaatttacctctcctgatgctggggggaggtggctacaccattagaaacgtcgccagatgctggacctacgagactgccgtggcccttgactgcgagatacccaatgagctcccatataatgattactttgaatacttcggccccgacttcaagctacacatatctccttcaaacatgacaaatcagaacaccccagaatatatggagaagatcaagcagagactatttgagaatctcaggatgctgcctcacgctcccggcgtgcaaatgcaggcaatccctgaggatgctgtacacgaagacagtggagacgaggacggcgaggatccagataagagaatctctataagagcaagtgataaaaggatcgcctgcgacgaggaattctctgactctgaggatgaaggggaaggggggaggaggaacgtagcagatcacaagaaaggggctaagaaggcccgaatcgaagaggataaaaaagaaacagaagataaaaaaaccgacgtgaaggaggaggataaaagtaaggataacagcggcgagaagacagatacgaaaggaaccaagagcgaacaactgtccaacccttag

SEQ ID NO: 118457 - DNA, 1467 bp, Artificial Sequence
  derived and/or modified sequence
atggcctacagccaaggcggaggcaaaaaaaaggtgtgttactactacgatggcgacattggaaactactattatggccagggccaccccatgaaaccccataggatccgaatgacacataatctcctgcttaactatggtctgtatcgaaaaatggagatttatcgcccacacaaggcgaccgcagaagagatgaccaaataccatagcgatgagtacattaagtttttacgatctatcagacctgataatatgtctgaatatagtaagcagatgcaaagatttaacgtcggcgaagattgccctgtgttcgatggattattcgagttctgccagctgtccaccggaggctcggtggcaggcgccgtcaaactcaatagacaacaaaccgacatggccgtgaattgggctggcggtttacatcatgccaaaaagtcagaggcctctggcttctgttatgtgaatgatatcgttctggctatcctggaactgctgaagtatcaccagagggtgctgtatatcgacatcgatatccaccacggcgacggcgtggaggaggcattttacactaccgatagagttatgacggtaagctttcacaagtacggtgaatactttcctggcaccggtgacctgagggacatcggggcgggtaaaggtaaatattacgctgtcaactttccaatgcgagatggcattgacgatgagtcctatggacaaatatttaaacccattatttcaaaggtgatggagatgtaccaacccagcgcagttgttctccagtgtggggccgactcactgtccggggacaggcttggctgctttaatctgaccgtgaagggccatgccaaatgcgttgaagtggtgaaaactttcaacttaccgctcttgatgttaggggggggagggtatactatacgcaacgttgccagatgttggacttacgagacagctgttgcccttgattgtgaaatcccaaatgagttgccctacaatgactactttgagtacttcggcccagatttcaagctccacatctcacccagcaatatgacaaatcagaacaccccagagtacatggagaaaataaagcagcgtttgttcgagaacttgcgaatgctaccacacgcccccggggtacagatgcaggccattccggaagatgcagtgcatgaggactcaggtgacgaggatggggaagacccggataagaggattagcatccgggcgtctgacaagagaatcgcttgcgatgaagagttctcagactcagaagatgaaggggagggtggtcggcggaatgttgcagatcacaaaaagggagctaagaaagccaggattgaggaagataagaaggaaactgaggataaaaaaacggacgttaaggaggaggataagtctaaagataactctggcgaaaagacagatacaaagggcactaagagcgaacagctgtcaaatccgtag

SEQ ID NO: 118458 - DNA, 2084 bp, Artificial Sequence
  derived and/or modified sequence
tttggtggccccctcctcgcgagttggtgccgctgccacctccgattccgagctttcggcacctctgccgggtggtaccgagccttcccggcgccccctcctctcctcccaccggcctgcccttccccgcgggactatcgcccccacgtttccctcagcccttttctctcccggccgagccgcggcggcagcagcagcagcagcagcagcaggaggaggagcccggtggcggcggtggccggggagcccatggcgtacagtcaaggaggcggcaaaaaaaaagtctgctactactacgacgccttcaccctgccatttctagtgaatctgtgatattggaaattattattatggacagggtcatcccatgaagcctcatagaatccgcatgacccataacttgctgttaaattatggcttatacagaaaaatggaaatatataggccccataaagccactgccgaagaaatgacaaaatatcacagtgatgagtatatcaaatttctacggtcaataagaccagataacatgtctgagtatagtaagcagatgcagagatttaatgttggagaagattgtccagtgtttgatggactctttgagttttgtcagctctcaactggcggttcagttgctggagctgtgaagttaaaccgacaacagactgatatggctgttaattgggctggaggattacatcatgctaagaaatcagaagcatcaggattctgttacgttaatgatattgtgcttgccatccttgaattactaaagtatcatcagagagtcttatatattgatatagatattcatcatggtgatggtgttgaagaagctttttatacaacagatcgtgtaatgacggtatcattccataaatatggggaatactttcctggcacaggagacttgagggatattggtgctggaaaaggcaaatactatgctgtcaattttccaatgagagatggtatagatgatgagtcatatgggcagatatttaagcctattatctcaaaggtgatggagatgtatcaacctagtgctgtggtattacagtgtggtgcagactcattatctggtgatagactgggttgtttcaatctaacagtcaaaggtcatgctaaatgtgtagaagttgtaaaaacttttaacttaccattactgatgcttggaggaggtggctacacaatccgtaatgttgctcgatgttggacatatgagactgcagttgcccttgattgtgagattcccaatgagttgccatataatgattactttgagtattttggaccagacttcaaactgcatattagtccttcaaacatgacaaaccagaacactccagaatatatggaaaagataaaacagcgtttgtttgaaaatttgcgcatgttacctcatgcacctggtgtccagatgcaagctattccagaagatgctgttcatgaagacagtggagatgaagatggagaagatccagacaagagaatttctattcgagcatcagacaagcggatagcttgtgatgaagaattctcagattctgaggatgaaggagaaggaggtcgaagaaatgtggctgatcataagaaaggagcaaagaaagctagaattgaagaagataagaaagaaacagaggacaaaaaaacagacgttaaggaagaagataaatccaaggacaacagtggtgaaaaaacagataccaaaggaaccaaatcagaacagctcagcaacccctgaatttgacagtctcaccaatttcagaaaatcattaaaaagaaaatattgaaaggaaaatgttttctttttgaagacttctggcttcattttatactactttggcatggactgtatttattttcaaatggctttttcgtttttgtttttcttggcaagttttattgtgagtttttctaattatgaagcaaaatttcttttctccaccatgctttatgtgatagtatttaaaattgatgtgagttattatgtcaaaaaaactgatctattaaagaagtaattggcctttctgagctgatttttccatcttttgtaattatctttattaaaaaattgtacttgg

SEQ ID NO: 118459 - DNA, 9874 bp, Artificial Sequence
  derived and/or modified sequence
gcaggttgttcaccctaacagggcctctaacctcgagcccgaaacggcctccttctccagccgtgccccttcctcccccgtggaggccgcagtggatgcgctcacctccctgcggcctcctgaggtggtttggtggccccctcctcgcgagttggtgccgctgccacctccgattccgagctttcggcacctctgccgggtggtaccgagccttcccggcgccccctcctctcctcccaccggcctgcccttccccgcgggactatcgcccccacgtttccctcagcccttttctctcccggccgagccgcggcggcagcagcagcagcagcagcagcaggaggaggagcccggtggcggcggtggccggggagcccatggcgtacagtcaaggaggcggcaaaaaaaaagtctgctactactacgacggtgatattggaaattattattatggacagggtcatcccatgaagcctcatagaatccgcatgacccataacttgctgttaaattatggcttatacagaaaaatggaaatatataggccccataaagccactgccgaagaaatgacaaaatatcacagtgatgagtatatcaaatttctacggtcaataagaccagataacatgtctgagtatagtaagcagatgcagagatttaatgttggagaagattgtccagtgtttgatggactctttgagttttgtcagctctcaactggcggttcagttgctggagctgtgaagttaaaccgacaacagactgatatggctgttaattgggctggaggattacatcatgctaagaaatcagaagcatcaggattctgttacgttaatgatattgtgcttgccatccttgaattactaaagtatcatcagagagtcttatatattgatatagatattcatcatggtgatggtgttgaagaagctttttatacaacagatcgtgtaatgacggtatcattccataaatatggggaatactttcctggcacaggagacttgagggatattggtgctggaaaaggcaaatactatgctgtcaattttccaatgagagatggtatagatgatgagtcatatgggcagatatttaagcctattatctcaaaggtgatggagatgtatcaacctagtgctgtggtattacagtgtggtgcagactcattatctggtgatagactgggttgtttcaatctaacagtcaaaggtcatgctaaatgtgtagaagttgtaaaaacttttaacttaccattactgatgcttggaggaggtggctacacaatccgtaatgttgctcgatgttggacatatgagactgcagttgcccttgattgtgagattcccaatgagttgccatataatgattactttgagtattttggaccagacttcaaactgcatattagtccttcaaacatgacaaaccagaacactccagaatatatggaaaagataaaacagcgtttgtttgaaaatttgcgcatgttacctcatgcacctggtgtccagatgcaagctattccagaagatgctgttcatgaagacagtggagatgaagatggagaagatccagacaagagaatttctattcgagcatcagacaagcggatagcttgtgatgaagaattctcagattctgaggatgaaggagaaggaggtcgaagaaatgtggctgatcataagaaaggagcaaagaaagctagaattgaagaagataagaaagaaacagaggacaaaaaaacagacgttaaggaagaagataaatccaaggacaacagtggtgaaaaaacagataccaaaggaaccaaatcagaacagctcagcaacccctgaatttgacagtctcaccaatttcagaaaatcattaaaaagaaaatattgaaaggaaaatgttttctttttgaagacttctggcttcattttatactactttggcatggactgtatttattttcaaatggctttttcgtttttgtttttcttggcaagttttattgtgagtttttctaattatgaagcaaaatttcttttctccaccatgctttatgtgatagtatttaaaattgatgtgagttattatgtcaaaaaaactgatctattaaagaagtaattggcctttctgagctgatttttccatcttttgtaattatctttattaaaaaattgtacttggattatcttttgtctgtttattactacaatatgaagtcttgtttcagtggctaatgacatcatttctgtagacttacaatacactctaggtgaaagataatgattacagcttgaaagataactatttgctgtttctttgggaagagtatttatagtaattattacttatctttgcaatagaaattctaccaccttgccctctatagcttagccagttagtatcagtgaagattaacatcccattacaatttatgaaataatacagactctgcaattgagatgtaggagttctttgagttgacccaaagattctcaaaattgaaatggaaattctgaattgaaagaagaaactgaccagaacttgtattgaccagacttgcctatagtatattgctggtttaaaatggaacctgcagacaaaacctgtttcttttactgcatttacatggcatccaggttccattattatttacgtgacatccaggtttctaactcaaggaaataaacacaactgatttatcattcagcaactacttattgtgtgtctgcccattttaagactgtaggagtgtaactgaatataatggaaaaatgctttcactcagagcttacactcagagcttacattctagtagcaggaagcagacaaatgggggtaactcctgctactaagatgtgcaaagaagacaaaacattttaggaacttgccaaaatcagtgaaatctccctttttgtcaggcccacattgattcttttgagattaaaaattacagaatgccagaagataattcagtcaaaagtatttctcttcagtgcagtaaaatattaaaagaaaaaatatttctctacaagcctcttaaatgtttcagacattcacaatagcacctagacttttgtaatgaacagctgtgcacccaccccgacttaacaaatattttacttttgctatatttgcttcggtgtttttttcttaaaatacaccgaaattgaagctctctttgtgtactttgtcgtttgtaatcctccctccctcccagccttaagaagtaatcaccattgtgattattttatccatgtttttgtgaatattttacccatgtttttgtacttttgctacatatttgttatcaatctgtaaacctttatgacattaggaactaagaaacttagtcccttcgttagggggataatgaaatgtatttagtgtttgtgaaacatagatggtatgtatttggacaattctgtaactttgctttttttatttttatttttccatagcttattggggaacaggtggtgtttggttacatgattaagttctttagtggtgatttgtgggattttggtggacccatcacccaagcagtgtacactgcaccctatttgtaatcttttatccctcgcccccctcccaccatgcctcccgtctaccatgatgatcctgttttaaataagaaaataccatttcgcaggctccagatgttctggcatcctccctgtggatttcccagtgcctgcagctcacaggacaacaggggctgtggtagagtcacctatgagatcctggagtagtggatggaggagatggaacagtgaagacggaaactgagctcagtatccgggtgccaggagacaaaggccctttgctttttttcatttaatattctgatctacccctgttgacacatgttaagtatagttcattttgactgctatgtattatgttccattgtgtgaacatactgaaattgtacacttcaatactatactggatctccttgggtgtatttaagaggttttgtttttctaagtagttggttatatacaactaaaacctcaagagaactatctaaagcaatttcagcaaggtgatttggtacagcattaataaacagaaatcagtaacacttagtgaccaagtctgttggaagaacaaagacccccatttgtaataacaaaatttttagaaataatatgtaaagaagctatggttcttgtgtctagtaaggtcaatgtaacatagtaagatgtcagaataccctaatactttaaaaaattcatataggataaaaatgatatttgaaattggcaaggaaagacattattttgtaagtggaattgggacaacaactggtaaccaaatggaaaacccagttttctgccctccactagaagatttaaataggaaaagataaaactaccaaaaacctaaactcttaaagcaaatggattgaagaaggcctaagtgtgacaccaaactcaactataaaagatatatttgataacaaaaaaaaaattagttcagtggaccaacaaaaacttagaagacaagtcaagaaaaatgacaaaagacagagtgggaggcagatttgtaactcatccaggtcaaaaggctcatatctaaagatagtagaggaacaaaatgtataaggatgtgaactgggaaacaaatacatataaatagtttgtaaatatgaaaagatctttaacctcagtaaataaaaagctatagagagacttattttttaacttagttttttaaacctattatgtttatttattttttctttttttgagacggagtctcgctgttgcccaggctggtgtgcaatggcgcaatctcggctcactgcaacctccgcctcccaggttgaagccattctcctgcctcagcctcctgagtagctgggattacaggcgcctgtcaccacgcccagctaattgttcgcatttttagtagagacggggtttcactatgttggccaggctggcctcgaactcctgacctcatgatccacccaccttggccttccaaagtgctgggattacaggtgtgagctgccgcacctggctgtttatctcttttttttagagaaaggatctcggtcacccaggatggagtgtggtagcctgatcatatctcactacatcttagaacttctaggcttagggtattctcccacctcagcctcccaagtagctgggactacaagtgtgcaccatcacacctagctgatttttacatttttattttggagagatggtgtctccctgtgttgcccaggctggtcacaaactcctaggctcaagcgattctcctgactcaggcatgagccaccgtacccggcctaaacctatcatgttacagacttagaaagcaactattgtcaagtgtttgaggaaactcaggtcaggtttggtaaactaagatattaactcaagtaaagctctttaattcatttaatgaaggtgccacattgtctcagttctctatggcatgggtgaatgctgttctaagtcagcattggtactctaagctagttacatcatatctaagctttgcccttctaccagagctgctagcattctgtcaatgggcaattatttgaagttcttacattgaagttagtcacctacatcttctgttttttatggttttgatgtagtaatactgctgaagtttttttgataactgcgattcataatatttgttattcatattgtgatataaatgataagggcttttgaaaacaagtagtaatcatttcaatagcttaggatctccaccataatcttaggaaaattactaacctctgtgcctcagttgcttcatcatttaaaatgaggaaaataatagtccctacttaataggtttgttgtgaggattgagttaataacatagttaatgctcagtaagggttagctgctatttttttttcttttttttttgaaagagtctcactctgttgcccaggttggagtgcagtggcatgatcttggctcactgcatcctctgcttcctaggttcaggtgattctcatgcttcagcctcccaagcagctgggagtacaggtgtgcaccaccacacctggctaatttttgtatatttagtagagacgggttctcaccatattgtccaggctggtcttgaactccttacctcaaatgatccacccgcctgggcctcccaaagtgctgggattacaagcatgagccaccgcgcctggcttgctattgttatgaggtaaaggtagatagatgggtgagagtggtgccaggggaagtgttaaatttttgagtgttcctttagatgccagatgggttgtatctgagccttttattgcagtttgatgcctactagtgtgaagactactaggtcatagtggatagagaagcaatcttttggagacctgattttagcaaggatacgaataatatttgacaactttggggggatcttgatgcctctgtaatttactcaaggataatctcaagaaaaatggcattaagtagattacagaaaaaatagaactatcatattgttattattggctatttacatgagcaatgcggagaaatgtttaggattacagcatttagaagcttctcaattgctgcatttcctcactgtaccacaagatggcagatactgcatttaaaatttttttttctgtgtgttttctcttatagtcacttggtggccatgtaacaagcagagcaacatgtattaacagattctttttgaatgcaatattggattaaaaactttgaattaaactacaattaagtttactgatttaggttttcctataagaattataacactaatttctaagttttacatctgcaaaacacagtagagtgtatctggtagtcattgactaattgtgactttgctagtcagacaaaatggaactgaatattagagccagaataattttctgttttgactggtggtaagaatcagttagtatacagaatgggaaagaattgaaatttatttctaggaattatagttatagtgaagttaatattcaggggcattgggtgcttgttccacgacttttgtttactgaactaagtacctaacccctttggtctttgaacactgcagagttatgattaggattattaatgaaaaattcttttttagtagaacaaacagttaaggacagaagacaccttgattagattctgttatttgctctttttattaagattgtttttactctaaatgttaaagaaatgtataattatttctaaggtaaaatgagtagcaggattctgaataggagattttttttggccagacccattttgcagccagtggtttgtatttaggagtgagttgaacaaagaagactctaatctgtttttgtgttgtggattttttattctattgataaatcagtagcttccagcttctcttgtatcctctactagtcatcttttttgtttcttcagaaataaacatccagggtcacttccctgcccttgccatatacttactaggatgatgtacaggtaaaacttttaaaggaaagtacggacaggcaattcctaaagtaaaagagagcacattatcaaaactggctgtacttaacaaataccaacaaaaagtcattacacttctggcaacaaataatgtttgatttaaaaagacaagaatttccccttttgctcttattttttaaatatgctatgtccttaagtgagaaatgcacttcaaaaattttcttattctgaagtctagccggaaagtttgaacttgtgttgcctttggctagactaggtgaaattaaggggcttaagagggcactgttgtgtggccctgtggtagataatagccctccaagcatgaggatgggagatctaccattcaccagtatttccaaagttatattcttaaaaaggctagatttctaatttccgtagaatctaggtatgttcttttcaactcagcatctgataagaaagtttgggcaagtaggtgcgaaaaatttactctagataccattttccaggaaaaaatataattcaagtccaacgtattactagctgtcaccttccccaacaatcaaataagcattgttattgtcaaacacatttacttgtatagttcagtgttatatgtaatggacttaggtataattcctgtgctattcccttttgatgccaaacacccttttgtaagctgttttgtttgaaatccaaatttatatgtcttaaagtaaatggcagcattgggctttcttaatgtaatgactcttctgccatcctatttctagagttaggcagaaaattctgtaaatctatcttatttccagtctgtttgtgactatggtgggcaataaatctgatttcccagaaaaacacatctggacccctataggtaaggtaaacaagcctcatcttaaattgtttgtacttccgacctgacctcaaaacaccatcatcatctagagcagcaacaagtaaagaacaatgcactggaaatcacatatatgggtctagcaccagcctttacattacacaactttgctttgggcaagtcatttaaatttctgtgcttcagtttactaaatctatgaaactgactaggtaacagctgacatgcttttccagcactccgtcttttacctgtctgatgtcacaaattgatcattcctttctggccttgagatgcgtatcaacccagatagtcattaacccagatagttggcattcaggataaaatgtttttgcctttcctgtcctgcaagctctttaaagtccaaaatatgcctttatatctttatgtgtaataggtatgaaatctatttcttggttgttgaataggataggcttattagacattctaaagtcaacttttttctcatatttaaacatttacccgtagaaattcagttttttaaagttttaagtcagttgattgtaccaaacattactattaaaaaaaaatcaaagtcagagaccagagtttccctgcatcagcgttcagtcaggagacaggaactatactaatttgaacatgtaaagttaaatataatccttaataataacaggattggaataagggataaaagaaagagaattccttctatatatatgtatacacacacatatatatatatacatgtgtatatatgtgtgtgtatgtatattatataatatacatacacacacacaaagaatgtcagacaaggagcagccaccattctgcttactttcactggattaagagtttcataagggcaagggttttgtttgtcttacactccactggggattaatctccagtgtctagaacagtgcctaacacataaataaagcctcaattattatttgtggaatggaatggaatttgagtgaaatggaatgggaatagaatggactggaatggaaatagaagtgggaaggggaatggaaggggatagaagaggattgaagaggacagaaggagatgggataagatgggatgggataggatcgaatctcaggtccaggagtcagaataactgaatcctattccagttctgccatcaacaagtcctgtgaaatttggaaagtcacttaaccctctggccttgtagaatatctcagtgggcatgtctgatgtttcttcatggttagatataggttgcatgttttgggcaagaatatcacaggaatgatgctgtgttctcagtgcacccagtcaggtaatgcatgatttcaatttctctcattactgatgatgttaactttaatcacttagtgaatgagaacatgagcatcattttgaaagcaaactgcaaagttttgatgtcaacattttagcaattacgtataatttcccccaaggatactggctttgagataatgtaaatatacatgggaaagacaaagctcaaataaaggaaaaagaccca

SEQ ID NO: 118460 - DNA, 2000 bp, Artificial Sequence
  derived and/or modified sequence
gttcccggcccggcacagttagaacgagaccctcttcctggcgcagcccccgcggttcctgcgggcgggaatcagggggcccgcccgtcttgtctcctgcctctcccccttcggccgtgcagtccgcagcctcgaaggtggccgccgctggggacggcgccggcctaccccgccttggtggtggcggcggcgaagggggcggcccattctctcccttctcccgcccaccattcgtggcaacgcaggtgatattggaaattattattatggacagggtcatcccatgaagcctcatagaatccgcatgacccataacttgctgttaaattatggcttatacagaaaaatggaaatatataggccccataaagccactgccgaagaaatgacaaaatatcacagtgatgagtatatcaaatttctacggtcaataagaccagataacatgtctgagtatagtaagcagatgcagagatttaatgttggagaagattgtccagtgtttgatggactctttgagttttgtcagctctcaactggcggttcagttgctggagctgtgaagttaaaccgacaacagactgatatggctgttaattgggctggaggattacatcatgctaagaaatcagaagcatcaggattctgttacgttaatgatattgtgcttgccatccttgaattactaaagtatcatcagagagtcttatatattgatatagatattcatcatggtgatggtgttgaagaagctttttatacaacagatcgtgtaatgacggtatcattccataaatatggggaatactttcctggcacaggagacttgagggatattggtgctggaaaaggcaaatactatgctgtcaattttccaatgagagatggtatagatgatgagtcatatgggcagatatttaagcctattatctcaaaggtgatggagatgtatcaacctagtgctgtggtattacagtgtggtgcagactcattatctggtgatagactgggttgtttcaatctaacagtcaaaggtcatgctaaatgtgtagaagttgtaaaaacttttaacttaccattactgatgcttggaggaggtggctacacaatccgtaatgttgctcgatgttggacatatgagactgcagttgcccttgattgtgagattcccaatgagttgccatataatgattactttgagtattttggaccagacttcaaactgcatattagtccttcaaacatgacaaaccagaacactccagaatatatggaaaagataaaacagcgtttgtttgaaaatttgcgcatgttacctcatgcacctggtgtccagatgcaagctattccagaagatgctgttcatgaagacagtggagatgaagatggagaagatccagacaagagaatttctattcgagcatcagacaagcggatagcttgtgatgaagaattctcagattctgaggatgaaggagaaggaggtcgaagaaatgtggctgatcataagaaaggagcaaagaaagctagaattgaagaagataagaaagaaacagaggacaaaaaaacagacgttaaggaagaagataaatccaaggacaacagtggtgaaaaaacagataccaaaggaaccaaatcagaacagctcagcaacccctgaatttgacagtctcaccaatttcagaaaatcattaaaaagaaaatattgaaaggaaaatgttttctttttgaagacttctggcttcattttatactactttggcatggactgtatttattttcaaatggctttttcgtttttgtttttcttggcaagttttattgtgagtttttctaattatgaagcaaaatttcttttctccaccatgctttatgtgatagtatttaaaattgatgtgagttattatgtcaaaaaaactgatctattaaagaagtaattggcctttctgagctgatttttccatcttttgtaattatctttattaaaaaattgtacttgg

SEQ ID NO: 118461 - DNA, 1749 bp, Artificial Sequence
  derived and/or modified sequence
atgaggagccccccctgtggcctgctgcgctggtttggaggccccctgctggcctcctggtgccgctgccacctgcgcttccgggccttcggcaccagcgctggctggtaccgggccttccctgcccccccacccctgctgcccccagcctgccccagcccccgggactaccggccccacgtgtccctgagccccttcctgagccggcccagcagaggaggcagcagcagcagcagcagcagcagaagaagaagccctgtggccgctgtggccggggagcccatggcctacagccagggcggcggcaagaagaaggtgtgctactactatgatggagacatcggcaactactactacggccagggccaccccatgaagccccaccgcatccgcatgacccacaacctgctgctgaactacggcctgtacaggaagatggagatctaccggccccacaaggccacagctgaggagatgaccaagtaccacagtgatgagtacatcaagttcctgcggagcatccggccagacaacatgtctgagtacagcaagcagatgcagcgcttcaacgtgggggaggactgccctgtgtttgatggcctgtttgagttctgccagctgagcactggaggctctgtggccggggctgtgaagctgaaccggcagcagacagacatggctgtgaactgggccggcggcctgcaccacgccaagaagtctgaggccagcggcttctgctacgtgaatgacatcgtgctggccatcctggagctgctgaagtaccaccagagggtgctgtacatcgacatcgacatccaccacggagatggagtggaggaggccttctacaccacagacagagtgatgacagtgtccttccacaagtacggggagtacttccctggcactggagacctgcgggacattggagctgggaagggcaagtactatgctgtgaacttccccatgagagatggcattgatgatgagagctatggccagatcttcaagcccatcatcagcaaggtgatggagatgtaccagcccagcgctgtggtgctgcagtgtggggctgacagcctgagcggggaccggctgggctgcttcaacctgactgtgaagggccacgccaagtgtgtggaggtggtgaagaccttcaacctgcccctgctgatgctgggcggcggcggctacaccatcagaaatgtggcccgctgctggacctatgaaacagctgtggccctggactgtgagatccccaatgagctgccctacaatgactactttgagtacttcggccctgacttcaagctgcacatcagccccagcaacatgaccaaccagaacaccccagagtacatggagaagatcaagcagaggctgtttgagaacctgaggatgctgccccacgcccctggggtgcagatgcaggccatcccagaagatgctgtgcatgaggacagcggagatgaagatggagaggaccctgacaagaggatcagcatccgggccagtgacaagagaattgcctgtgatgaggagttcagtgacagtgaagatgaaggagagggcggcagaagaaatgtggccgaccacaagaagggggccaagaaggccagaattgaggaggacaagaaggagacagaggacaagaagacagatgtgaaggaggaggacaagagcaaggacaacagcggggagaagacagacaccaagggcaccaagtctgagcagctgagcaacccctag

SEQ ID NO: 118462 - DNA, 1467 bp, Artificial Sequence
  derived and/or modified sequence
atggcctacagccagggcggcggcaagaagaaggtgtgctactactatgatggagacatcggcaactactactacggccagggccaccccatgaagccccaccgcatccgcatgacccacaacctgctgctgaactacggcctgtacaggaagatggagatctaccggccccacaaggccacagctgaggagatgaccaagtaccacagtgatgagtacatcaagttcctgcggagcatccggccagacaacatgtctgagtacagcaagcagatgcagcgcttcaacgtgggggaggactgccctgtgtttgatggcctgtttgagttctgccagctgagcactggaggctctgtggccggggctgtgaagctgaaccggcagcagacagacatggctgtgaactgggccggcggcctgcaccacgccaagaagtctgaggccagcggcttctgctacgtgaatgacatcgtgctggccatcctggagctgctgaagtaccaccagagggtgctgtacatcgacatcgacatccaccacggagatggagtggaggaggccttctacaccacagacagagtgatgacagtgtccttccacaagtacggggagtacttccctggcactggagacctgcgggacattggagctgggaagggcaagtactatgctgtgaacttccccatgagagatggcattgatgatgagagctatggccagatcttcaagcccatcatcagcaaggtgatggagatgtaccagcccagcgctgtggtgctgcagtgtggggctgacagcctgagcggggaccggctgggctgcttcaacctgactgtgaagggccacgccaagtgtgtggaggtggtgaagaccttcaacctgcccctgctgatgctgggcggcggcggctacaccatcagaaatgtggcccgctgctggacctatgaaacagctgtggccctggactgtgagatccccaatgagctgccctacaatgactactttgagtacttcggccctgacttcaagctgcacatcagccccagcaacatgaccaaccagaacaccccagagtacatggagaagatcaagcagaggctgtttgagaacctgaggatgctgccccacgcccctggggtgcagatgcaggccatcccagaagatgctgtgcatgaggacagcggagatgaagatggagaggaccctgacaagaggatcagcatccgggccagtgacaagagaattgcctgtgatgaggagttcagtgacagtgaagatgaaggagagggcggcagaagaaatgtggccgaccacaagaagggggccaagaaggccagaattgaggaggacaagaaggagacagaggacaagaagacagatgtgaaggaggaggacaagagcaaggacaacagcggggagaagacagacaccaagggcaccaagtctgagcagctgagcaacccctag

SEQ ID NO: 118463 - DNA, 1749 bp, Artificial Sequence
  derived and/or modified sequence
atgcggagccccccctgcggcctgctgcggtggttcggcggccccctgctggcctcttggtgtcggtgccatctgcgcttcagggcatttggcactagtgctggctggtatcgcgcattccctgcacctcctccactgctgcctcctgcctgccccagtccccgcgactaccgccctcacgttagcctgagtccatttctgtcgcggccctccaggggcggaagctcctcctcgagcagcagcaggcgccggagccctgtggcagccgtggccggcgagccgatggcctattcgcaggggggaggcaagaagaaggtttgttactactacgatggagacattgggaactattattatggccaaggacatcccatgaaacctcaccgcattcgcatgacccataatcttctgcttaattacggcctgtataggaagatggaaatttaccgaccgcacaaggctaccgctgaagaaatgacaaagtaccatagcgacgaatatatcaagttcttaaggtccataaggcccgataacatgtcagaatattctaaacagatgcagcgctttaacgtgggggaggactgtcccgtgttcgatgggcttttcgaattctgccagctttctaccggagggagcgtcgcaggggcagttaagcttaatagacaacaaaccgatatggctgttaattgggctggtggcctccaccacgccaagaaatccgaggctagtggattctgttacgttaacgatatagtgctcgccatcctggaactgctgaagtatcaccagcgcgtgctctacattgatatcgacatccaccatggagacggggtcgaggaggccttctacacaacggaccgcgtcatgacagtgagttttcacaaatatggagagtactttccagggacaggggatctgcgggatatcggtgctggaaaggggaagtattacgcagtcaactttccaatgagggacggcatcgatgacgagtcctatgggcaaatcttcaaacctatcatttccaaggtgatggagatgtaccagcccagcgctgttgtgctgcaatgcggggccgacagtttatccggagatcgcctcggctgttttaatctgacagttaagggccatgccaaatgtgtcgaagtggtgaaaacctttaatctccccctattaatgctgggaggggggggatacactataagaaacgtggctaggtgttggacgtatgagaccgccgtagctctggattgtgagatccctaacgagctgccatacaatgactatttcgaatacttcggaccagactttaaacttcatatttccccgtcgaatatgacaaatcagaacacccctgagtatatggagaagatcaagcagaggcttttcgagaacctgcgtatgctgccccatgcccctggcgtacagatgcaggctattccggaagatgccgttcatgaagattcgggtgatgaagacggggaggacccagataaacggataagtatcagagctagcgataagcgcattgcctgcgacgaggagttttcagatagcgaggacgagggtgaagggggacggcggaacgtcgccgaccataaaaagggcgctaagaaggctagaatcgaagaggataagaaagaaacagaagacaaaaagaccgacgtcaaggaagaagacaagtcaaaagacaattcgggagaaaaaaccgatacaaaggggacaaagtcagaacagctgagtaacccgtag

SEQ ID NO: 118464 - DNA, 1467 bp, Artificial Sequence
  derived and/or modified sequence
atggcctacagccagggcggcggcaagaagaaggtgtgctactactacgatggtgatataggtaattattattatggtcaggggcatcctatgaagccccatcggatcaggatgacccataatcttctcctgaactatggactgtaccgcaagatggaaatctatcgacctcacaaagctaccgccgaggaaatgaccaagtatcactccgacgagtacatcaaattccttaggtccatccgtcccgacaatatgtcagaatattcgaaacagatgcagcgtttcaatgtgggcgaggactgtcctgtgtttgacggcctcttcgagttttgccagctgtccacaggaggaagcgtggctggggcggtaaagctgaatcgccaacagaccgacatggcggttaattgggccggcggcctgcaccacgccaagaagtcagaggcatctgggttttgctacgtaaacgacattgtgctggctatcctagagctgctgaagtatcatcagcgagtcctctacatcgatatcgatatccatcacggagacggcgtggaggaagctttttataccacagaccgggtgatgactgtgagttttcataagtatggagagtacttcccaggcactggcgacctacgagacatcggcgccggtaaaggtaagtactacgctgtcaactttcctatgagagacgggatcgatgacgagtcttacggccagatttttaaacccatcattagtaaggtcatggaaatgtatcagcccagtgcagtggtcttacagtgcggtgccgacagcttatcgggcgatcggctaggttgtttcaatctaaccgttaaagggcacgcaaagtgtgtggaagtggtaaagacatttaatctaccgctgctcatgctgggtggcggcggttacaccattaggaatgttgcgaggtgttggacctatgagactgcagtcgccctggactgcgagatccccaacgagctcccatacaacgactactttgagtatttcgggcccgactttaaactacacatcagccctagtaacatgaccaatcagaacaccccggaatatatggaaaagatcaagcagagactgtttgagaacctgaggatgttgccgcatgcaccaggcgtccagatgcaggccattcctgaagatgctgttcacgaggactccggggatgaagacggcgaggatcccgacaaacggataagcattagagcatcagacaaacggatcgcctgtgacgaggaattcagcgatagcgaagatgagggggaggggggaaggcgtaatgtggcagatcacaaaaagggcgccaagaaagccaggatcgaggaggataagaaagagactgaggataaaaaaaccgatgtcaaagaagaggataaaagtaaggacaatagtggcgaaaaaaccgatactaagggcacaaagtctgagcagctcagcaatccctag

SEQ ID NO: 118465 - DNA, 1749 bp, Artificial Sequence
  derived and/or modified sequence
atgcgctcccctccctgtggcctactccggtggttcggaggtccgctgctggcttcctggtgtaggtgccatctgaggttccgagcctttgggacgagcgccggatggtaccgcgcattcccagccccacctccgctacttccaccagcatgtccctccccacgggattataggcctcatgtgtccttgagcccttttcttagccggccaagccgtggagggagctcctcttctagctcatcgagacgacgctcacctgtagccgctgtggctggcgagccaatggcctattctcagggcggagggaagaagaaggtgtgttattattatgatggtgatattggcaactactattacggacaaggccatcccatgaagccccatcgaatccgcatgacacataatctcctgttgaactatggtttgtatcgaaaaatggagatttatagaccacataaagcaacggctgaagagatgaccaagtaccattccgacgagtatatcaaatttctcagatccatccggccagacaacatgagcgaatacagtaagcaaatgcaaaggtttaacgtgggagaagactgtcccgtcttcgacgggctgtttgaattttgtcagttatctaccgggggtagcgttgccggtgccgtgaagctgaacagacaacagacagacatggctgtaaattgggcagggggtttgcaccacgccaaaaagagtgaagcctcaggtttctgctatgtgaacgatatagtgcttgcgatcttggagttgttaaagtaccatcaacgcgtcttgtatatcgacatcgatattcaccacggtgacggagtggaagaggccttttacaccaccgatagggtgatgacagtttcctttcataaatacggcgagtatttcccagggactggggatctacgggacatcggtgccggtaagggcaagtactatgcagtgaattttcctatgcgggatggcatcgacgatgaatcctatggacagattttcaagcctattatttctaaagtcatggagatgtaccagccctctgctgtggttctgcagtgtggggcagatagtcttagcggcgacaggctgggttgcttcaacctgactgtgaagggccacgccaaatgtgtggaggtagtgaagacattcaaccttcctctgctgatgctcgggggtggagggtatacgataagaaatgtggccaggtgctggacctacgagacagcggtcgctctggattgtgaaatccctaacgagctgccatacaacgactattttgagtacttcggcccagacttcaagcttcatattagtcccagtaacatgacgaaccagaatactcctgagtatatggaaaagatcaaacaacggctgtttgaaaatttgaggatgctgcctcacgccccaggggtgcaaatgcaagcaatcccagaagacgctgtgcacgaggacagcggtgatgaggatggtgaggacccggacaaaagaatatcgatcagagcctccgacaagcgtatcgcctgcgatgaagaattctctgattctgaagacgaaggcgagggcggtaggagaaatgtagcggaccataaaaagggtgccaagaaggctcggattgaggaggacaagaaagagacagaagataaaaaaaccgatgttaaggaagaggacaaatcaaaggataactcaggggagaagacagatacaaaaggcactaaaagcgagcaactctccaatccctag

SEQ ID NO: 118466 - DNA, 1467 bp, Artificial Sequence
  derived and/or modified sequence
atggcttactcacaaggtggcggaaaaaagaaggtctgctactattatgacggcgatatcggtaattattactacgggcagggtcatcctatgaaaccccacaggatcagaatgactcataatctattgcttaactacggactctaccggaagatggagatctacaggccacataaggccactgcggaggaaatgacaaagtatcactccgacgagtacataaagtttctgcggagcatacgaccagacaacatgtctgaatactcaaaacagatgcagaggttcaatgtgggagaggactgccctgtgttcgatggcctgttcgagttttgtcagctgtcaactggtgggtctgtggccggtgcagtgaagctgaacagacagcagactgatatggcggtgaattgggccggagggctgcaccacgccaaaaagtcagaagcttccggcttttgttatgttaatgacattgtccttgcaatcctggagcttctgaagtaccaccagcgagtcttatatattgatatcgacattcaccacggagacggggtcgaagaggctttttatactaccgatcgtgttatgacagtgtctttccacaaatacggtgagtatttccctgggaccggtgatcttagggacatcggagccggaaaaggaaagtactacgcggtcaacttcccaatgcgggacgggatcgacgatgaatcctacggccaaatattcaaaccgatcatttccaaagtgatggaaatgtaccagccctccgcagtcgtgttacagtgtggcgcagactctctgagcggggacaggttgggctgtttcaacctaaccgtcaaggggcacgctaagtgtgttgaagttgtgaaaacctttaacttacccctgctgatgctgggcggaggaggctataccattaggaacgtggctaggtgctggacatacgagacggcggttgctctggactgcgagatcccaaacgaattgccttacaatgattattttgaatatttcgggccagattttaaactccacatctcaccttccaatatgactaaccagaacacccccgaatatatggagaagatcaaacaacggcttttcgagaatctgcgcatgctccctcacgccccaggtgttcagatgcaagccattccagaggatgcagtccacgaagattcaggcgacgaggatggtgaggatcccgacaaaaggatatctatccgcgcatccgataaaaggatcgcttgcgacgaggagtttagcgattccgaggatgaaggagagggaggcagaaggaacgtggcagatcacaagaagggtgctaagaaagccaggatcgaggaggataaaaaggaaaccgaagataagaagacggacgttaaagaagaagataaatctaaagataattcaggagaaaaaacagacactaagggaaccaaatccgagcagctgagcaacccatag

SEQ ID NO: 118467 - protein, 655 aa, Artificial Sequence
  derived and/or modified sequence
MGRWAWVPSPWPPPGLGPFLLLLLLLLLLPRGFQPQPGGNRTESPEPNATATPAIPTILVTSVTSETPATSAPEAEGPQSGGLPPPPRAVPSSSSPQAQALTEDGRPCRFPFRYGGRMLHACTSEGSAHRKWCATTHNYDRDRAWGYCVEATPPPGGPAALDPCASGPCLNGGSCSNTQDPQSYHCSCPRAFTGKDCGTEKCFDETRYEYLEGGDRWARVRQGHVEQCECFGGRTWCEGTRHTACLSSPCLNGGTCHLIVATGTTVCACPPGFAGRLCNIEPDERCFLGNGTGYRGVASTSASGLSCLAWNSDLLYQELHVDSVGAAALLGLGPHAYCRNPDNDERPWCYVVKDSALSWEYCRLEACESLTRVQLSPDLLATLPEPASPGRQACGRRHKKRTFLRPRIIGGSSSLPGSHPWLAAIYIGDSFCAGSLVHTCWVVSAAHCFSHSPPRDSVSVVLGQHFFNRTTDVTQTFGIEKYIPYTLYSVFNPSDHDLVLIRLKKKGDRCATRSQFVQPICLPEPGSTFPAGHKCQIAGWGHLDENVSGYSSSLREALVPLVADHKCSSPEVYGADISPNMLCAGYFDCKSDACQGDSGGPLACEKNGVAYLYGIISWGDGCGRLHKPGVYTRVANYVDWINDRIRPPRRLVAPS

SEQ ID NO: 118468 - DNA, 1968 bp, Artificial Sequence
  derived and/or modified sequence
atgggcagatgggcctgggtccccagcccatggccccctcccgggttaggtccttttctccttctactgttgctactcttgctcctcccacgagggtttcaacctcagcccggcggcaatagaaccgaatctcctgagcccaacgcgacagcgaccccggccatacccacgattctagtcacaagcgttacatccgagacccccgcaaccagcgcccccgaggccgagggtcctcagagcggcggcctccccccaccgcccagagcagttcctagcagttcgtccccacaggcgcaggcactgacagaagatggtcggccatgccggttcccattccggtacggagggcggatgctacacgcgtgtaccagcgaaggctccgctcatcgtaagtggtgtgcgaccactcataactatgatcgcgatcgcgcatgggggtattgtgtcgaggcaactcccccgcccggcggcccagccgcacttgacccctgcgcctctgggccatgtcttaatggagggtcttgctcaaatacacaggatccccagagctatcattgctcttgccctagggcgtttactgggaaagactgtggcaccgagaaatgcttcgacgagaccaggtacgagtatttggaaggtggcgaccgctgggcacgcgtgcgccaaggacacgtagagcagtgcgagtgttttggcggtcgtacctggtgcgagggaaccagacatacagcctgtctctcatcgccttgcctgaatggtggcacctgccacctgatcgtcgctacaggaacaacggtgtgtgcatgtccacctgggttcgctggtcgactctgtaacattgagccagacgaacgctgctttttgggaaatggaacaggatatagaggagttgcgtcgactagtgccagcggcctgtcttgtctggcctggaattcagatctgttgtatcaggagctgcatgtcgactctgtaggcgccgctgccttgctggggctggggccacatgcttattgtcgcaacccagacaacgatgagagaccttggtgttatgttgtgaaagacagtgcactgagttgggagtactgccggttggaggcctgcgagagcctgacaagggtgcagctctctcccgacttgctggccactctgccagaacccgctagtcctggcagacaggcctgcgggcggcggcacaagaagcgcacctttctgagaccccgaatcatcggcggaagcagctcccttcccggctcccacccctggctggccgcaatctacatcggggattctttttgcgcgggaagtctggtacatacatgctgggttgttagtgccgcccactgcttttcccactcccctccaagagattccgtgtctgtcgtattggggcaacatttcttcaatcgaaccacagacgtgacacagacattcggcattgagaaatatattccttatactctctattccgtctttaatccaagtgatcacgatctggtgttgatccgcctgaaaaaaaaaggcgaccggtgtgcaactaggagccaattcgttcagcccatatgtttgcccgaaccagggtctacatttcctgcggggcacaaatgtcaaattgcaggatggggacacctcgatgaaaacgtgagcggatacagtagcagtctccgcgaagccctagttcctttggttgccgatcacaaatgcagcagtcccgaagtgtacggagcggacataagcccaaacatgttgtgcgccggatacttcgattgcaaaagcgacgcctgccagggtgatagtggtggaccactggcatgcgagaaaaatggcgtggcctatctgtacggcattatctcttggggcgatgggtgtgggaggctccataagcccggagtttataccagggtcgctaactatgttgactggatcaacgatcggattagacccccgaggcggctcgtagccccaagctag

SEQ ID NO: 118469 - DNA, 2148 bp, Artificial Sequence
  derived and/or modified sequence
ggcccgcctgacgtgggaggcagccagggttaatcatttccacgaagccttgaccccacctgccttggccgctctgctcccgcctcccactgcccctcaggccagctcaggagccatggggcgctgggcctgggtccccagcccctggcccccaccggggctgggccccttcctcctcctcctcctgctgctgctgctgctgccacgggggttccagccccagcctggcgggaaccgtacggagtccccagaacctaatgccacagcgacccctgcgatccccactatcctggtgacctctgtgacctctgagaccccagcaacaagtgctccagaggcagagggaccccaaagtggggggctcccgcccccgcccagggcagttccctcgagcagtagcccccaggcccaagcactcaccgaggacgggaggccctgcaggttccccttccgctacgggggccgcatgctgcatgcctgcacttcggagggcagtgcacacaggaagtggtgtgccacaactcacaactacgaccgggacagggcctggggctactgtgtggaggccaccccgcctccagggggcccagctgccctggatccctgtgcctccggcccctgcctcaatggaggctcctgctccaatacccaggacccccagtcctatcactgcagctgcccccgggccttcaccggcaaggactgcggcacagagaaatgctttgatgagacccgctacgagtacctggaggggggcgaccgctgggcccgcgtgcgccagggccacgtggaacagtgcgagtgcttcgggggccggacctggtgcgaaggcacccgacatacagcttgtctgagcagcccttgcctgaacgggggcacctgccacctgatcgtggccaccgggaccaccgtgtgtgcctgcccaccaggcttcgctggacggctctgcaacatcgagcctgatgagcgctgcttcttggggaacggcactgggtaccgtggcgtggccagcacctcagcctcgggcctcagctgcctggcctggaactccgatctgctctaccaggagctgcacgtggactccgtgggcgccgcggccctgctgggcctgggcccccatgcctactgccggaatccggacaatgacgagaggccctggtgctacgtggtgaaggacagcgcgctctcctgggagtactgccgcctggaggcctgcgaatccctcaccagagtccaactgtcaccggatctcctggcgaccctgcctgagccagcctccccggggcgccaggcctgcggcaggaggcacaagaagaggacgttcctgcggccacgtatcatcggcggctcctcctcgctgcccggctcgcacccctggctggccgccatctacatcggggacagcttctgcgccgggagcctggtccacacctgctgggtggtgtcggccgcccactgcttctcccacagcccccccagggacagcgtctccgtggtgctgggccagcacttcttcaaccgcacgacggacgtgacgcagaccttcggcatcgagaagtacatcccgtacaccctgtactcggtgttcaaccccagcgaccacgacctcgtcctgatccggctgaagaagaaaggggaccgctgtgccacacgctcgcagttcgtgcagcccatctgcctgcccgagcccggcagcaccttccccgcaggacacaagtgccagattgcgggctggggccacttggatgagaacgtgagcggctactccagctccctgcgggaggccctggtccccctggtcgccgaccacaagtgcagcagccctgaggtctacggcgccgacatcagccccaacatgctctgtgccggctacttcgactgcaagtccgacgcctgccagggggactcaggggggcccctggcctgcgagaagaacggcgtggcttacctctacggcatcatcagctggggtgacggctgcgggcggctccacaagccgggggtctacacccgcgtggccaactatgtggactggatcaacgaccggatacggcctcccaggcggcttgtggctccctcctgaccctccagcgggacaccctggttcccaccattccctgccttgctgacaataaagatatttccaag

SEQ ID NO: 118470 - DNA, 1968 bp, Artificial Sequence
  derived and/or modified sequence
atgggccgctgggcctgggtgcccagcccctggcccccacctggcctgggccccttcctgctgctgctgctgctgctgctgctgctgccccggggcttccagccccagcccggcggcaacagaacagagagccctgagcccaatgccacagccaccccagccatccccaccatcctggtgacctctgtgaccagcgagaccccagccaccagcgcccctgaggccgagggcccccagagcggcggcctgcccccaccacccagggctgtgcccagcagcagcagcccccaggcccaggccctgacagaagatggccggccctgccgcttccccttccgctatggaggccgcatgctgcacgcctgcaccagcgagggcagcgcccacaggaagtggtgtgccaccacccacaactatgaccgggaccgggcctggggctactgtgtggaggccaccccacctcctgggggccctgctgccctggacccctgtgccagcggcccctgcctgaatggaggcagctgcagcaacacccaggacccccagagctaccactgcagctgcccccgggccttcaccgggaaggactgtggcacagagaagtgctttgatgagaccaggtatgagtacctggagggcggggaccgctgggcccgggtgcggcagggccacgtggagcagtgtgaatgttttggaggccgcacctggtgtgagggcaccaggcacacagcctgcctgagcagcccctgcctgaatggaggcacctgccacctgattgtggccaccggcaccaccgtgtgtgcctgccccccaggctttgctggccgcctgtgcaacatcgagccagatgagcgctgcttcctgggcaatggcaccggctaccggggcgtggccagcaccagcgccagcggcctgagctgcctggcctggaacagcgacctgctgtaccaggagctgcacgtggacagcgtgggcgctgctgccctgctgggcctgggcccccacgcctactgcagaaatccagacaatgatgagcggccctggtgctacgtggtgaaggacagcgccctgtcctgggagtactgccgcctggaggcctgtgagagcctgaccagggtgcagctgagcccagacctgctggccaccctgcctgagcccgccagccctggccggcaggcctgtggccgccgccacaagaagaggaccttcctgcggccccgcatcattggaggcagcagcagcctgcccggcagccacccctggctggccgccatctacatcggggacagcttctgtgccggcagcctggtgcacacctgctgggtggtgtctgctgcccactgcttcagccacagccccccccgggacagcgtgtctgtggtgctgggccagcacttcttcaacagaaccacagatgtgacccagacctttggaattgagaagtacatcccctacaccctgtacagcgtcttcaaccccagcgaccatgacctggtgctgatccggctgaagaagaagggggacagatgtgccaccaggagccagtttgtgcagcccatctgcctgcctgagcccggcagcaccttccctgctggccacaagtgccagattgctggctggggccacctggatgaaaatgtgtctggctacagcagcagcctgcgggaggccctggtgcccctggtggccgaccacaagtgcagcagccctgaggtgtatggagctgacatcagccccaacatgctgtgtgccggctactttgactgcaagagtgatgcctgccagggcgacagcggcggccccctggcctgtgagaagaatggagtggcctacctgtatggcatcatctcctggggagatggctgcggccgcctgcacaagccaggagtgtacaccagggtggccaactacgtggactggatcaatgaccgcatccggcccccccggcggctggtggcccccagctag

SEQ ID NO: 118471 - DNA, 1968 bp, Artificial Sequence
  derived and/or modified sequence
atgggccggtgggcctgggtgcccagcccctggcccccccccggcctaggccctttcttactattattactattgcttctgcttctgccccggggattccagccccagcctgggggaaatagaacagaaagccccgaacctaacgccacagcaacgcccgccattccaacaatccttgtcacgagcgtgacatcggagactccagccacatccgctcctgaggccgaggggcctcagagtggtggattgcccccccctccgcgagctgtgccaagctcaagctcccctcaggcacaggcactcaccgaagacgggaggccctgccgattccccttccgatacgggggcagaatgctgcatgcttgtacttccgaagggagcgcacaccgcaagtggtgtgccactactcataattacgatagagatcgggcatggggatactgcgtggaagctactccacctcccggtgggccggccgcactggatccctgtgcttccgggccttgtctcaacggcgggagctgcagtaacacgcaggaccctcagtcgtatcactgctcgtgcccgcgagcattcactggtaaggactgcggaaccgagaaatgctttgacgagaccaggtacgagtatctggagggcggcgaccgttgggccagagtcaggcagggacatgtggaacagtgcgaatgtttcggagggcgcacgtggtgcgaaggtaccaggcacacagcctgcctatcttcaccctgcttgaatggcggtacttgtcatctcattgtggccactggcacgacggtctgcgcatgtcctcccggattcgccggcaggctgtgtaacatagaacccgacgaacgttgttttctcgggaacggtacgggctaccggggcgtcgccagcacttcagcctcagggctatcttgcctggcctggaactctgacctgttgtaccaggagctgcatgttgacagcgtaggcgccgctgccttattgggactggggccacacgcatactgtcgcaatccagacaacgacgagcgtccatggtgctatgttgtgaaagacagcgcactttcatgggagtattgtcggctggaagcctgtgagagcctcactcgagtccagttgtccccggatctgctggccacactgccagaaccagccagcccaggccgccaggcctgtggccgtcggcacaaaaagcgtacatttctacgacctaggatcatcggcggctcctcctcattgccaggcagccatccttggctcgcagcaatttacataggggactctttctgcgcaggcagcctggtccacacctgctgggtggtgtcagccgctcattgtttttctcattccccacctcgcgatagtgtatccgtagtccttggacagcattttttcaaccggaccacagatgtaactcaaactttcgggatagagaagtatatcccctatacattatactccgtctttaatcccagcgaccacgacttggttttgatcaggctgaagaagaagggtgataggtgtgcaaccagatctcaatttgtgcagcctatttgtctccctgaacccggcagtaccttccccgccgggcataaatgtcagatagctggatggggccatttagatgagaacgtgtctggatattcttcttccctgagggaggcccttgtcccacttgttgctgaccacaaatgctcgtcccctgaagtgtatggcgccgacatctcccctaacatgctgtgtgcgggatatttcgattgtaaaagtgacgcctgtcagggcgattcgggcggtccattagcgtgtgagaaaaacggcgtggcctacctatatggcatcatcagttggggagatggatgcggacgacttcataagcctggtgtttacacccgggtcgccaactatgtggattggatcaacgatagaattcgacctcctagacgtctggtcgcccccagttag

SEQ ID NO: 118472 - DNA, 1968 bp, Artificial Sequence
  derived and/or modified sequence
atggggaggtgggcgtgggttccttcaccgtggccgccaccagggctcggcccattcctgttactgcttctgctgctcctgctcctgcctcgtggatttcaaccgcaaccagggggaaacaggactgagagtcctgagccaaacgcgactgctacccccgctatccctaccatcctcgtgacatcagtgactagtgaaacacctgccacttccgcaccggaggccgagggaccccagtccggtggcctacctcctccaccgcgagccgtcccgtcatcaagttctccccaggcacaggctctaaccgaggacggcagaccatgtcggttcccattccgatacgggggacgcatgcttcacgcatgtacatccgaggggtccgcacatagaaagtggtgtgctacaacacacaactatgatcgcgacagggcctggggctactgcgtggaagccaccccccctcctggcggaccagcagcccttgacccctgtgcctctggaccctgcctgaatggaggctcatgctccaatacccaagatccccagagctatcactgtagctgtcctagagcttttacaggcaaagactgcggaaccgaaaagtgtttcgacgaaacccgctacgaatacctggaagggggagaccggtgggccagggtgcgacaggggcatgtggaacagtgtgaatgcttcggtgggcgaacctggtgtgaaggcaccagacacaccgcatgcctgtcctcaccttgtctgaatggtggcacctgccacctgattgttgctactggcaccactgtctgtgcatgcccccctgggtttgcaggcaggttgtgtaacattgagcccgatgagagatgctttttgggtaacggcacagggtacagaggcgtggccagtacaagcgctagcgggctctcctgcttggcctggaactccgatcttttatatcaagaactgcacgtcgattctgtcggagccgctgcactattaggactcggccctcatgcctattgccgaaaccctgataatgacgaacggccttggtgctacgtggtgaaggactctgcgctgtcgtgggaatactgcaggctcgaggcctgcgaaagcctgacaagagttcaactcagccccgacctccttgcaacgctgcctgagccagcctctcctggacgccaagcctgtgggagaagacacaaaaagagaactttcctgaggcctagaatcattggagggagcagttcactgcccggatcccacccttggctggcagccatttacatcggtgatagcttctgcgcgggtagccttgtgcatacgtgttgggtcgtaagcgcagcacactgtttttcgcacagcccccctcgcgactccgttagcgtggttctaggccaacattttttcaatcgcactacagacgtcacccagacttttggaatcgaaaagtatattccctacactctgtattccgtcttcaatccttcagatcacgatttggtgctgattcgtttgaaaaagaagggggacaggtgcgccacacgcagccagtttgttcagccaatatgccttccagagccgggaagcactttcccagctggccataagtgccagatagccggttggggccatttggacgaaaacgtgagcggttatagctcatctctacgcgaggccctggtccccctggtcgccgatcacaagtgtagttctcccgaagtgtatggtgcggacattagcccaaacatgctctgcgctggttatttcgactgcaaaagcgacgcctgtcagggagattccggtggccctctggcttgcgaaaagaatggtgttgcctacctctacggaattatcagttggggagacggatgcggcagactgcacaagccgggagtatatactagggtggcaaactacgttgactggatcaacgatcgtattcgccctccgaggagattggtggctccctcatag

SEQ ID NO: 118473 - DNA, 1968 bp, Artificial Sequence
  derived and/or modified sequence
atgggcagatgggcctgggtgcccagcccctggcccccccccggcctgggccccttcctgctgctgctgctgctgctgctgctgctgcccagaggcttccagccccagcccggcggcaacagaaccgagagccccgagcccaacgccaccgccacccccgccatccccaccatcctggtgaccagcgtgaccagcgagacccccgccaccagcgcccccgaggccgagggcccccagagcggcggcctgccccccccccccagagccgtgcccagcagcagcagcccccaggcccaggccctgaccgaggacggcagaccctgcagattccccttcagatacggcggcagaatgctgcacgcctgcaccagcgagggcagcgcccacagaaagtggtgcgccaccacccacaactacgacagagacagagcctggggctactgcgtggaggccacccccccccccggcggccccgccgccctggacccctgcgccagcggcccctgcctgaacggcggcagctgcagcaacacccaggacccccagagctaccactgcagctgccccagagccttcaccggcaaggactgcggcaccgagaagtgcttcgacgagaccagatacgagtacctggagggcggcgacagatgggccagagtgagacagggccacgtggagcagtgcgagtgcttcggcggcagaacctggtgcgagggcaccagacacaccgcctgcctgagcagcccctgcctgaacggcggcacctgccacctgatcgtggccaccggcaccaccgtgtgcgcctgcccccccggcttcgccggcagactgtgcaacatcgagcccgacgagagatgcttcctgggcaacggcaccggctacagaggcgtggccagcaccagcgccagcggcctgagctgcctggcctggaacagcgacctgctgtaccaggagctgcacgtggacagcgtgggcgccgccgccctgctgggcctgggcccccacgcctactgcagaaaccccgacaacgacgagagaccctggtgctacgtggtgaaggacagcgccctgagctgggagtactgcagactggaggcctgcgagagcctgaccagagtgcagctgagccccgacctgctggccaccctgcccgagcccgccagccccggcagacaggcctgcggcagaagacacaagaagagaaccttcctgagacccagaatcatcggcggcagcagcagcctgcccggcagccacccctggctggccgccatctacatcggcgacagcttctgcgccggcagcctggtgcacacctgctgggtggtgagcgccgcccactgcttcagccacagcccccccagagacagcgtgagcgtggtgctgggccagcacttcttcaacagaaccaccgacgtgacccagaccttcggcatcgagaagtacatcccctacaccctgtacagcgtgttcaaccccagcgaccacgacctggtgctgatcagactgaagaagaagggcgacagatgcgccaccagaagccagttcgtgcagcccatctgcctgcccgagcccggcagcaccttccccgccggccacaagtgccagatcgccggctggggccacctggacgagaacgtgagcggctacagcagcagcctgagagaggccctggtgcccctggtggccgaccacaagtgcagcagccccgaggtgtacggcgccgacatcagccccaacatgctgtgcgccggctacttcgactgcaagagcgacgcctgccagggcgacagcggcggccccctggcctgcgagaagaacggcgtggcctacctgtacggcatcatcagctggggcgacggctgcggcagactgcacaagcccggcgtgtacaccagagtggccaactacgtggactggatcaacgacagaatcagaccccccagaagactggtggcccccagctag

SEQ ID NO: 118474 - protein, 826 aa, Artificial Sequence
  derived and/or modified sequence
MEGAGGANDKKKISSERRKEKSRDAARSRRSKESEVFYELAHQLPLPHNVSSHLDKASVMRLTISYLRVRKLLDAGDLDIEDDMKAQMNCFYLKALDGFVMVLTDDGDMIYISDNVNKYMGLTQFELTGHSVFDFTHPCDHEEMREMLTHRNGLVKKGKEQNTQRSFFLRMKCTLTSRGRTMNIKSATWKVLHCTGHIHVYDTNSNQPQCGYKKPPMTCLVLICEPIPHPSNIEIPLDSKTFLSRHSLDMKFSYCDERITELMGYEPEELLGRSIYEYYHALDSDHLTKTHHDMFTKGQVTTGQYRMLAKRGGYVWVETQATVIYNTKNSQPQCIVCVNYVVSGIIQHDLIFSLQQTECVLKPVESSDMKMTQLFTKVESEDTSSLFDKLKKEPDALTLLAPAAGDTIISLDFGSNDTETDDQQLEEVPLYNDVMLPSPNEKLQNINLAMSPLPTAETPKPLRSSADPALNQEVALKLEPNPESLELSFTMPQIQDQTPSPSDGSTRQSSPEPNSPSEYCFYVDSDMVNEFKLELVEKLFAEDTEAKNPFSTQDTDLDLEMLAPYIPMDDDFQLRSFDQLSPLESSSASPESASPQSTVTVFQQTQIQEPTANATTTTATTDELKTVTKDRMEDIKILIASPSPTHIHKETTSATSSPYRDTQSRTASPNRAGKGVIEQTEKSHPRSPNVLSVALSQRTTVPEEELNPKILALQNAQRKRKMEHDGSLFQAVGIGTLLQQPDDHAATTSLSWKRVKGCKSSEQNGMEQKTIILIPSDLACRLLGQSMDESGLPQLTSYDCEVNAPIQGSRNLLQGEELLRALDQVN

SEQ ID NO: 118475 - protein, 577 aa, Artificial Sequence
  derived and/or modified sequence
MKFSYCDERITELMGYEPEELLGRSIYEYYHALDSDHLTKTHHDMFTKGQVTTGQYRMLAKRGGYVWVETQATVIYNTKNSQPQCIVCVNYVVSGIIQHDLIFSLQQTECVLKPVESSDMKMTQLFTKVESEDTSSLFDKLKKEPDALTLLAPAAGDTIISLDFGSNDTETDDQQLEEVPLYNDVMLPSPNEKLQNINLAMSPLPTAETPKPLRSSADPALNQEVALKLEPNPESLELSFTMPQIQDQTPSPSDGSTRQSSPEPNSPSEYCFYVDSDMVNEFKLELVEKLFAEDTEAKNPFSTQDTDLDLEMLAPYIPMDDDFQLRSFDQLSPLESSSASPESASPQSTVTVFQQTQIQEPTANATTTTATTDELKTVTKDRMEDIKILIASPSPTHIHKETTSATSSPYRDTQSRTASPNRAGKGVIEQTEKSHPRSPNVLSVALSQRTTVPEEELNPKILALQNAQRKRKMEHDGSLFQAVGIGTLLQQPDDHAATTSLSWKRVKGCKSSEQNGMEQKTIILIPSDLACRLLGQSMDESGLPQLTSYDCEVNAPIQGSRNLLQGEELLRALDQVN

SEQ ID NO: 118476 - DNA, 2481 bp, Artificial Sequence
  derived and/or modified sequence
atggagggcgccggcggcgccaacgacaagaagaagatcagcagcgagagaagaaaggagaagagcagagacgccgccagaagcagaagaagcaaggagagcgaggtgttctacgagctggcccaccagctgcccctgccccacaacgtgagcagccacctggacaaggccagcgtgatgagactgaccatcagctacctgagagtgagaaagctgctggacgccggcgacctggacatcgaggacgacatgaaggcccagatgaactgcttctacctgaaggccctggacggcttcgtgatggtgctgaccgacgacggcgacatgatctacatcagcgacaacgtgaacaagtacatgggcctgacccagttcgagctgaccggccacagcgtgttcgacttcacccacccctgcgaccacgaggagatgagagagatgctgacccacagaaacggcctggtgaagaagggcaaggagcagaacacccagagaagcttcttcctgagaatgaagtgcaccctgaccagcagaggcagaaccatgaacatcaagagcgccacctggaaggtgctgcactgcaccggccacatccacgtgtacgacaccaacagcaaccagccccagtgcggctacaagaagccccccatgacctgcctggtgctgatctgcgagcccatcccccaccccagcaacatcgagatccccctggacagcaagaccttcctgagcagacacagcctggacatgaagttcagctactgcgacgagagaatcaccgagctgatgggctacgagcccgaggagctgctgggcagaagcatctacgagtactaccacgccctggacagcgaccacctgaccaagacccaccacgacatgttcaccaagggccaggtgaccaccggccagtacagaatgctggccaagagaggcggctacgtgtgggtggagacccaggccaccgtgatctacaacaccaagaacagccagccccagtgcatcgtgtgcgtgaactacgtggtgagcggcatcatccagcacgacctgatcttcagcctgcagcagaccgagtgcgtgctgaagcccgtggagagcagcgacatgaagatgacccagctgttcaccaaggtggagagcgaggacaccagcagcctgttcgacaagctgaagaaggagcccgacgccctgaccctgctggcccccgccgccggcgacaccatcatcagcctggacttcggcagcaacgacaccgagaccgacgaccagcagctggaggaggtgcccctgtacaacgacgtgatgctgcccagccccaacgagaagctgcagaacatcaacctggccatgagccccctgcccaccgccgagacccccaagcccctgagaagcagcgccgaccccgccctgaaccaggaggtggccctgaagctggagcccaaccccgagagcctggagctgagcttcaccatgccccagatccaggaccagacccccagccccagcgacggcagcaccagacagagcagccccgagcccaacagccccagcgagtactgcttctacgtggacagcgacatggtgaacgagttcaagctggagctggtggagaagctgttcgccgaggacaccgaggccaagaaccccttcagcacccaggacaccgacctggacctggagatgctggccccctacatccccatggacgacgacttccagctgagaagcttcgaccagctgagccccctggagagcagcagcgccagccccgagagcgccagcccccagagcaccgtgaccgtgttccagcagacccagatccaggagcccaccgccaacgccaccaccaccaccgccaccaccgacgagctgaagaccgtgaccaaggacagaatggaggacatcaagatcctgatcgccagccccagccccacccacatccacaaggagaccaccagcgccaccagcagcccctacagagacacccagagcagaaccgccagccccaacagagccggcaagggcgtgatcgagcagaccgagaagagccaccccagaagccccaacgtgctgagcgtggccctgagccagagaaccaccgtgcccgaggaggagctgaaccccaagatcctggccctgcagaacgcccagagaaagagaaagatggagcacgacggcagcctgttccaggccgtgggcatcggcaccctgctgcagcagcccgacgaccacgccgccaccaccagcctgagctggaagagagtgaagggctgcaagagcagcgagcagaacggcatggagcagaagaccatcatcctgatccccagcgacctggcctgcagactgctgggccagagcatggacgagagcggcctgccccagctgaccagctacgactgcgaggtgaacgcccccatccagggcagcagaaacctgctgcagggcgaggagctgctgagagccctggaccaggtgaactag

SEQ ID NO: 118477 - DNA, 2304 bp, Artificial Sequence
  derived and/or modified sequence
atgagactgaccatcagctacctgagagtgagaaagctgctggacgccggcgacctggacatcgaggacgacatgaaggcccagatgaactgcttctacctgaaggccctggacggcttcgtgatggtgctgaccgacgacggcgacatgatctacatcagcgacaacgtgaacaagtacatgggcctgacccagttcgagctgaccggccacagcgtgttcgacttcacccacccctgcgaccacgaggagatgagagagatgctgacccacagaaacggcctggtgaagaagggcaaggagcagaacacccagagaagcttcttcctgagaatgaagtgcaccctgaccagcagaggcagaaccatgaacatcaagagcgccacctggaaggtgctgcactgcaccggccacatccacgtgtacgacaccaacagcaaccagccccagtgcggctacaagaagccccccatgacctgcctggtgctgatctgcgagcccatcccccaccccagcaacatcgagatccccctggacagcaagaccttcctgagcagacacagcctggacatgaagttcagctactgcgacgagagaatcaccgagctgatgggctacgagcccgaggagctgctgggcagaagcatctacgagtactaccacgccctggacagcgaccacctgaccaagacccaccacgacatgttcaccaagggccaggtgaccaccggccagtacagaatgctggccaagagaggcggctacgtgtgggtggagacccaggccaccgtgatctacaacaccaagaacagccagccccagtgcatcgtgtgcgtgaactacgtggtgagcggcatcatccagcacgacctgatcttcagcctgcagcagaccgagtgcgtgctgaagcccgtggagagcagcgacatgaagatgacccagctgttcaccaaggtggagagcgaggacaccagcagcctgttcgacaagctgaagaaggagcccgacgccctgaccctgctggcccccgccgccggcgacaccatcatcagcctggacttcggcagcaacgacaccgagaccgacgaccagcagctggaggaggtgcccctgtacaacgacgtgatgctgcccagccccaacgagaagctgcagaacatcaacctggccatgagccccctgcccaccgccgagacccccaagcccctgagaagcagcgccgaccccgccctgaaccaggaggtggccctgaagctggagcccaaccccgagagcctggagctgagcttcaccatgccccagatccaggaccagacccccagccccagcgacggcagcaccagacagagcagccccgagcccaacagccccagcgagtactgcttctacgtggacagcgacatggtgaacgagttcaagctggagctggtggagaagctgttcgccgaggacaccgaggccaagaaccccttcagcacccaggacaccgacctggacctggagatgctggccccctacatccccatggacgacgacttccagctgagaagcttcgaccagctgagccccctggagagcagcagcgccagccccgagagcgccagcccccagagcaccgtgaccgtgttccagcagacccagatccaggagcccaccgccaacgccaccaccaccaccgccaccaccgacgagctgaagaccgtgaccaaggacagaatggaggacatcaagatcctgatcgccagccccagccccacccacatccacaaggagaccaccagcgccaccagcagcccctacagagacacccagagcagaaccgccagccccaacagagccggcaagggcgtgatcgagcagaccgagaagagccaccccagaagccccaacgtgctgagcgtggccctgagccagagaaccaccgtgcccgaggaggagctgaaccccaagatcctggccctgcagaacgcccagagaaagagaaagatggagcacgacggcagcctgttccaggccgtgggcatcggcaccctgctgcagcagcccgacgaccacgccgccaccaccagcctgagctggaagagagtgaagggctgcaagagcagcgagcagaacggcatggagcagaagaccatcatcctgatccccagcgacctggcctgcagactgctgggccagagcatggacgagagcggcctgccccagctgaccagctacgactgcgaggtgaacgcccccatccagggcagcagaaacctgctgcagggcgaggagctgctgagagccctggaccaggtgaactag

SEQ ID NO: 118478 - DNA, 2484 bp, Artificial Sequence
  derived and/or modified sequence
atggagggcgccggcggcgccaacgacaagaagaacagaatcagcagcgagagaagaaaggagaagagcagagacgccgccagaagcagaagaagcaaggagagcgaggtgttctacgagctggcccaccagctgcccctgccccacaacgtgagcagccacctggacaaggccagcgtgatgagactgaccatcagctacctgagagtgagaaagctgctggacgccggcgacctggacatcgaggacgacatgaaggcccagatgaactgcttctacctgaaggccctggacggcttcgtgatggtgctgaccgacgacggcgacatgatctacatcagcgacaacgtgaacaagtacatgggcctgacccagttcgagctgaccggccacagcgtgttcgacttcacccacccctgcgaccacgaggagatgagagagatgctgacccacagaaacggcctggtgaagaagggcaaggagcagaacacccagagaagcttcttcctgagaatgaagtgcaccctgaccagcagaggcagaaccatgaacatcaagagcgccacctggaaggtgctgcactgcaccggccacatccacgtgtacgacaccaacagcaaccagccccagtgcggctacaagaagccccccatgacctgcctggtgctgatctgcgagcccatcccccaccccagcaacatcgagatccccctggacagcaagaccttcctgagcagacacagcctggacatgaagttcagctactgcgacgagagaatcaccgagctgatgggctacgagcccgaggagctgctgggcagaagcatctacgagtactaccacgccctggacagcgaccacctgaccaagacccaccacgacatgttcaccaagggccaggtgaccaccggccagtacagaatgctggccaagagaggcggctacgtgtgggtggagacccaggccaccgtgatctacaacaccaagaacagccagccccagtgcatcgtgtgcgtgaactacgtggtgagcggcatcatccagcacgacctgatcttcagcctgcagcagaccgagtgcgtgctgaagcccgtggagagcagcgacatgaagatgacccagctgttcaccaaggtggagagcgaggacaccagcagcctgttcgacaagctgaagaaggagcccgacgccctgaccctgctggcccccgccgccggcgacaccatcatcagcctggacttcggcagcaacgacaccgagaccgacgaccagcagctggaggaggtgcccctgtacaacgacgtgatgctgcccagccccaacgagaagctgcagaacatcaacctggccatgagccccctgcccaccgccgagacccccaagcccctgagaagcagcgccgaccccgccctgaaccaggaggtggccctgaagctggagcccaaccccgagagcctggagctgagcttcaccatgccccagatccaggaccagacccccagccccagcgacggcagcaccagacagagcagccccgagcccaacagccccagcgagtactgcttctacgtggacagcgacatggtgaacgagttcaagctggagctggtggagaagctgttcgccgaggacaccgaggccaagaaccccttcagcacccaggacaccgacctggacctggagatgctggccccctacatccccatggacgacgacttccagctgagaagcttcgaccagctgagccccctggagagcagcagcgccagccccgagagcgccagcccccagagcaccgtgaccgtgttccagcagacccagatccaggagcccaccgccaacgccaccaccaccaccgccaccaccgacgagctgaagaccgtgaccaaggacagaatggaggacatcaagatcctgatcgccagccccagccccacccacatccacaaggagaccaccagcgccaccagcagcccctacagagacacccagagcagaaccgccagccccaacagagccggcaagggcgtgatcgagcagaccgagaagagccaccccagaagccccaacgtgctgagcgtggccctgagccagagaaccaccgtgcccgaggaggagctgaaccccaagatcctggccctgcagaacgcccagagaaagagaaagatggagcacgacggcagcctgttccaggccgtgggcatcggcaccctgctgcagcagcccgacgaccacgccgccaccaccagcctgagctggaagagagtgaagggctgcaagagcagcgagcagaacggcatggagcagaagaccatcatcctgatccccagcgacctggcctgcagactgctgggccagagcatggacgagagcggcctgccccagctgaccagctacgactgcgaggtgaacgcccccatccagggcagcagaaacctgctgcagggcgaggagctgctgagagccctggaccaggtgaactag

SEQ ID NO: 118479 - DNA, 1734 bp, Artificial Sequence
  derived and/or modified sequence
atgaagttcagctactgcgacgagagaatcaccgagctgatgggctacgagcccgaggagctgctgggcagaagcatctacgagtactaccacgccctggacagcgaccacctgaccaagacccaccacgacatgttcaccaagggccaggtgaccaccggccagtacagaatgctggccaagagaggcggctacgtgtgggtggagacccaggccaccgtgatctacaacaccaagaacagccagccccagtgcatcgtgtgcgtgaactacgtggtgagcggcatcatccagcacgacctgatcttcagcctgcagcagaccgagtgcgtgctgaagcccgtggagagcagcgacatgaagatgacccagctgttcaccaaggtggagagcgaggacaccagcagcctgttcgacaagctgaagaaggagcccgacgccctgaccctgctggcccccgccgccggcgacaccatcatcagcctggacttcggcagcaacgacaccgagaccgacgaccagcagctggaggaggtgcccctgtacaacgacgtgatgctgcccagccccaacgagaagctgcagaacatcaacctggccatgagccccctgcccaccgccgagacccccaagcccctgagaagcagcgccgaccccgccctgaaccaggaggtggccctgaagctggagcccaaccccgagagcctggagctgagcttcaccatgccccagatccaggaccagacccccagccccagcgacggcagcaccagacagagcagccccgagcccaacagccccagcgagtactgcttctacgtggacagcgacatggtgaacgagttcaagctggagctggtggagaagctgttcgccgaggacaccgaggccaagaaccccttcagcacccaggacaccgacctggacctggagatgctggccccctacatccccatggacgacgacttccagctgagaagcttcgaccagctgagccccctggagagcagcagcgccagccccgagagcgccagcccccagagcaccgtgaccgtgttccagcagacccagatccaggagcccaccgccaacgccaccaccaccaccgccaccaccgacgagctgaagaccgtgaccaaggacagaatggaggacatcaagatcctgatcgccagccccagccccacccacatccacaaggagaccaccagcgccaccagcagcccctacagagacacccagagcagaaccgccagccccaacagagccggcaagggcgtgatcgagcagaccgagaagagccaccccagaagccccaacgtgctgagcgtggccctgagccagagaaccaccgtgcccgaggaggagctgaaccccaagatcctggccctgcagaacgcccagagaaagagaaagatggagcacgacggcagcctgttccaggccgtgggcatcggcaccctgctgcagcagcccgacgaccacgccgccaccaccagcctgagctggaagagagtgaagggctgcaagagcagcgagcagaacggcatggagcagaagaccatcatcctgatccccagcgacctggcctgcagactgctgggccagagcatggacgagagcggcctgccccagctgaccagctacgactgcgaggtgaacgcccccatccagggcagcagaaacctgctgcagggcgaggagctgctgagagccctggaccaggtgaactag

SEQ ID NO: 118480 - DNA, 2481 bp, Artificial Sequence
  derived and/or modified sequence
atggaaggcgccggcggagcaaatgataagaagaaaattagttctgagcggaggaaagagaaatctcgcgatgccgcacgatcccgtagaagcaaggagagtgaagttttctacgagctcgcgcaccagctgcccctgcctcataatgtgtcatcccacttagacaaagcctccgtaatgaggctgacaatcagctacttgcgagtgcgaaaactgctggacgccggggacctggatattgaggacgatatgaaggcacagatgaattgcttctacttgaaagctttggatggatttgtaatggtgctgacagatgatggcgatatgatctatatctccgataacgtcaataaatatatgggtttgactcagtttgagctcaccggacactcagtttttgatttcacacacccttgtgaccacgaggaaatgagagaaatgttaactcataggaatggcttggtaaagaaaggcaaggaacagaacacccaacggtctttcttcttaagaatgaaatgcacattaacaagtcgaggacggacaatgaacatcaaatccgctacctggaaggtcctccattgcactgggcatatccacgtctacgatacaaactcaaatcaaccccagtgtggctataagaagccccccatgacctgtttggtcctgatttgtgaacctattccccatccttcaaatattgaaatccctctcgacagtaagactttcctctcgaggcactcgctggacatgaagttttcatattgcgatgagcggataaccgaactcatgggctacgagcccgaggagcttctgggaagatccatctatgaatactatcacgcccttgattccgaccacctgactaaaacccatcatgatatgttcaccaaggggcaagtcaccaccgggcagtacaggatgctggccaaaagggggggttatgtctgggtggaaacccaggctacagttatctacaatactaagaattcccaaccccaatgcattgtgtgcgtgaactacgtggtctcaggcattatccagcatgacctgatattttcattacaacaaactgaatgtgttctgaaaccagtggaatccagcgatatgaaaatgacccagctgttcacaaaagttgaatcagaggacacatcctcgttattcgacaaacttaagaaggagcctgacgccctgactctgttggcccctgccgccggcgatactatcatttctctggatttcggctccaatgacactgaaaccgatgatcaacaattggaggaggtgccgctgtacaacgacgtcatgctgcctagccctaacgaaaagcttcaaaacataaatcttgctatgtcccctctgcctacggccgagacacctaaacctcttcgaagcagtgcggaccctgcccttaaccaggaagtcgccctgaagctcgagcccaaccccgaaagcctggagttaagcttcaccatgccacagatccaagatcaaaccccaagtcccagcgatggctccactcggcagagttctcccgaaccgaactcaccatcagagtactgtttttacgttgattcggatatggttaacgagtttaaactggaactcgtcgagaagttgttcgcagaagatactgaggctaaaaatccattttccacacaggacaccgatctcgacctggagatgcttgctccatatattcccatggacgacgattttcagttgcgcagcttcgaccagctgtccccacttgaatcttcatccgctagtccagagtccgcgagcccccagtctacagtgaccgttttccagcaaacccagatccaggaacccactgccaacgcgaccactaccacagcaaccacggatgaactgaaaacagtgacgaaggatcgcatggaagacatcaagattctgatcgcatctccgtctcccacacatatacacaaagagacaacgtccgctacttcatctccgtacagggatacacagtcccggactgcctcaccaaaccgggcgggcaaaggtgtgattgagcagactgaaaagtctcacccgaggtctccaaacgtcctgtccgtggcacttagccagcggactaccgtgccggaggaagaacttaacccaaaaatcctggctttacagaatgctcagaggaagagaaaaatggagcacgacggctccctgtttcaagcggtcggcatcggcaccctcctgcagcagccggacgatcatgctgctaccaccagcctcagctggaagcgcgtaaagggatgcaaatcttccgagcagaacggcatggagcaaaaaacaatcatcctgatcccctctgatctcgcctgtcgactgttaggccagtctatggacgagtccggcctcccccagttgacaagttacgactgcgaagtgaacgctcccatacagggctcccgcaatctactccagggtgaggagctcctgagggccctcgatcaggtgaattag

SEQ ID NO: 118481 - DNA, 2304 bp, Artificial Sequence
  derived and/or modified sequence
atgcgcctcactattagttacctccgggtcagaaaactgttggatgctggcgacctggatattgaggacgacatgaaagcccagatgaattgcttctacctgaaggccctcgatgggttcgtgatggtcctgacggatgacggggatatgatctatataagtgacaacgtcaataagtacatgggcttgacccagtttgagttgaccggtcattccgtttttgattttacgcacccgtgtgaccacgaggaaatgcgggagatgttaactcatcggaacggtcttgtgaagaagggcaaagaacagaatacccagcggtccttttttttgcgcatgaagtgcactctgacgtcgcgaggaagaactatgaacattaaaagtgctacctggaaggtcctccactgtacaggacatattcatgtctatgatacaaactccaatcagccccaatgcggatataagaaaccccccatgacatgcctggtcctgatatgtgagccgatccctcacccaagtaatattgagataccattggacagtaaaacctttctgtcaagacattcactcgacatgaagttcagctattgtgatgaacggatcacagaattaatgggttatgagccagaggagttgctgggccgatctatctatgagtactaccacgctctcgatagcgaccacctcacaaaaacccaccatgacatgttcacaaaagggcaggtgactacaggccagtaccgtatgctagccaagagagggggttacgtctgggtggagactcaggctacagtaatctataatacgaaaaatagtcaaccgcagtgcatcgtatgcgtaaattatgtagtttctggcatcattcaacacgatctgatcttttccctgcaacagaccgagtgcgtcctgaaacctgtggagtcctccgacatgaagatgacccagctttttactaaagtggagagcgaggacacatcgagtctgttcgacaaactgaaaaaggaaccggacgcgttaacccttctggcgccagctgcaggagataccatcatctctttagactttggctcaaatgatacggagaccgatgaccagcagctagaggaagttccgttatataacgatgtgatgttgccttccccaaatgaaaaactccagaacatcaacctggctatgtcccctctcccgacagcagaaactcctaagccactgagatcatctgcagacccggctctgaaccaagaggtcgcgctcaagttagaacctaacccagaatccttagagctgtccttcacgatgccacaaatccaggatcagactcctagtccttctgatgggtccaccagacagtcatcacctgaacctaattccccatccgaatattgcttttacgtggattccgatatggtgaacgaattcaagcttgagctggttgagaaacttttcgccgaagatacagaggccaaaaaccccttttctacgcaggataccgaccttgacctcgagatgttagcgccatacattcccatggatgacgacttccagcttcggagcttcgaccagctatcaccgctggagtcatcctccgcaagtcctgagagtgcctctcctcaaagcaccgtcaccgtcttccagcaaacgcagattcaagagcccaccgcaaatgcgacaactaccaccgccaccactgatgagttaaagacagtcacgaaagaccggatggaagatatcaaaatattaatcgcctctccttcccctacacacattcacaaagagactaccagcgcaacctccagtccttatcgggatacgcaatctagaacagcgagtccaaatcgggccggcaaaggggtgatagaacagaccgaaaaatcgcatcctcgctcccctaacgtccttagcgtcgctctatcccagaggacaaccgtgccagaggaggagttaaatcccaaaatcctcgctttacagaatgcccagagaaagaggaaaatggagcacgacgggtccttattccaggctgttggtatcggcaccctgctgcagcagcctgatgaccacgctgccacaacatcccttagttggaagagagtaaaaggctgcaagagtagtgagcaaaatgggatggagcagaagaccatcatactgattccatccgatctcgcttgtcggctcctggggcaaagcatggatgagtctggtttgcctcagctaacttcctatgactgcgaggtcaacgcacccattcaggggtcacgtaacttactgcagggagaagaactcttacgcgccctcgaccaggttaactag

SEQ ID NO: 118482 - DNA, 2484 bp, Artificial Sequence
  derived and/or modified sequence
atggaaggagccggcggcgcaaacgataaaaagaatagaatctcgagtgagcgacggaaggagaagtccagggatgcagcccgtagccggaggagcaaggaatcagaggttttctatgagctggcccatcagcttcctctgcctcataacgtctcttcccacctggataaagcctccgtcatgcgcctgactatttcatacctcagggttaggaaacttctggatgcgggggatctcgatattgaggatgatatgaaggctcagatgaactgcttctaccttaaggccctggatggatttgtaatggtgttgacagacgatggagacatgatatacatatcagataacgtgaacaagtacatggggctcacgcaatttgagctgacaggccactccgttttcgacttcactcatccctgcgaccatgaggaaatgagggagatgttgactcatcgcaatggtcttgttaagaagggcaaagaacagaacactcagaggtcattctttctgcgaatgaagtgtactctgacctcgcgtggtcgcacaatgaatattaagagtgctacctggaaagtcctccactgcacagggcacattcatgtatatgacaccaactctaaccaaccccaatgcggctataagaagccccccatgacatgcctggttctcatatgcgaacctatcccacacccttctaatatagaaatccccttggatagcaaaaccttcctgagccgccactccctggacatgaagttctcgtattgtgacgaacgtattacagaacttatgggctatgagccagaggaactcctcggtaggtctatctacgaatattaccatgcactggacagcgaccatctgacgaaaacgcaccatgacatgtttaccaagggccaagtgacaacggggcagtacaggatgctggctaaacgggggggatacgtttgggtcgaaacccaggcaacggtgatttataacactaagaacagtcagccacagtgtattgtgtgcgtgaattacgtcgtgtcaggaatcatccagcacgatctgatattttcgctgcaacagaccgaatgcgtccttaaaccggtggagagctccgacatgaagatgacacagctgttcactaaagtcgagagtgaagacacctcttcactcttcgataagttgaagaaggagccagatgccctgacattactggcacccgccgcaggagacaccatcatctcgctggactttggttcaaatgatactgaaacagatgaccaacagttggaggaggtgcctttgtacaatgatgtcatgcttccgtctcctaacgagaagctgcagaacattaacctggccatgtcacctctgcccactgctgaaacacccaagcctttgcggagcagcgcggatcctgcgctcaaccaggaggttgctcttaagctggagccaaatccagaaagcctagagttgtcattcaccatgccacagatccaggaccagacaccttcgccgagcgatggaagcactagacaatccagccctgaaccaaactcacctagcgagtattgtttttatgtggatagcgacatggtcaacgagttcaagctggagctcgtggagaagttgtttgccgaagacactgaagctaaaaatcccttctcgactcaagatacggatctggacctggaaatgctcgcgccctatataccgatggacgatgactttcaactgagaagcttcgatcaactgtccccactggagtcatctagtgcctcaccagagtcagcctctccccagagcacagtgacagtttttcaacagacccagatccaggagcccactgcgaacgccaccactaccaccgcgactaccgatgaactaaagaccgtgacaaaagaccgcatggaggatattaaaattctgatcgcctctcccagccccacgcacatccacaaagaaacaacctcagcgacaagttctccataccgagacacacagagcagaactgcttcccctaaccgtgcagggaaaggtgttattgagcagacagagaagagccacccgcgaagcccaaatgtgttgagcgtagctctgtcgcagcgaacgaccgtccccgaagaggaactgaatcccaaaatcctcgccctacagaacgcacagaggaaaaggaagatggagcacgacggcagcctatttcaggccgtggggattggcactctgttacagcagccagacgatcatgcggcgaccaccagcctgtcctggaagcgcgtaaaggggtgcaagtcatccgagcagaacggcatggaacaaaagaccattatcttaatcccatctgatcttgcatgtaggctgttgggacagtcgatggatgaatcaggcctcccacagctgacctcctatgattgcgaagtcaatgcccccatacagggttcccgcaacctccttcagggcgaggagctgttgcgagctctggatcaggtcaattag

SEQ ID NO: 118483 - DNA, 1734 bp, Artificial Sequence
  derived and/or modified sequence
atgaaattcagctactgcgatgaaagaattaccgagttaatggggtacgaacctgaagaacttcttggacgctcgatctacgaatattatcacgctctggattctgatcatctgaccaagacccatcacgacatgtttaccaaggggcaagtcactaccggccaataccgtatgctcgcaaaacggggagggtacgtttgggttgagacccaggccacggtcatatataacacaaagaacagccagcctcagtgtatcgtgtgcgtgaattacgtcgtgtccggcattattcagcatgatttaatcttctctttgcagcaaaccgaatgcgtgctgaaaccagtggaatctagcgatatgaagatgacccagttatttacaaaggtggaaagtgaagatactagttccttatttgataagctaaagaaggaaccggatgccttgacacttctcgctcccgcagccggggacactattatcagcctggattttggctctaacgacaccgaaactgatgaccagcagctagaggaggtgcctttgtataacgatgttatgttacccagtcctaatgagaagttgcaaaatattaatcttgccatgagcccccttccaactgcggagacaccaaagcccctccggtcaagcgccgatccagcactcaaccaggaggtcgctttaaagctcgagcctaatcctgagtccctggaactctccttcactatgcctcagattcaggaccaaacaccaagcccttcggacggatctacccgacagtcctctccagagcctaacagtccttccgaatattgtttttacgtagactcagacatggtgaacgaattcaagcttgagctggtggagaaattgtttgcagaggatactgaggctaaaaaccctttttccacccaagacacagacctggatctggagatgctggctccttacattccaatggacgacgactttcagcttcgttcattcgatcaactcagcccattggaaagtagtagcgccagtccagaaagcgcatcaccccagtccacagtcactgtgttccagcaaacacagatccaagaacctaccgccaatgccaccaccacaacggccactaccgatgagttgaagaccgtcaccaaagacaggatggaagacatcaagatcctcatagccagtccctctcccacgcacattcacaaagagaccacgtcagccacctccagtccctatcgcgacacacagtccagaactgccagtcccaatagagcaggaaagggtgtcattgagcagacggaaaaaagccatccacggagccctaacgtcctgagtgttgcactctcacagcgcaccactgtcccagaggaggagctcaatcccaagatccttgctctacaaaatgcccagcggaaaagaaaaatggagcatgatggcagcctgtttcaagccgtgggcataggaacgttgctgcagcaacctgacgaccacgcggctactaccagtctgtcttggaaacgagtgaaggggtgtaagagctcagagcaaaacggcatggagcaaaaaacaataatccttatcccctccgatctggcctgtaggctgcttgggcaatctatggacgaaagcgggctgccacaactgacaagctatgattgcgaagttaacgcccccattcagggctctcgcaacctgctccagggtgaggagctgctgcgcgcgctggaccaggtcaattag

SEQ ID NO: 118484 - DNA, 2304 bp, Artificial Sequence
  derived and/or modified sequence
atgcgactgacgatttcgtacctcagggtccgaaagctgctagatgccggcgatctggacattgaagatgacatgaaagcacagatgaattgcttctatttgaaggctctcgatggatttgtgatggtgctcactgacgatggagacatgatatatatctcggacaacgtgaataaatacatgggactgactcagttcgaattgactggacattctgtcttcgactttacacacccctgcgaccatgaagagatgagggaaatgctgacacacaggaacggcctggtaaagaagggcaaggaacagaacactcagcggtctttctttctccggatgaagtgtacgctgaccagcaggggtagaactatgaatatcaagtccgctacatggaaggtcctccactgcactggccacatccacgtatacgacacgaactccaaccaaccacagtgtgggtataagaagcccccaatgacatgtctcgtactaatctgtgaacctataccacacccatcaaacattgaaattccccttgactcaaagacctttctatctaggcactccctagacatgaagttttcctactgcgacgagagaatcacagagctgatgggctacgagccagaggagctgctaggtcgctctatatatgagtactaccacgcactggatagtgaccacttaacaaagacacatcacgatatgttcactaagggtcaagtgactaccggtcagtatagaatgctggcaaagaggggaggctacgtgtgggtggaaactcaggcaaccgtgatctataataccaagaactctcagccacagtgcatcgtatgcgtaaattatgtagtgtcaggtataatccagcacgacttgatcttctctctccagcaaacagagtgcgtgttgaagcccgtagagtcctctgatatgaagatgacgcaacttttcactaaggtggaatccgaggacaccagctctctgtttgacaagttgaagaaggaaccggacgcacttacccttttggcccccgctgcgggcgacacgattatttctctcgacttcgggagtaacgatacagagaccgacgaccagcaactcgaggaggtgccactgtataatgacgttatgcttccaagtcctaacgagaaactgcaaaacattaacttggccatgtctcccctgccaacagccgagaccccaaaaccactgcgcagcagcgccgatcccgctctgaaccaggaggtggccttaaagctggaaccgaaccctgagtccctggagctgtcttttaccatgccccagattcaggaccagaccccatcgccttctgacggctccacgagacagagcagccccgaaccaaatagtccgagtgaatattgcttctacgtggactcagacatggttaatgaatttaagctggaattagtagaaaaactgttcgccgaagacacagaggctaagaatccattctctacacaggacaccgacctggaccttgaaatgctggccccctacatccctatggacgacgatttccagctgaggtcgtttgaccagctatccccccttgagagttcaagcgcgtcaccggagagcgcgagtcctcagtctaccgtgaccgtcttccagcaaacccaaattcaggagccaactgcaaatgccactacaactactgctactaccgatgagctcaagactgtcactaaagaccggatggaggacatcaagatcttgattgcctccccaagccctacacacatacataaggagacaacctccgctacatcttcaccatatagagatactcagtcgagaaccgccagtccgaatcgcgccggaaaaggagtaattgaacagactgaaaagtctcaccctcgatctccaaacgtgcttagcgtggcgctttcgcagcgtaccacggtgcctgaagaggagctgaacccaaagattctagcactgcagaacgcacagcgcaagcgtaagatggagcacgatggctcactattccaagccgtggggatcgggacactcctgcagcagccagacgaccacgccgcaaccacctctctttcatggaagcgggtgaagggctgtaagagttctgaacagaatggcatggaacagaaaacaattatcttgatcccttctgacctggcctgtcgccttctgggccagtccatggatgagagcggccttccccaactcacatcgtatgattgcgaagtgaatgctccgattcaggggagcagaaaccttctccagggcgaggagctactacgcgccttggaccaggttaattag

SEQ ID NO: 118485 - DNA, 3919 bp, Artificial Sequence
  derived and/or modified sequence
gacaggaggatcaccctcttcgtcgcttcggccagtgtgtcgggctgggccctgacaagccacctgaggagaggctcggagccgggcccggaccccggcgattgccgcccgcttctctctagtctcacgaggggtttcccgcctcgcacccccacctctggacttgcctttccttctcttctccgcgtgtggagggagccagcgcttaggccggagcgagcctgggggccgcccgccgtgaagacatcgcggggaccgattcaccatggagggcgccggcggcgcgaacgacaagaaaaagataagttctgaacgtcgaaaagaaaagtctcgagatgcagccagatctcggcgaagtaaagaatctgaagttttttatgagcttgctcatcagttgccacttccacataatgtgagttcgcatcttgataaggcctctgtgatgaggcttaccatcagctatttgcgtgtgaggaaacttctggatgctggtgatttggatattgaagatgacatgaaagcacagatgaattgcttttatttgaaagccttggatggttttgttatggttctcacagatgatggtgacatgatttacatttctgataatgtgaacaaatacatgggattaactcagtttgaactaactggacacagtgtgtttgattttactcatccatgtgaccatgaggaaatgagagaaatgcttacacacagaaatggccttgtgaaaaagggtaaagaacaaaacacacagcgaagcttttttctcagaatgaagtgtaccctaactagccgaggaagaactatgaacataaagtctgcaacatggaaggtattgcactgcacaggccacattcacgtatatgataccaacagtaaccaacctcagtgtgggtataagaaaccacctatgacctgcttggtgctgatttgtgaacccattcctcacccatcaaatattgaaattcctttagatagcaagactttcctcagtcgacacagcctggatatgaaattttcttattgtgatgaaagaattaccgaattgatgggatatgagccagaagaacttttaggccgctcaatttatgaatattatcatgctttggactctgatcatctgaccaaaactcatcatgatatgtttactaaaggacaagtcaccacaggacagtacaggatgcttgccaaaagaggtggatatgtctgggttgaaactcaagcaactgtcatatataacaccaagaattctcaaccacagtgcattgtatgtgtgaattacgttgtgagtggtattattcagcacgacttgattttctcccttcaacaaacagaatgtgtccttaaaccggttgaatcttcagatatgaaaatgactcagctattcaccaaagttgaatcagaagatacaagtagcctctttgacaaacttaagaaggaacctgatgctttaactttgctggccccagccgctggagacacaatcatatctttagattttggcagcaacgacacagaaactgatgaccagcaacttgaggaagtaccattatataatgatgtaatgctcccctcacccaacgaaaaattacagaatataaatttggcaatgtctccattacccaccgctgaaacgccaaagccacttcgaagtagtgctgaccctgcactcaatcaagaagttgcattaaaattagaaccaaatccagagtcactggaactttcttttaccatgccccagattcaggatcagacacctagtccttccgatggaagcactagacaaagttcacctgagcctaatagtcccagtgaatattgtttttatgtggatagtgatatggtcaatgaattcaagttggaattggtagaaaaactttttgctgaagacacagaagcaaagaacccattttctactcaggacacagatttagacttggagatgttagctccctatatcccaatggatgatgacttccagttacgttccttcgatcagttgtcaccattagaaagcagttccgcaagccctgaaagcgcaagtcctcaaagcacagttacagtattccagcagactcaaatacaagaacctactgctaatgccaccactaccactgccaccactgatgaattaaaaacagtgacaaaagaccgtatggaagacattaaaatattgattgcatctccatctcctacccacatacataaagaaactactagtgccacatcatcaccatatagagatactcaaagtcggacagcctcaccaaacagagcaggaaaaggagtcatagaacagacagaaaaatctcatccaagaagccctaacgtgttatctgtcgctttgagtcaaagaactacagttcctgaggaagaactaaatccaaagatactagctttgcagaatgctcagagaaagcgaaaaatggaacatgatggttcactttttcaagcagtaggaattggaacattattacagcagccagacgatcatgcagctactacatcactttcttggaaacgtgtaaaaggatgcaaatctagtgaacagaatggaatggagcaaaagacaattattttaataccctctgatttagcatgtagactgctggggcaatcaatggatgaaagtggattaccacagctgaccagttatgattgtgaagttaatgctcctatacaaggcagcagaaacctactgcagggtgaagaattactcagagctttggatcaagttaactgagctttttcttaatttcattcctttttttggacactggtggctcattacctaaagcagtctatttatattttctacatctaattttagaagcctggctacaatactgcacaaacttggttagttcaattttgatcccctttctacttaatttacattaatgctcttttttagtatgttctttaatgctggatcacagacagctcattttctcagttttttggtatttaaaccattgcattgcagtagcatcattttaaaaaatgcacctttttatttatttatttttggctagggagtttatccctttttcgaattatttttaagaagatgccaatataatttttgtaagaaggcagtaacctttcatcatgatcataggcagttgaaaaatttttacaccttttttttcacattttacataaataataatgctttgccagcagtacgtggtagccacaattgcacaatatattttcttaaaaaataccagcagttactcatggaatatattctgcgtttataaaactagtttttaagaagaaattttttttggcctatgaaattgttaaacctggaacatgacattgttaatcatataataatgattcttaaatgctgtatggtttattatttaaatgggtaaagccatttacataatatagaaagatatgcatatatctagaaggtatgtggcatttatttggataaaattctcaattcagagaaatcatctgatgtttctatagtcactttgccagctcaaaagaaaacaataccctatgtagttgtggaagtttatgctaatattgtgtaactgatattaaacctaaatgttctgcctaccctgttggtataaagatattttgagcagactgtaaacaagaaaaaaaaaatcatgcattcttagcaaaattgcctagtatgttaatttgctcaaaatacaatgtttgattttatgcactttgtcgctattaacatcctttttttcatgtagatttcaataattgagtaattttagaagcattattttaggaatatatagttgtcacagtaaatatcttgttttttctatgtacattgtacaaatttttcattccttttgctctttgtggttggatctaacactaactgtattgttttgttacatcaaataaacatcttctgtggaccagg

SEQ ID NO: 118486 - DNA, 3065 bp, Artificial Sequence
  derived and/or modified sequence
acagtgctgcctcgtctgaggggacaggaggatcaccctcttcgtcgcttcggccagtgtgtcgggctgggccctgacaagccacctgaggagaggctcggagccgggcccggaccccggcggcgcgaacgacaagaaaaagataagttctgaacgtcgaaaagaaaagtctcgagatgcagccagatctcggcgaagtaaagaatctgaagttttttatgagcttgctcatcagttgccacttccacataatgtgagttcgcatcttgataaggcctctgtgatgaggcttaccatcagctatttgcgtgtgaggaaacttctggatgctggtgatttggatattgaagatgacatgaaagcacagatgaattgcttttatttgaaagccttggatggttttgttatggttctcacagatgatggtgacatgatttacatttctgataatgtgaacaaatacatgggattaactcagtttgaactaactggacacagtgtgtttgattttactcatccatgtgaccatgaggaaatgagagaaatgcttacacacagaaatggccttgtgaaaaagggtaaagaacaaaacacacagcgaagcttttttctcagaatgaagtgtaccctaactagccgaggaagaactatgaacataaagtctgcaacatggaaggtattgcactgcacaggccacattcacgtatatgataccaacagtaaccaacctcagtgtgggtataagaaaccacctatgacctgcttggtgctgatttgtgaacccattcctcacccatcaaatattgaaattcctttagatagcaagactttcctcagtcgacacagcctggatatgaaattttcttattgtgatgaaagaattaccgaattgatgggatatgagccagaagaacttttaggccgctcaatttatgaatattatcatgctttggactctgatcatctgaccaaaactcatcatgatatgtttactaaaggacaagtcaccacaggacagtacaggatgcttgccaaaagaggtggatatgtctgggttgaaactcaagcaactgtcatatataacaccaagaattctcaaccacagtgcattgtatgtgtgaattacgttgtgagtggtattattcagcacgacttgattttctcccttcaacaaacagaatgtgtccttaaaccggttgaatcttcagatatgaaaatgactcagctattcaccaaagttgaatcagaagatacaagtagcctctttgacaaacttaagaaggaacctgatgctttaactttgctggccccagccgctggagacacaatcatatctttagattttggcagcaacgacacagaaactgatgaccagcaacttgaggaagtaccattatataatgatgtaatgctcccctcacccaacgaaaaattacagaatataaatttggcaatgtctccattacccaccgctgaaacgccaaagccacttcgaagtagtgctgaccctgcactcaatcaagaagttgcattaaaattagaaccaaatccagagtcactggaactttcttttaccatgccccagattcaggatcagacacctagtccttccgatggaagcactagacaaagttcacctgagcctaatagtcccagtgaatattgtttttatgtggatagtgatatggtcaatgaattcaagttggaattggtagaaaaactttttgctgaagacacagaagcaaagaacccattttctactcaggacacagatttagacttggagatgttagctccctatatcccaatggatgatgacttccagttacgttccttcgatcagttgtcaccattagaaagcagttccgcaagccctgaaagcgcaagtcctcaaagcacagttacagtattccagcagactcaaatacaagaacctactgctaatgccaccactaccactgccaccactgatgaattaaaaacagtgacaaaagaccgtatggaagacattaaaatattgattgcatctccatctcctacccacatacataaagaaactactagtgccacatcatcaccatatagagatactcaaagtcggacagcctcaccaaacagagcaggaaaaggagtcatagaacagacagaaaaatctcatccaagaagccctaacgtgttatctgtcgctttgagtcaaagaactacagttcctgaggaagaactaaatccaaagatactagctttgcagaatgctcagagaaagcgaaaaatggaacatgatggttcactttttcaagcagtaggaattggaacattattacagcagccagacgatcatgcagctactacatcactttcttggaaacgtgtaaaaggatgcaaatctagtgaacagaatggaatggagcaaaagacaattattttaataccctctgatttagcatgtagactgctggggcaatcaatggatgaaagtggattaccacagctgaccagttatgattgtgaagttaatgctcctatacaaggcagcagaaacctactgcagggtgaagaattactcagagctttggatcaagttaactgagctttttcttaatttcattcctttttttggacactggtggctcattacctaaagcagtctatttatattttctacatctaattttagaagcctggctacaatactgcacaaacttggttagttcaattttgatcccctttctacttaatttacattaatgctcttttttagtatgttctttaatgctggatcacagacagctcattttctcagttttttggtatttaaaccattgcattgcagtagcatcattttaaaaaatgcacctttttatttatttatttttggctagggagtttatccctttttcgaattatttttaagaagatgccaatataatttttgtaagaaggcagtaacctttcatcatgatcataggcagttgaaaaatttttacaccttttttttcacattttacataaataataatgctttgccagcagtacgtggtagccacaattgcacaatatattttctt

SEQ ID NO: 118487 - DNA, 3922 bp, Artificial Sequence
  derived and/or modified sequence
gacaggaggatcaccctcttcgtcgcttcggccagtgtgtcgggctgggccctgacaagccacctgaggagaggctcggagccgggcccggaccccggcgattgccgcccgcttctctctagtctcacgaggggtttcccgcctcgcacccccacctctggacttgcctttccttctcttctccgcgtgtggagggagccagcgcttaggccggagcgagcctgggggccgcccgccgtgaagacatcgcggggaccgattcaccatggagggcgccggcggcgcgaacgacaagaaaaataggataagttctgaacgtcgaaaagaaaagtctcgagatgcagccagatctcggcgaagtaaagaatctgaagttttttatgagcttgctcatcagttgccacttccacataatgtgagttcgcatcttgataaggcctctgtgatgaggcttaccatcagctatttgcgtgtgaggaaacttctggatgctggtgatttggatattgaagatgacatgaaagcacagatgaattgcttttatttgaaagccttggatggttttgttatggttctcacagatgatggtgacatgatttacatttctgataatgtgaacaaatacatgggattaactcagtttgaactaactggacacagtgtgtttgattttactcatccatgtgaccatgaggaaatgagagaaatgcttacacacagaaatggccttgtgaaaaagggtaaagaacaaaacacacagcgaagcttttttctcagaatgaagtgtaccctaactagccgaggaagaactatgaacataaagtctgcaacatggaaggtattgcactgcacaggccacattcacgtatatgataccaacagtaaccaacctcagtgtgggtataagaaaccacctatgacctgcttggtgctgatttgtgaacccattcctcacccatcaaatattgaaattcctttagatagcaagactttcctcagtcgacacagcctggatatgaaattttcttattgtgatgaaagaattaccgaattgatgggatatgagccagaagaacttttaggccgctcaatttatgaatattatcatgctttggactctgatcatctgaccaaaactcatcatgatatgtttactaaaggacaagtcaccacaggacagtacaggatgcttgccaaaagaggtggatatgtctgggttgaaactcaagcaactgtcatatataacaccaagaattctcaaccacagtgcattgtatgtgtgaattacgttgtgagtggtattattcagcacgacttgattttctcccttcaacaaacagaatgtgtccttaaaccggttgaatcttcagatatgaaaatgactcagctattcaccaaagttgaatcagaagatacaagtagcctctttgacaaacttaagaaggaacctgatgctttaactttgctggccccagccgctggagacacaatcatatctttagattttggcagcaacgacacagaaactgatgaccagcaacttgaggaagtaccattatataatgatgtaatgctcccctcacccaacgaaaaattacagaatataaatttggcaatgtctccattacccaccgctgaaacgccaaagccacttcgaagtagtgctgaccctgcactcaatcaagaagttgcattaaaattagaaccaaatccagagtcactggaactttcttttaccatgccccagattcaggatcagacacctagtccttccgatggaagcactagacaaagttcacctgagcctaatagtcccagtgaatattgtttttatgtggatagtgatatggtcaatgaattcaagttggaattggtagaaaaactttttgctgaagacacagaagcaaagaacccattttctactcaggacacagatttagacttggagatgttagctccctatatcccaatggatgatgacttccagttacgttccttcgatcagttgtcaccattagaaagcagttccgcaagccctgaaagcgcaagtcctcaaagcacagttacagtattccagcagactcaaatacaagaacctactgctaatgccaccactaccactgccaccactgatgaattaaaaacagtgacaaaagaccgtatggaagacattaaaatattgattgcatctccatctcctacccacatacataaagaaactactagtgccacatcatcaccatatagagatactcaaagtcggacagcctcaccaaacagagcaggaaaaggagtcatagaacagacagaaaaatctcatccaagaagccctaacgtgttatctgtcgctttgagtcaaagaactacagttcctgaggaagaactaaatccaaagatactagctttgcagaatgctcagagaaagcgaaaaatggaacatgatggttcactttttcaagcagtaggaattggaacattattacagcagccagacgatcatgcagctactacatcactttcttggaaacgtgtaaaaggatgcaaatctagtgaacagaatggaatggagcaaaagacaattattttaataccctctgatttagcatgtagactgctggggcaatcaatggatgaaagtggattaccacagctgaccagttatgattgtgaagttaatgctcctatacaaggcagcagaaacctactgcagggtgaagaattactcagagctttggatcaagttaactgagctttttcttaatttcattcctttttttggacactggtggctcattacctaaagcagtctatttatattttctacatctaattttagaagcctggctacaatactgcacaaacttggttagttcaattttgatcccctttctacttaatttacattaatgctcttttttagtatgttctttaatgctggatcacagacagctcattttctcagttttttggtatttaaaccattgcattgcagtagcatcattttaaaaaatgcacctttttatttatttatttttggctagggagtttatccctttttcgaattatttttaagaagatgccaatataatttttgtaagaaggcagtaacctttcatcatgatcataggcagttgaaaaatttttacaccttttttttcacattttacataaataataatgctttgccagcagtacgtggtagccacaattgcacaatatattttcttaaaaaataccagcagttactcatggaatatattctgcgtttataaaactagtttttaagaagaaattttttttggcctatgaaattgttaaacctggaacatgacattgttaatcatataataatgattcttaaatgctgtatggtttattatttaaatgggtaaagccatttacataatatagaaagatatgcatatatctagaaggtatgtggcatttatttggataaaattctcaattcagagaaatcatctgatgtttctatagtcactttgccagctcaaaagaaaacaataccctatgtagttgtggaagtttatgctaatattgtgtaactgatattaaacctaaatgttctgcctaccctgttggtataaagatattttgagcagactgtaaacaagaaaaaaaaaatcatgcattcttagcaaaattgcctagtatgttaatttgctcaaaatacaatgtttgattttatgcactttgtcgctattaacatcctttttttcatgtagatttcaataattgagtaattttagaagcattattttaggaatatatagttgtcacagtaaatatcttgttttttctatgtacattgtacaaatttttcattccttttgctctttgtggttggatctaacactaactgtattgttttgttacatcaaataaacatcttctgtggaccagg

SEQ ID NO: 118488 - DNA, 2655 bp, Artificial Sequence
  derived and/or modified sequence
agtgcacagtgctgcctcgtctgaggggacaggaggatcaccctcttcgtcgcttcggccagtgtgtcgggctgggccctgacaagccacctgaggagaggctcggagccgggcccggaccccggcgattgccgcccgcttctctctagtctcacgaggggtttcccgcctcgcacccccacctctggacttgcctttccttctcttctccgcgtgtggagggagccagcgcttaggccggagcgagcctgggggccgcccgccgtgaagacatcgcggggaccgattcaccatggagggcgccggcggcgcgaacgacaagaaaaagtgatttggatattgaagatgacatgaaagcacagatgaattgcttttatttgaaagccttggatggttttgttatggttctcacagatgatggtgacatgatttacatttctgataatgtgaacaaatacatgggattaactcagtttgaactaactggacacagtgtgtttgattttactcatccatgtgaccatgaggaaatgagagaaatgcttacacacagaaatggccttgtgaaaaagggtaaagaacaaaacacacagcctggatatgaaattttcttattgtgatgaaagaattaccgaattgatgggatatgagccagaagaacttttaggccgctcaatttatgaatattatcatgctttggactctgatcatctgaccaaaactcatcatgatatgtttactaaaggacaagtcaccacaggacagtacaggatgcttgccaaaagaggtggatatgtctgggttgaaactcaagcaactgtcatatataacaccaagaattctcaaccacagtgcattgtatgtgtgaattacgttgtgagtggtattattcagcacgacttgattttctcccttcaacaaacagaatgtgtccttaaaccggttgaatcttcagatatgaaaatgactcagctattcaccaaagttgaatcagaagatacaagtagcctctttgacaaacttaagaaggaacctgatgctttaactttgctggccccagccgctggagacacaatcatatctttagattttggcagcaacgacacagaaactgatgaccagcaacttgaggaagtaccattatataatgatgtaatgctcccctcacccaacgaaaaattacagaatataaatttggcaatgtctccattacccaccgctgaaacgccaaagccacttcgaagtagtgctgaccctgcactcaatcaagaagttgcattaaaattagaaccaaatccagagtcactggaactttcttttaccatgccccagattcaggatcagacacctagtccttccgatggaagcactagacaaagttcacctgagcctaatagtcccagtgaatattgtttttatgtggatagtgatatggtcaatgaattcaagttggaattggtagaaaaactttttgctgaagacacagaagcaaagaacccattttctactcaggacacagatttagacttggagatgttagctccctatatcccaatggatgatgacttccagttacgttccttcgatcagttgtcaccattagaaagcagttccgcaagccctgaaagcgcaagtcctcaaagcacagttacagtattccagcagactcaaatacaagaacctactgctaatgccaccactaccactgccaccactgatgaattaaaaacagtgacaaaagaccgtatggaagacattaaaatattgattgcatctccatctcctacccacatacataaagaaactactagtgccacatcatcaccatatagagatactcaaagtcggacagcctcaccaaacagagcaggaaaaggagtcatagaacagacagaaaaatctcatccaagaagccctaacgtgttatctgtcgctttgagtcaaagaactacagttcctgaggaagaactaaatccaaagatactagctttgcagaatgctcagagaaagcgaaaaatggaacatgatggttcactttttcaagcagtaggaattggaacattattacagcagccagacgatcatgcagctactacatcactttcttggaaacgtgtaaaaggatgcaaatctagtgaacagaatggaatggagcaaaagacaattattttaataccctctgatttagcatgtagactgctggggcaatcaatggatgaaagtggattaccacagctgaccagttatgattgtgaagttaatgctcctatacaaggcagcagaaacctactgcagggtgaagaattactcagagctttggatcaagttaactgagctttttcttaatttcattcctttttttggacactggtggctcattacctaaagcagtctatttatattttctacatctaattttagaagcctggctacaatactgcacaaacttggttagttcaattttgatcccctttctacttaatttacattaatgctcttttttagtatgttctttaatgctggatcacagacagctcattttctcagttttttggtatttaaaccattgcattgcagtagcatcattttaaaaaatgcacctttttatttatttatttttggctagggagtttatccctttttcgaattattttt

SEQ ID NO: 118489 - DNA, 2481 bp, Artificial Sequence
  derived and/or modified sequence
atggagggcgctgggggcgccaatgacaagaagaagatcagcagcgagaggaggaaggagaagagcagagatgctgcccggagcagaagaagcaaggagagcgaggtgttctatgagctggcccaccagctgcccctgccccacaacgtgagcagccacctggacaaggcctctgtgatgaggctgaccatctcctacctgcgggtgaggaagctgctggatgctggggacctggacattgaagatgacatgaaggcccagatgaactgcttctacctgaaggccctggatggctttgtgatggtgctgacagatgatggagacatgatctacatcagtgacaacgtgaacaagtacatgggcctgacccagtttgagctgaccggccacagcgtgtttgacttcacccacccctgtgaccacgaggagatgagggagatgctgacccacagaaatggcctggtgaagaagggcaaggagcagaacacccagaggagcttcttcctgaggatgaagtgcaccctgaccagccggggccgcaccatgaacatcaagagcgccacctggaaggtgctgcactgcaccggccacatccacgtgtatgacaccaacagcaaccagccccagtgtggctacaagaagccacccatgacctgcctggtgctgatctgtgagcccatcccccaccccagcaacatcgagatccccctggacagcaagaccttcctgagccgccacagcctggacatgaagttctcctactgtgatgagcgcatcacagagctgatgggctatgagcctgaggagctgctgggccgcagcatctatgagtactaccacgccctggacagcgaccacctgaccaagacccaccacgacatgttcaccaagggccaggtgaccaccggccagtacaggatgctggccaagaggggcggctacgtgtgggtggagacccaggccaccgtcatctacaacaccaagaacagccagccccagtgcatcgtgtgtgtgaactacgtggtgtctggcatcatccagcacgacctgatcttcagcctgcagcagacagaatgtgtgctgaagcctgtggagagcagtgacatgaagatgacccagctgttcaccaaggtggagagcgaggacaccagcagcctgtttgacaagctgaagaaggagccagatgccctgaccctgctggccccagctgctggggacaccatcatcagcctggactttggcagcaatgacacagaaacagatgaccagcagctggaggaggtgcccctgtacaatgatgtgatgctgcccagccccaatgagaagctgcagaacatcaacctggccatgagccccctgcccacagctgagacccccaagcccctgcggagcagcgctgaccctgccctgaaccaggaggtggccctgaagctggagcccaaccctgagagcctggagctgtccttcaccatgccccagatccaggaccagacccccagccccagtgatggcagcacccggcagagcagccctgagcccaacagccccagcgagtactgcttctacgtggacagcgacatggtgaatgagttcaagctggagctggtggagaagctgtttgctgaggacacagaggccaagaaccccttcagcacccaggacacagacctggacctggagatgctggccccctacatccccatggatgatgacttccagctgcggagctttgaccagctgagccccctggagagcagcagcgccagccctgagagcgccagcccccagagcacagtgaccgtcttccagcagacccagatccaggagcccacagccaatgccaccaccaccacagccaccacagatgagctgaagacagtgaccaaggacaggatggaggacatcaagatcctgattgccagccccagccccacccacatccacaaggagaccaccagcgccaccagcagcccctacagagacacccagagcaggacagccagccccaacagagctgggaagggcgtgattgagcagacagagaagagccaccccaggagccccaacgtgctgtctgtggccctgagccagaggaccaccgtgcctgaggaggagctgaaccccaagatcctggccctgcagaatgcccagaggaagaggaagatggagcatgatggcagcctcttccaggccgtgggcatcggcaccctgctgcagcagccagatgaccatgctgccaccaccagcctgtcctggaagagggtgaagggctgcaagagcagcgagcagaatggcatggagcagaagaccatcatcctgatccccagcgacctggcctgccgcctgctgggccagagcatggatgagagcggcctgccccagctgaccagctatgactgtgaggtgaatgcccccatccagggcagcaggaacctgctgcagggcgaggagctgctgcgggccctggaccaggtgaactag

SEQ ID NO: 118490 - DNA, 2304 bp, Artificial Sequence
  derived and/or modified sequence
atgaggctgaccatctcctacctgcgggtgaggaagctgctggatgctggggacctggacattgaagatgacatgaaggcccagatgaactgcttctacctgaaggccctggatggctttgtgatggtgctgacagatgatggagacatgatctacatcagtgacaacgtgaacaagtacatgggcctgacccagtttgagctgaccggccacagcgtgtttgacttcacccacccctgtgaccacgaggagatgagggagatgctgacccacagaaatggcctggtgaagaagggcaaggagcagaacacccagaggagcttcttcctgaggatgaagtgcaccctgaccagccggggccgcaccatgaacatcaagagcgccacctggaaggtgctgcactgcaccggccacatccacgtgtatgacaccaacagcaaccagccccagtgtggctacaagaagccacccatgacctgcctggtgctgatctgtgagcccatcccccaccccagcaacatcgagatccccctggacagcaagaccttcctgagccgccacagcctggacatgaagttctcctactgtgatgagcgcatcacagagctgatgggctatgagcctgaggagctgctgggccgcagcatctatgagtactaccacgccctggacagcgaccacctgaccaagacccaccacgacatgttcaccaagggccaggtgaccaccggccagtacaggatgctggccaagagaggaggctacgtgtgggtggagacccaggccaccgtcatctacaacaccaagaacagccagccccagtgcatcgtgtgtgtgaactacgtggtgtctggcatcatccagcacgacctgatcttcagcctgcagcagacagaatgtgtgctgaagcctgtggagagcagtgacatgaagatgacccagctgttcaccaaggtggagagcgaggacaccagcagcctgtttgacaagctgaagaaggagccagatgccctgaccctgctggccccagctgctggggacaccatcatcagcctggactttggcagcaatgacacagaaacagatgaccagcagctggaggaggtgcccctgtacaatgatgtgatgctgcccagccccaatgagaagctgcagaacatcaacctggccatgagccccctgcccacagctgagacccccaagcccctgcggagcagcgctgaccctgccctgaaccaggaggtggccctgaagctggagcccaaccctgagagcctggagctgtccttcaccatgccccagatccaggaccagacccccagccccagtgatggcagcacccggcagagcagccctgagcccaacagccccagcgagtactgcttctacgtggacagcgacatggtgaatgagttcaagctggagctggtggagaagctgtttgctgaggacacagaggccaagaaccccttcagcacccaggacacagacctggacctggagatgctggccccctacatccccatggatgatgacttccagctgcggagctttgaccagctgagccccctggagagcagcagcgccagccctgagagcgccagcccccagagcacagtgacagtgttccagcagacccagatccaggagcccacagccaatgccaccaccaccacagccaccacagatgagctgaagacagtgaccaaggacaggatggaggacatcaagatcctgattgccagccccagccccacccacatccacaaggagaccaccagcgccaccagcagcccctacagagacacccagagcaggacagccagccccaacagagctggaaaaggagtcatcgagcagacagagaagagccaccccaggagccccaacgtgctgtctgtggccctgagccagaggaccaccgtgcctgaggaggagctgaaccccaagatcctggccctgcagaatgcccagaggaagaggaagatggagcatgatggcagcctcttccaggccgtgggcatcggcaccctgctgcagcagccagatgaccacgccgccaccaccagcctgtcctggaagagggtgaagggctgcaagagcagcgagcagaatggcatggagcagaagaccatcatcctgatccccagcgacctggcctgccgcctgctgggccagagcatggatgaaagtggcctgccccagctgaccagctatgactgtgaggtgaatgcccccatccagggcagcaggaacctgctgcagggcgaggagctgctgcgggccctggaccaggtgaactag

SEQ ID NO: 118491 - DNA, 2484 bp, Artificial Sequence
  derived and/or modified sequence
atggagggcgctgggggcgccaatgacaagaagaaccgcatcagcagcgagaggaggaaggagaagagcagagatgctgcccggagccgccgcagcaaggagagcgaggtgttctatgagctggcccaccagctgcccctgccccacaacgtgagcagccacctggacaaggcctctgtgatgaggctgaccatctcctacctgcgggtgaggaagctgctggatgctggggacctggacattgaagatgacatgaaggcccagatgaactgcttctacctgaaggccctggatggctttgtgatggtgctgacagatgatggagacatgatctacatcagtgacaacgtgaacaagtacatgggcctgacccagtttgagctgaccggccacagcgtgtttgacttcacccacccctgtgaccacgaggagatgagggagatgctgacccacagaaatggcctggtgaagaagggcaaggagcagaacacccagaggagcttcttcctgaggatgaagtgcaccctgaccagccggggccgcaccatgaacatcaagagcgccacctggaaggtgctgcactgcaccggccacatccacgtgtatgacaccaacagcaaccagccccagtgtggctacaagaagccacccatgacctgcctggtgctgatctgtgagcccatcccccaccccagcaacatcgagatccccctggacagcaagaccttcctgagccgccacagcctggacatgaagttctcctactgtgatgagcgcatcacagagctgatgggctatgagcctgaggagctgctgggccgcagcatctatgagtactaccacgccctggacagcgaccacctgaccaagacccaccacgacatgttcaccaagggccaggtgaccaccggccagtacaggatgctggccaagagaggaggctacgtgtgggtggagacccaggccaccgtcatctacaacaccaagaacagccagccccagtgcatcgtgtgtgtgaactacgtggtgtctggcatcatccagcacgacctgatcttcagcctgcagcagacagaatgtgtgctgaagcctgtggagagcagtgacatgaagatgacccagctgttcaccaaggtggagagcgaggacaccagcagcctgtttgacaagctgaagaaggagccagatgccctgaccctgctggccccagctgctggggacaccatcatcagcctggactttggcagcaatgacacagaaacagatgaccagcagctggaggaggtgcccctgtacaatgatgtgatgctgcccagccccaatgagaagctgcagaacatcaacctggccatgagccccctgcccacagctgagacccccaagcccctgcggagcagcgctgaccctgccctgaaccaggaggtggccctgaagctggagcccaaccctgagagcctggagctgtccttcaccatgccccagatccaggaccagacccccagccccagtgatggcagcacccggcagagcagccctgagcccaacagccccagcgagtactgcttctacgtggacagcgacatggtgaatgagttcaagctggagctggtggagaagctgtttgctgaggacacagaggccaagaaccccttcagcacccaggacacagacctggacctggagatgctggccccctacatccccatggatgatgacttccagctgcggagctttgaccagctgagccccctggagagcagcagcgccagccctgagagcgccagcccccagagcacagtgacagtgttccagcagacccagatccaggagcccacagccaatgccaccaccaccacagccaccacagatgagctgaagacagtgaccaaggacaggatggaggacatcaagatcctgattgccagccccagccccacccacatccacaaggagaccaccagcgccaccagcagcccctacagagacacccagagcaggacagccagccccaacagagctggaaaaggagtcatcgagcagacagagaagagccaccccaggagccccaacgtgctgtctgtggccctgagccagaggaccaccgtgcctgaggaggagctgaaccccaagatcctggccctgcagaatgcccagaggaagaggaagatggagcatgatggcagcctcttccaggccgtgggcatcggcaccctgctgcagcagccagatgaccacgccgccaccaccagcctgtcctggaagagggtgaagggctgcaagagcagcgagcagaatggcatggagcagaagaccatcatcctgatccccagcgacctggcctgccgcctgctgggccagagcatggatgaaagtggcctgccccagctgaccagctatgactgtgaggtgaatgcccccatccagggcagcaggaacctgctgcagggcgaggagctgctgcgggccctggaccaggtgaactag

SEQ ID NO: 118492 - DNA, 1734 bp, Artificial Sequence
  derived and/or modified sequence
atgaagttctcctactgtgatgagcgcatcacagagctgatgggctatgagcctgaggagctgctgggccgcagcatctatgagtactaccacgccctggacagcgaccacctgaccaagacccaccacgacatgttcaccaagggccaggtgaccaccggccagtacaggatgctggccaagagaggaggctacgtgtgggtggagacccaggccaccgtcatctacaacaccaagaacagccagccccagtgcatcgtgtgtgtgaactacgtggtgtctggcatcatccagcacgacctgatcttcagcctgcagcagacagaatgtgtgctgaagcctgtggagagcagtgacatgaagatgacccagctgttcaccaaggtggagagcgaggacaccagcagcctgtttgacaagctgaagaaggagccagatgccctgaccctgctggccccagctgctggggacaccatcatcagcctggactttggcagcaatgacacagaaacagatgaccagcagctggaggaggtgcccctgtacaatgatgtgatgctgcccagccccaatgagaagctgcagaacatcaacctggccatgagccccctgcccacagctgagacccccaagcccctgcggagcagcgctgaccctgccctgaaccaggaggtggccctgaagctggagcccaaccctgagagcctggagctgtccttcaccatgccccagatccaggaccagacccccagccccagtgatggcagcacccggcagagcagccctgagcccaacagccccagcgagtactgcttctacgtggacagcgacatggtgaatgagttcaagctggagctggtggagaagctgtttgctgaggacacagaggccaagaaccccttcagcacccaggacacagacctggacctggagatgctggccccctacatccccatggatgatgacttccagctgcggagctttgaccagctgagccccctggagagcagcagcgccagccctgagagcgccagcccccagagcacagtgacagtgttccagcagacccagatccaggagcccacagccaatgccaccaccaccacagccaccacagatgagctgaagacagtgaccaaggacaggatggaggacatcaagatcctgattgccagccccagccccacccacatccacaaggagaccaccagcgccaccagcagcccctacagagacacccagagcaggacagccagccccaacagagctggaaaaggagtcatcgagcagacagagaagagccaccccaggagccccaacgtgctgtctgtggccctgagccagaggaccaccgtgcctgaggaggagctgaaccccaagatcctggccctgcagaatgcccagaggaagaggaagatggagcatgatggcagcctcttccaggccgtgggcatcggcaccctgctgcagcagccagatgaccacgccgccaccaccagcctgtcctggaagagggtgaagggctgcaagagcagcgagcagaatggcatggagcagaagaccatcatcctgatccccagcgacctggcctgccgcctgctgggccagagcatggatgaaagtggcctgccccagctgaccagctatgactgtgaggtgaatgcccccatccagggcagcaggaacctgctgcagggcgaggagctgctgcgggccctggaccaggtgaactag

SEQ ID NO: 118493 - DNA, 2481 bp, Artificial Sequence
  derived and/or modified sequence
atggagggcgccggcggcgccaacgacaagaagaagatcagcagcgagaggaggaaagaaaagtcaagagatgcagccaggtccagacgtagcaaggagtcggaggtgttctatgaattggctcaccagttacccttaccacataacgtgagttcccatctagataaagctagcgtgatgcggctgacaatctcctatctgagggtgaggaaactccttgacgcgggggaccttgacatcgaggacgacatgaaagctcagatgaactgcttctacctcaaagctctggacggttttgttatggtcctgaccgacgatggtgacatgatctacattagcgataacgtgaacaagtacatgggcctgactcagttcgaactgacgggccacagcgtgtttgatttcacgcacccttgtgatcacgaggagatgcgggagatgctcacccatagaaatggactcgtcaaaaagggaaaggagcagaatactcagaggagcttctttttacggatgaaatgcaccctgaccagccgcgggaggactatgaatataaagagcgccacatggaaggttctgcactgcactggtcacattcatgtgtatgacactaattctaaccagccccagtgcggttataagaagccccccatgacatgtctggtgctgatttgtgaacctattccccatccatctaatatcgaaattcccttggactccaaaacctttctcagtcgtcacagcctcgatatgaaattcagttattgcgatgaaaggatcactgagcttatgggatatgagccagaggagctgctcggtcgcagtatctacgaatactatcacgccttagactccgatcatctcactaagacccaccatgatatgtttaccaaaggccaagtcactacaggacagtatcgcatgcttgctaaaagaggcggctacgtctgggtggaaacacaggctacggtgatctacaatacaaagaactcccagccccagtgcatcgtgtgtgtgaactatgtggttagtggcattatacagcacgacctgatcttttccttgcagcagaccgaatgcgtgttaaagcctgtcgagtcatctgacatgaaaatgactcagttgtttacaaaggtggaatccgaggacacaagcagcctgttcgacaaactgaagaaagagccagatgcattgaccctcctggccccagcggctggagacacgattatttccttggacttcggcagtaacgatactgaaacagacgatcagcaactagaggaagtgccattatacaacgatgtcatgctgccttcaccaaacgaaaagctacaaaatatcaacctggccatgtctccactccctaccgccgagaccccgaagccgctgcgttccagtgccgaccctgcacttaaccaagaggttgcactcaagctagagcccaatccagagagccttgaactaagcttcactatgccacagattcaggaccagaccccatctcccagcgatggtagcaccagacagagttctcccgagcctaactctccttccgagtactgcttttatgtggactccgacatggttaacgaatttaagctggaactggtggaaaaactttttgccgaggacactgaagcgaagaacccattttcaactcaggataccgatctggacttggagatgctggccccttacatccccatggacgatgatttccagctgagatcctttgaccagctttctcccctggaatccagtagcgcttcccccgaatctgcttccccccagtcgacggtgactgtgtttcagcagactcagatccaggaaccaactgccaatgctactactaccactgccacaacagacgaattgaagaccgtcaccaaagatagaatggaggacatcaagatcttgatcgcgagtccaagtcctacccacatccacaaggaaactacctctgctacgtcatccccctaccgagatacccagagcaggaccgcttcccctaacagagctggcaaaggagtaattgaacagacagaaaagtctcaccccagatctcccaatgtactgagcgtggctctcagccagcgcacaacagtgccagaagaagagctgaatcctaagattcttgccctccagaatgcccagagaaagcgtaagatggaacatgacggctcactctttcaggctgtcggcattggcacactgctccagcaaccggatgatcatgcagctacaaccagtctgtcctggaagagggtgaagggatgtaaatcctctgagcaaaatggaatggagcagaagaccattatcctaattccctccgacttggcatgtcggctcctcggtcagtctatggatgaaagcggactgccccaattgacatcttacgattgtgaagttaatgcaccaattcaggggtcacgcaacctcctgcagggggaggagctcctgagagcactcgaccaggtgaattag

SEQ ID NO: 118494 - DNA, 2304 bp, Artificial Sequence
  derived and/or modified sequence
atgcggctgaccatcagctacctgcgggtgcggaagctgctggacgcaggtgacctggatatcgaggatgacatgaaggctcagatgaactgcttctatctcaaggccctggacgggtttgtaatggtgctgacagacgatggtgacatgatctacattagcgataatgtcaacaagtatatgggtcttacacaattcgagttaactggtcattccgtgtttgatttcacccacccttgcgatcatgaggagatgcgcgaaatgcttacccatagaaatggactggttaaaaaagggaaggagcagaatacccaaaggagcttctttttaaggatgaagtgtactttgacctcccgggggcggaccatgaacattaagtctgcgacctggaaagtgttgcattgcacggggcacattcacgtgtacgacacaaattcaaaccagccccaatgcggatacaaaaaacctccaatgacatgcctggttctaatatgcgagcccattcctcatccgagcaatatcgagataccactcgactcaaaaaccttcctgtctaggcactccctagacatgaagttctcctactgcgacgagagaataactgaacttatgggctacgagcctgaggagcttctgggcagatcgatttacgaatactaccatgcactggacagtgaccacctcacaaaaacacaccatgatatgttcacaaagggtcaggtgacgaccggtcaatacagaatgttggcaaaacggggcggctacgtttgggtggagactcaggcgacagtgatctataatactaagaattctcagcctcagtgtatcgtctgcgtgaactacgtggttagcggaattatccagcacgatctgatcttcagcctgcagcaaactgagtgcgtgctgaagcccgtggaaagcagcgacatgaagatgacccaactgtttaccaaagtggagtcagaggacaccagcagcctgttcgataaactgaagaaagagccagacgccctcactctgcttgcaccagctgccggcgacacaattatttctttggattttggttctaatgatacggagacggatgaccagcagctcgaagaagttcccctgtacaatgacgttatgttgccaagccccaacgagaagctgcagaatatcaatcttgctatgagccctctaccaacagcggagacccctaaacccctgcgttcgtccgccgaccccgccttaaatcaggaggtggcattgaagctggagcccaacccagagtcactcgaactgtccttcaccatgccacagatacaagaccagacgccgtcgccaagtgacgggtccactcgacagtctagccctgaacccaactccccatccgagtactgtttttacgttgattccgacatggtcaacgaatttaagttggagctcgtggaaaaactgttcgcagaagacaccgaagctaaaaacccctttagcacacaggacacagacctggatctggaaatgcttgcgccctacatccccatggacgatgacttccagctgcgatcatttgaccagttgtccccgttggaatcctcctcagcgtccccagaaagtgccagccctcagtctaccgtaacagtcttccagcagacgcagattcaagaaccgacagctaacgctacaaccacaactgccacaaccgatgagcttaaaactgtcacaaaggatcggatggaagatatcaagatcctaatcgcgagcccctctccaacacatattcataaggagacgacctctgcgacatctagtccctaccgggatactcaatcccggacagcgtcccctaacagagcagggaagggcgtgatcgagcagacagaaaaatctcacccccgatctcccaacgtgctgtctgtggccctatcccagcggacaactgtccccgaagaagagttgaatcccaagatactcgccttacaaaacgcacagagaaaacgcaagatggagcatgacggctccctgtttcaagctgttgggatcggcacactgctgcagcaaccagatgaccatgcagctactacttctctgtcctggaaaagagtgaaggggtgtaagagcagtgaacagaacggcatggagcagaagactatcatcttaatccccagtgatttagcatgcaggttgcttgggcagtcaatggatgagtccggtctgccccagctcaccagttacgattgtgaggtgaacgcacctatccagggcagccggaatctcctacagggtgaagagctgctccgagccctcgatcaggtcaactag

SEQ ID NO: 118495 - DNA, 2484 bp, Artificial Sequence
  derived and/or modified sequence
atggagggcgccggcggcgccaacgacaagaagaaccggatcagcagtgaacggagaaaagaaaagtctagggacgctgcgagaagtcgtcgctccaaggaatccgaggtgttttatgaattagcccaccaactgccattacctcataatgttagctctcacctcgataaagctagtgtgatgcggctgaccatcagctaccttcgggtgcgaaagctactcgacgcaggagacttggatattgaggatgatatgaaggctcagatgaactgcttctacctgaaagcactggatgggttcgtgatggtgcttaccgatgatggagatatgatctatatctctgacaacgtaaacaaatacatgggactgactcagtttgaactcaccgggcattccgtcttcgatttcacgcacccctgcgaccacgaagaaatgcgcgagatgctcactcaccgcaatgggctggtaaagaagggaaaggaacagaatacgcagcgatcgttcttcttacggatgaaatgcactctgacatccaggggccgtactatgaatatcaaaagcgcaacctggaaggtcctacattgcaccgggcatatccatgtgtacgatacgaacagtaatcagcctcagtgcggctacaagaaaccacccatgacctgcctggtcctgatctgtgagccaatccctcatccctcgaacattgaaattccactggattcaaagacctttctgtcaaggcacagtctggacatgaagttctcctattgtgacgaacggattacagagcttatgggctacgaaccagaggagctgctcggacggtctatctacgaatattatcatgcactggacagtgatcacctcaccaagacacaccacgacatgtttacaaaaggccaggtgacaaccggacagtaccggatgctagctaaacgcgggggctatgtctgggtggaaactcaagcgaccgtgatctacaacacaaagaatagtcagcctcagtgcatcgtatgcgtgaactacgttgtgagcggtattattcagcacgatctcatattctccctgcagcaaaccgagtgcgtcctcaaacccgttgaaagctccgatatgaaaatgacacagctcttcaccaaagttgagagcgaggacacatcgtcactgtttgacaagctgaaaaaagaaccagatgccctaacgcttctggcacccgccgcgggggacaccataatctccctggacttcggatctaatgacactgaaactgatgatcagcagctggaagaggtccccctgtacaacgacgttatgcttccctcaccaaatgagaagcttcaaaatatcaacctggccatgtcacctctgccaactgcagaaacacctaagcccctcagaagctcggcagaccccgccctcaaccaagaggtggccttgaaactagagccaaacccagaatcgctggaactctcttttactatgccacagatacaggaccagactccatcgccttccgacgggtccacacggcagagttcacccgagccaaacagcccctccgagtattgcttttatgtcgattccgacatggtcaatgaatttaaattggagttggtggaaaaattgttcgccgaggatacagaggccaagaaccctttttctacgcaggatacagaccttgacctggaaatgctggccccatacatccccatggacgacgattttcagctaaggtctttcgaccaattaagtcccctcgaatcctctagtgcaagcccggaatccgctagcccccagtccactgtcaccgtattccagcagactcagattcaggagcctaccgctaacgcaactacaaccacagcaacaactgacgagctaaagactgtcaccaaggaccgtatggaagatatcaagatactaattgctagtcccagccccactcatatccacaaggaaactaccagtgccactagctcaccttaccgggacacgcagagtagaaccgcgtctcccaatcgggccgggaagggtgtgatcgaacagacagagaaaagccatccacggtcacccaatgttctcagtgtcgccttatcccagaggactaccgtccccgaagaagagctgaaccccaagattctggcgctgcagaatgcccagcggaaacgtaagatggagcacgacggatcactgtttcaggctgtaggcatcggcaccctgcttcaacagcccgacgatcacgcggccacaaccagtctctcctggaagagagttaaggggtgcaaaagttccgagcagaatgggatggaacagaagactattattttgatccccagtgacctggcatgtcgacttcttgggcagagcatggatgagtcaggtctcccccagctcaccagctacgattgcgaggtcaacgcccctatccagggcagcagaaatctgctccaaggggaagagctcctcagggcactggatcaggttaattag

SEQ ID NO: 118496 - DNA, 1734 bp, Artificial Sequence
  derived and/or modified sequence
atgaagttcagctactgcgacgagcggatcaccgagctgatgggctacgagccagaggaactcctcggaagatccatctacgagtactaccatgcattggattccgatcacctgacgaaaacccaccacgatatgttcaccaaggggcaggtcaccacagggcaatacagaatgctggccaagcggggcggttacgtttgggtggagacacaggccaccgtcatttacaacaccaaaaactcgcagcctcagtgtattgtttgtgtgaactatgtagtgtctgggatcattcagcacgacctgatcttctctctgcaacagacagagtgcgttctgaagccagtggagtccagtgacatgaagatgactcagctttttacaaaggtggagagtgaagataccagctccttgttcgacaagttgaaaaaagaaccagatgcccttacgctgctggcccccgccgctggagacacaatcatctcactcgactttggcagcaatgacaccgagacagacgatcagcagctggaggaagtgccactctacaacgatgtcatgctccccagtcccaacgagaagctccagaacatcaatctggccatgtcacccctccctacagcggagaccccgaaacccctgagatctagtgctgatccagccctgaatcaggaagtggccctgaagctcgaacccaatcccgagtcgcttgaactgtcctttacaatgccacaaattcaggaccaaactccaagcccaagcgatggctccacacgacagtcttcgcccgagccgaacagcccaagtgaatattgtttctacgtggattctgacatggtgaacgagttcaagctcgaactggtcgaaaaactttttgctgaagatacagaggctaaaaaccccttctctacacaagataccgatctcgacctcgaaatgctggccccttatatacccatggacgatgatttccagctgcgctcctttgatcagctgtcgcccctagaatcatccagcgcttctccagagtccgcttccccacagtctaccgtgaccgtgtttcagcaaacacaaattcaggaaccaacggccaacgctaccaccactaccgccacaaccgatgaactcaagacagtcaccaaggaccgaatggaggatatcaagattctgattgcgagcccatcccctactcatatccacaaagaaactaccagtgccacatcttccccataccgagacacccagagcaggactgcttctcccaaccgggcagggaagggggtgatcgaacagacagagaaatctcatcctcggtcacccaacgtgttaagcgtggcactgtcacagcgaactaccgttccggaagaagagctaaaccctaagatccttgcactacagaatgctcaaagaaaaaggaagatggagcatgacggtagcctattccaggccgtgggaatcggaactctgttacagcagccagatgatcacgccgctaccacctcgttgtcctggaagagggtgaaggggtgtaaaagttccgaacagaatggcatggaacaaaaaacgattattctgattccaagcgatctggcgtgtagactgttaggccagtccatggacgagtccggccttccgcagctgacatcatacgattgcgaggttaacgccccgatccagggatcccgtaacctgttgcagggtgaggaactgctgagggcactcgatcaggtcaactag

SEQ ID NO: 118497 - DNA, 2304 bp, Artificial Sequence
  derived and/or modified sequence
atgcggctgaccatcagctacctgcgggtgcggaagctgctggacgcaggagatctggatatagaagacgacatgaaggctcagatgaactgtttctacctaaaggcactggacgggttcgtgatggtgctaactgacgacggagacatgatatacatctcagacaacgtaaacaagtacatgggtctgacgcagttcgagctaaccggccatagcgtgttcgacttcactcacccctgcgaccacgaggagatgagggagatgctgactcacaggaacggccttgtgaaaaaaggcaaagaacagaacacccagcgctctttctttctgagaatgaagtgtaccctgacctcaaggggtcgaaccatgaatataaagagtgctacctggaaagttttgcattgcaccggacatatccatgtgtatgataccaacagtaaccaaccacaatgcgggtataaaaaaccccccatgacatgtctggtgctgatttgtgaacctataccccatccaagcaatattgaaattcccttggattctaaaacatttctctctaggcattcccttgatatgaagttctcctactgcgatgagcgaatcacggaactgatggggtacgaacctgaggaactgctgggaagatccatctatgagtactatcacgctcttgattccgatcacttaaccaagacccatcacgacatgttcaccaagggacaggtgaccaccggccaatacaggatgttggctaaaaggggaggatatgtctgggtcgagactcaagccaccgttatatataacacaaaaaacagccagccccagtgtattgtgtgcgtgaattatgtggtgagtggtattattcagcatgacctgatcttttccctgcaacagaccgaatgcgtactgaagccagtcgagtcttctgatatgaagatgacgcagctattcaccaaggtcgagagtgaagatacaagcagcctgttcgataagctgaaaaaagagcccgacgcgctgacactcctcgcacccgcggcgggggatacaatcatctcattggatttcgggtctaacgacaccgaaacagacgaccagcagctcgaagaggtacccctgtataatgacgtgatgctgccttccccaaatgaaaagctgcagaatatcaacttggccatgagccctttacccaccgcagagacacccaagccgctgcgctcctctgcagacccagccctgaaccaggaggttgccttgaagctcgagcctaaccctgagagtctcgagttatcgtttaccatgccacagattcaggaccagaccccatccccctcagatgggtccactcgccagtcctctcctgagccaaatagcccctccgagtattgcttctacgttgactctgacatggtaaacgagttcaaactggagcttgttgaaaaacttttcgcagaggataccgaggccaagaaccccttttctacacaggacacagacctggacttggagatgctagcaccttatatcccaatggacgatgattttcagttgagatcattcgatcagttatcccccttggaaagtagctcggcgtccccagagtctgcaagcccacaaagcaccgttactgtgtttcaacaaacgcagatccaagaaccgactgccaatgcaaccaccacaacggctaccactgacgaactgaaaaccgtaaccaaggatcgtatggaggatattaaaatcctgatagccagcccaagcccgacccacatccataaggagacgacatccgccacttctagtccatatagagatactcagtctagaacggccagtcccaaccgcgcaggcaaaggtgttattgagcagacagaaaagtcccacccccgcagcccgaacgtgttatccgtggccctgtcacagcgtaccactgtgccagaagaagagttgaaccctaagatcctggcactccagaacgcacaaaggaaacgcaaaatggaacatgatggatcattattccaggccgtggggatagggactttgttgcaacagccagatgatcacgccgcaacaacatctcttagttggaagagggtaaaagggtgcaagtcatccgagcaaaatgggatggagcagaagactatcattctgataccaagcgacctcgcatgcaggttgctgggacagtccatggatgaaagcggcttgccccagctaacgagctacgactgtgaggtgaacgcccccattcaggggtctaggaatcttttacagggagaagaactcctgagggctttggaccaggtgaactag

SEQ ID NO: 118498 - DNA, 2481 bp, Artificial Sequence
  derived and/or modified sequence
atggagggtgcaggcggagccaatgataagaaaaagataagctctgagcgaagaaaggaaaaaagtcgagacgcggctcgcagtaggagaagtaaggagtcagaggtgttctacgaattggcccatcagctacccctgccacacaacgtgtctagtcacctggataaagcttccgtgatgcgattaacgataagctatctcagggtgcggaagctgcttgacgctggcgatcttgacattgaagatgacatgaaagcccagatgaattgtttttacctgaaagccttggacgggtttgttatggtactgacagacgacggcgacatgatctatatctctgataacgtaaataaatacatgggcctgacgcagttcgaactaacgggacatagtgttttcgattttactcacccttgcgatcacgaagaaatgcgcgaaatgctgacacacaggaacggtttagttaaaaaagggaaggaacagaacacacaacgttccttcttcctgcggatgaaatgcacacttacgtcacgaggacggacgatgaatatcaagtcagcgacttggaaagttctgcattgcaccgggcacatacacgtgtacgataccaacagtaaccagccacagtgcggatacaaaaagcctcccatgacttgcttagtcctcatttgcgaaccaattcctcatcccagtaatattgagatccccctcgactccaagacttttttgagtaggcacagtctagatatgaaatttagttactgtgacgagcgcatcacagaactgatgggatacgagccagaggaacttcttgggaggagtatctacgaatactaccatgccctggacagcgatcatctcaccaaaacacaccacgacatgtttacaaagggtcaggtcacaaccggacagtacagaatgctagctaaacgagggggttatgtgtgggtggagactcaggcaacggtgatctacaacacaaagaattctcagccccagtgtatagtctgtgtcaattacgttgtctcgggtatcattcaacacgacctgatcttcagcttgcagcagaccgaatgcgtgctaaagcctgtcgaaagctccgacatgaaaatgacccagctctttacaaaggtcgagagcgaggacacaagcagtctttttgataaactgaagaaggagcctgatgcactaactctcctcgcacctgccgcaggcgataccattatctcactcgacttcggtagcaacgatactgagactgacgaccagcagctggaggaggtccccctatacaatgatgtcatgctcccatctccgaatgagaaattacaaaacattaatctcgccatgtctcccttgcctacagcggaaacccccaagcctttgcggagttctgccgacccagctctgaaccaagaggtggctttaaagctcgagccgaaccctgagtcgctggaactttccttcacaatgcctcagatccaagaccaaacacccagtccttccgacggaagtacaagacagtcttcccccgagccaaatagcccgtccgagtactgtttctatgtggattctgacatggtgaacgaattcaagctcgagctggtggaaaagctttttgcagaagacactgaagccaaaaaccccttctccacacaggacacggaccttgacctggagatgctcgcaccctacataccaatggatgatgactttcagttgagatcattcgaccagttgtcgcccctcgagtcctccagcgccagcccagaaagtgcgtcgcctcagagtacagtgaccgtctttcagcagacccagattcaggagccgacagccaacgccactactacaactgctactaccgacgagctaaaaactgtcaccaaagatcgaatggaagatatcaaaatcctgatcgcctccccatcccctacccatattcacaaggagacgacttccgccacttcaagcccttacagagatactcaaagccgcacagcgtcccctaatcgagccggtaagggtgttatagaacaaactgaaaagagtcatccaaggagccctaacgttctgagcgttgctctctctcagaggacaactgttcctgaggaagagttgaacccaaaaatcttggctctccaaaatgcacagaggaagcgcaaaatggagcacgacggctctctgtttcaggcagtggggatcggcacactacttcaacaacctgatgaccacgcagccactacatctctctcatggaaaagggtcaagggctgtaagtcctctgaacagaatggaatggaacagaaaacgatcatcttaatcccctctgatctggcttgtcggctactgggccagagcatggacgaatccgggttaccccaactgacgtcctacgactgcgaagtgaatgccccaatccagggctcccgaaatcttctgcagggcgaagagctgctgcgagccttggatcaggtgaattag

SEQ ID NO: 118499 - DNA, 2304 bp, Artificial Sequence
  derived and/or modified sequence
atgaggctcaccatatcttacctccgagtgcgcaaacttctggatgccggtgacttagacatcgaagacgacatgaaagcgcaaatgaattgcttttacctgaaagctctggatggcttcgtcatggtgttgaccgatgatggcgacatgatttatattagcgacaatgttaataagtatatgggcctgactcagtttgagctgaccggacactcagtgttcgacttcactcatccgtgtgatcacgaagagatgcgcgaaatgctgacgcataggaacgggctcgttaagaaaggtaaagaacaaaatacgcagaggagtttttttctacggatgaaatgcaccctcacgtccagagggagaacaatgaatattaagtcggcgacatggaaggtcctgcactgcacagggcacattcatgtctacgataccaactccaatcagcctcagtgcggatataaaaaaccacccatgacgtgcctggtgctgatctgcgagccaattccccacccctcaaatatcgagattccactcgactctaaaaccttcctatcgaggcactcacttgacatgaagttctcatactgcgatgaaaggataacagagctcatgggctacgagccagaagaactattgggaaggagcatttatgagtactaccatgcactcgacagcgaccatttgaccaaaacgcaccacgacatgtttacaaagggccaggtcacaactggacagtaccggatgctggcaaaacgaggcggatatgtttgggtcgaaacccaagctaccgtgatctacaacactaagaatagtcaaccccagtgtattgtttgcgtaaactacgtagtgtctggcattatccagcacgacctgatcttctccttacagcagacagaatgtgttctgaagccagtggaatcttcagacatgaagatgactcagctttttacaaaagtagagagtgaagacacaagcagcctatttgacaaactgaagaaggagccggatgcacttacactgttggccccagcggcaggggatactattattagccttgactttggttccaacgacaccgaaactgatgatcagcaactggaagaggtcccgctgtataatgatgtcatgcttccctcaccaaatgagaagttgcagaacattaatctggctatgagtccattgcctactgcagagacccccaagcccttgcggagctctgctgaccctgcccttaaccaagaagtcgcattaaaattggagccaaatcctgagagtctcgagctgtctttcaccatgcctcaaattcaggaccaaactccatctccatctgacggctccacacgccagtcatcaccagagcctaactctccctccgaatattgtttttacgtggattctgacatggtaaatgaattcaagctggaacttgtggaaaagctcttcgccgaggataccgaagcaaaaaatcccttctcaacccaggacactgacctggatctcgagatgttagccccttatatccccatggatgacgactttcagctgaggagctttgaccagctgagcccacttgaaagcagcagcgcttcccctgagtctgcttcacctcaatcaaccgtgaccgtcttccagcaaacccagatccaggaacctactgctaatgctactactacaacagccacaactgacgagttgaagacagtcactaaggacaggatggaagacataaaaattttgatcgctagcccaagtcccacccatatccacaaagaaaccacttccgcaacgtccagcccttatagagacacccaatcaaggaccgcctcccctaacagggccggtaagggggtaatcgaacaaaccgagaaaagccacccacgctccccgaacgttctgtctgtcgctctgagtcagcgcacaacagtgcctgaggaggagcttaacccaaaaatcctggcccttcagaatgctcagagaaagagaaagatggaacacgacgggtccctctttcaggcggtcggtattggcacgttgctgcagcagcctgatgatcacgccgctacgacttctctgtcctggaagcgggttaagggctgtaaaagttccgaacagaacggcatggagcagaagacaataattctgatacctagcgatttagcctgtcggctgctgggccagtccatggacgagagcggactgccccaactgacttcctacgactgtgaggttaatgctcctattcagggctctcgcaatctgctgcaaggtgaggaactcctgagggcgctagatcaggtaaattag

SEQ ID NO: 118500 - DNA, 2484 bp, Artificial Sequence
  derived and/or modified sequence
atggagggagccggaggtgcgaacgataagaagaataggatttccagtgagagacgaaaagagaagtcccgcgatgctgccagatctcgaaggtcaaaagagtcagaagtgttctatgagctcgcccaccaactccctctgccgcataatgtaagttctcacctggataaagccagcgtgatgcggttaacgataagctacttgcgcgttcgcaagctgctggacgcgggagacctggatatcgaggatgatatgaaggcacagatgaattgtttttaccttaaagcactggatggattcgtaatggtcctaaccgacgatggcgatatgatatatatctctgacaacgttaacaaatacatgggattaacccagtttgagctaaccgggcattccgtgtttgatttcactcatccctgcgatcacgaggaaatgagagagatgttgacgcatagaaatggcttggtgaagaagggaaaggagcaaaacactcaaagatctttctttctccgtatgaaatgtaccttgactagtcgcggacgtaccatgaatatcaagagcgccacttggaaagtgctccactgcaccggacacattcacgtctacgacaccaactccaatcagccccagtgcggctataagaaacctcccatgacctgcctcgttcttatttgtgagcctattcctcacccctcgaatatcgagatcccactggactctaagacctttcttagccgtcacagccttgatatgaagttctcctattgcgatgaacgtatcacagaactcatgggatatgaaccagaagaactgctcggccgtagtatttacgagtactaccatgcgcttgatagcgatcacctcactaaaacccaccatgatatgtttaccaagggacaggtcaccactggccagtatagaatgttggcgaagcgcggaggctatgtgtgggttgagacccaagcaaccgtcatctacaacacaaagaattctcagccacagtgcatcgtttgcgtcaattatgtcgtgtctggtattatccaacacgatttaatcttctcactgcaacagacagagtgtgtactgaaacccgttgagtcatcggatatgaaaatgacccagctattcactaaggtcgagagcgaagatactagtagcctctttgataagttgaagaaggaacctgatgcactgaccttgctggcccctgcagctggcgatacaattatttccctggattttggaagcaatgatactgagacagatgaccaacaactcgaggaggtgccattgtacaacgacgttatgctgccttcgccaaatgagaagctgcagaacattaacctggcgatgtcacctttaccaaccgctgagaccccaaaaccattgaggagcagcgctgatccggcactcaatcaagaggtggctctgaagttggaacctaacccagaatcactcgagctatcctttaccatgccccagattcaagaccagacacctagcccatccgatggcagcaccaggcagtcttccccggaacccaactctccaagtgagtattgcttctacgtggacagcgacatggtcaacgagtttaaattggaattggtggagaaactatttgccgaagacacagaggcaaaaaaccccttctcaacacaggacacagatctagatctcgagatgctcgctccttatatccctatggacgatgattttcagttgagatccttcgatcagcttagtcccctagaatctagtagcgccagccccgaatctgcttctccccaatccacagtaacagtgttccaacagacccaaatccaggaaccaacagcaaatgcaaccaccactactgcaaccactgacgagttgaagactgtgacaaaggatcgaatggaagacattaaaatactgatcgcctctccaagtccaacacacatccacaaggaaacaacatcggcaacctcatctccgtacagggacacccaatccagaacggctagcccaaatcgcgctggcaaaggtgtcattgagcagacagaaaaatcacaccccagatcgccaaacgtgctgtcggttgccctctctcagagaacgaccgttccagaggaggaactgaaccctaagatcttagctttgcagaatgcccagaggaagcggaaaatggaacacgacgggtcgttgttccaggccgtgggcattggtaccctgctgcagcagccagacgatcatgcggctaccactagtctgagttggaaacgcgtgaagggatgtaagagtagcgaacagaacggtatggagcaaaaaactatcatacttattccgtccgatttggcttgccgcctgctgggacagtccatggacgaaagtgggcttcctcagctcacaagctacgactgcgaagtgaatgctcccatccaggggagccgaaacttgctgcagggggaagaattgttacgggctctcgatcaagtcaattag

SEQ ID NO: 118501 - DNA, 1734 bp, Artificial Sequence
  derived and/or modified sequence
atgaaattttcttattgtgacgaaaggattacggaactgatgggatacgaacctgaagagcttttgggcagatcaatctacgagtactaccacgcgctggatagtgatcacctcaccaagacgcaccacgacatgtttaccaagggacaagtaacgactggtcagtaccgcatgctagcaaaacgcggaggatatgtctgggttgagacccaggcaacggtgatttacaacactaagaatagtcagccccagtgcatagtgtgcgtgaattacgtcgtgtctggtataatccagcacgacttaattttcagcctccaacaaactgaatgcgttttgaaaccagtggagtcttccgatatgaaaatgacacaactttttacgaaggtggagtccgaggatacttcatcactcttcgataagttgaagaaagagccagatgccctcacactgctggccccagccgcaggggatacaatcataagtttggattttggcagtaacgacactgaaacagacgatcagcagctggaggaggttcccctgtacaacgacgtgatgcttccgagtcctaacgagaagctccaaaatatcaacctcgcgatgtctcctttgccgaccgcagagactcctaagcctctgaggtcttcggccgacccagccttgaatcaggaggtggccctcaagctggagcctaacccagagtccttggagctgagttttaccatgccccaaatccaggaccaaaccccctctcctagcgacggttcgacaagacaaagcagtcccgagccaaacagccccagcgagtactgcttctatgtcgattccgatatggttaacgaattcaaactggagttagtggagaagctgttcgcagaggatactgaagccaaaaaccccttttcaactcaggacacggacttggatctggagatgcttgctccttacatccccatggatgacgatttccagctgagaagttttgaccaactgagcccgctggagtcctccagtgcgtcgcccgagtccgccagtccccagtcgaccgtcactgtattccaacagacacagattcaggaacctacggctaatgccaccacgacgaccgcaacaaccgacgagctaaagaccgtgacaaaggataggatggaggatatcaaaatcttgatcgccagtcctagccccacacacattcacaaagagacaacaagtgctacttcctccccgtatcgggacacccagagtcggaccgcaagccccaatagagccggtaagggagtaatcgagcagacagaaaagtcacatcccaggtctcctaacgtcttgtcagtggctctgtcccagcggacaacggtgcctgaagaggagttgaatccaaaaatcttggcactgcagaatgcgcagagaaaacgtaagatggaacacgatggttccctcttccaagctgtgggcatagggactctgctccagcagccggacgatcatgctgctactacatccctatcttggaaaagggtcaaaggctgtaagagtagcgagcagaatggtatggaacagaagactattattctcatcccaagcgacctggcttgtcggctcctgggacaaagcatggacgagagcggccttccacagttgacatcgtacgattgcgaggtaaatgctcctattcagggtagtagaaatctgttgcagggggaggaactgctacgggctttggaccaagtcaactag

SEQ ID NO: 118502 - DNA, 2304 bp, Artificial Sequence
  derived and/or modified sequence
atgcgcttaacaatcagttacctgcgcgtccgcaaactgctggatgccggagacctggatattgaagatgacatgaaggcgcagatgaattgtttctatttgaaagccctggatggctttgttatggtcttaaccgacgatggggacatgatctatatttctgacaacgtgaacaaatatatgggactcactcaatttgagctgaccggccacagtgtattcgacttcactcatccgtgcgatcacgaggagatgcgggaaatgctcacacacaggaatgggctggtgaagaaagggaaggagcaaaatacgcaacgctcattttttctgagaatgaaatgcacacttacctcacgagggagaaccatgaatatcaagagcgccacatggaaggtattacattgcaccggacatatacacgtatatgatacgaattccaatcagccccagtgtgggtacaaaaaaccgcctatgacttgtctggttctgatttgtgagcctatcccccacccctcgaacatagagattccactggacagcaagacatttctgtcacgacattctctagacatgaaatttagttactgtgatgaaaggatcacggagctgatggggtacgaaccggaggagctgttaggccgttcgatttatgagtattaccacgcgctggacagcgatcacctgaccaagactcatcatgacatgtttaccaagggtcaggtgaccacaggacagtatagaatgctcgccaaacggggagggtacgtgtgggtcgagacacaggcaactgtcatttacaacactaaaaacagccagccacagtgcattgtctgtgtgaactatgtggtaagtggaatcattcagcacgacttaatcttctcccttcaacagacggagtgcgtgctgaaaccagtggaaagcagcgacatgaaaatgacacagctattcacgaaggtagagagcgaagataccagtagcctcttcgataaactcaagaaggaacctgatgcccttacactgctcgccccagccgcaggagataccatcatcagtctggattttggctccaacgatacggagacagatgatcagcagctggaagaggtgcctctctacaacgacgttatgctgcccagtccaaacgagaaactgcagaatatcaacttggcaatgtcccctttgcccactgctgagaccccaaaaccgcttcggtctagtgccgaccctgccctgaaccaggaggtcgctcttaaactggagccaaaccccgagtctttagagctaagtttcaccatgcctcagatacaggatcagactccttcaccaagcgacggctccactaggcagtcgtcacccgaacccaacagcccaagcgaatattgcttctacgtcgactcagacatggtcaatgaattcaaactggagctggtcgagaagctgttcgccgaggataccgaggctaagaacccgttttctacccaagacacagacttggacttggagatgctggcaccttatatccccatggacgacgactttcagttgcgttcgtttgaccagctatctcccctcgagagctcctctgcatctcccgaatcagcatctccccagagcaccgtaaccgtgttccagcagacccagattcaggagcctacagcgaatgcgacaaccaccactgcaacaaccgatgagcttaagacagtgactaaagatcgcatggaagatattaagatcctgattgcgagtccatcccctacacatatccacaaagagactacttccgctacctctagtccctaccgggacacacagagccgaactgcctctcccaacagagccggtaagggggtcatcgagcagacagagaagtcccatcctcgcagtcctaatgtgctttcagtggcgctgtcacaacgtactaccgttcccgaagaggagttgaaccctaaaatcctggctctacagaatgcacagcgtaagcgcaagatggaacacgatggatcgctcttccaggccgttgggatcgggacgctcctgcagcaacccgacgatcacgcggcaaccactagcttgagttggaagagagtgaagggctgcaaatccagcgaacagaacggcatggagcagaaaacgatcattctgataccctccgacctcgcctgcagattgttgggacagagtatggatgagagcggtcttccccagcttaccagttatgactgcgaagtgaacgcacccatccaggggagccgtaaccttctgcaaggagaagagctgctccgcgctctggatcaagtgaattag

SEQ ID NO: 118503 - DNA, 2478 bp, Artificial Sequence
  derived and/or modified sequence
atggagggagctgggggagctaatgacaagaagaagataagttctgaaagaagaaaggaaaaatctcgagacgctgcacgatccagacgcagcaaggaatccgaggtattctatgagttggctcaccaacttccactaccacacaacgtcagtagccatttagataaagcatcagtcatgagactgactatctcttacctgcgagtgaggaaactgctggatgcaggagacttggacatcgaagatgatatgaaagcgcaaatgaattgcttttacttgaaagctttagacggatttgtcatggtcttgaccgacgacggggacatgatctacattagcgataatgtcaacaagtacatggggctgacacagtttgaattgaccggccacagcgtatttgacttcacgcacccctgtgaccacgaagagatgcgagagatgcttacccataggaacggcctggtgaaaaaggggaaggagcaaaatacgcagcgcagcttcttcctacggatgaagtgtaccctcacctcaagaggcagaacaatgaacattaagagtgctacctggaaagtcttacattgcactgggcatatccacgtgtacgacacgaacagtaatcaaccgcagtgtggatacaagaagccgccaatgacctgtctggtcttaatctgtgaacccatccctcatccgagtaatatcgaaatcccactagacagtaaaaccttcctgtcgaggcactccctggatatgaagttcagttattgcgacgaaaggattaccgagcttatgggctatgagcccgaggaactgctggggaggtcaatttacgagtactaccatgccctggatagcgatcacctaacaaaaactcaccatgatatgttcactaaggggcaggtcacaactggacagtaccgaatgctagccaaaaggggcggctacgtgtgggtggagactcaggccaccgtcatctataatacaaagaactcccagccacagtgcatcgtgtgcgttaattatgtcgtaagtggcatcattcagcatgacctaattttctcgcttcagcagaccgagtgtgtgctcaaacccgttgagagttcagatatgaagatgacgcagcttttcactaaagttgaatccgaggatactagttccctattcgacaagctgaagaaggaacctgacgctctcactctgctcgctcctgctgctggagacacaattatttctctagatttcggatccaacgatactgaaaccgatgatcaacagttggaggaggtgccactatacaacgacgtgatgctcccttccccgaacgagaaactccagaatatcaacctggcaatgtctcccctgcccactgctgagacaccaaaaccgctgcgaagtagtgcagatccagctttaaatcaggaagtcgcccttaagctcgaaccgaacccagagtcactcgagctcagctttactatgccccaaattcaggaccagactccatctccaagcgacggatccacgaggcagtcgagtcccgaacccaattctccttcagagtactgcttttatgtcgatagcgatatggtcaatgagtttaaactcgagctcgtggagaagctgttcgccgaagataccgaggctaaaaacccattctccacacaagacaccgatcttgacctagaaatgctggctccatacattcccatggatgatgatttccagctgagatcgttcgaccaactgagcccacttgagtcatccagtgcgagccccgagagtgcctcaccgcaatctacagtgacggtttttcagcagacacagatacaggagcccacagcaaacgcgaccacaaccacagccaccaccgacgaacttaagactgttactaaagacaggatggaggatatcaaaatcctgatcgctagtccctcacccactcatatccacaaggagacaacatcggctaccagctccccttaccgggacacccagtccaggacggcaagtcccaacagagccggcaagggagtgatcgaacagacagagaagtcacatcctcgatcaccgaacgtcttaagcgtggcactcagccaaagaacgaccgtgcccgaggaggaactaaatcccaagatcttggctcttcaaaacgcccagcgaaaacgcaaaatggagcacgacgggagcctgttccaggcagtgggcatagggaccttgctccaacagccagacgaccacgcagcgaccactagcctctcctggaaaagggtgaagggatgtaagagctccgagcagaacggtatggagcagaaaactattatcttaatccccagtgatctagcatgtcggctgctgggccagtccatggacgaatccggcttacctcagctgactagctacgattgtgaggtcaatgcaccgatccagggatctcggaacctgctacagggcgaggaactcctaagagcactggaccaggtgaat

SEQ ID NO: 118504 - DNA, 2478 bp, Artificial Sequence
  derived and/or modified sequence
atggagggtgctggtggggcgaacgacaagaaaaaaataagcagcgagcggagaaaggaaaagagccgggacgccgccagaagccgaaggagcaaagaatccgaggtcttttacgagctcgcccaccagctgccgctgccccacaacgtctcttcacatctggacaaggcgagcgtgatgcgtctgaccatctcctacctgcgcgtccggaagctgctcgatgcaggagacctggatattgaggatgacatgaaggcccagatgaactgcttttacctgaaggccctcgatggctttgttatggttttgacggacgatggcgatatgatctatatcagcgataatgttaacaaatatatgggactgacacagttcgaattgacgggccactccgtattcgatttcacccatccctgtgaccacgaagagatgcgggagatgctaactcatcgcaatggcctggtaaagaaagggaaagagcagaatactcaaagaagcttttttctgcgcatgaaatgtacgctcacatctcgaggccgcacgatgaacattaaaagcgctacatggaaggtgctgcactgtacaggacatatccacgtgtacgacaccaattcgaaccaaccgcaatgtggttataagaagccaccgatgacgtgcttagtgctcatctgtgagcccatcccccaccctagcaatattgagattcctcttgattccaagacatttctaagcagacactccctggacatgaagttctcctactgcgacgaacgtatcacagagctgatgggctatgaaccagaggagctcctgggccgtagcatctacgagtactaccatgcgctggacagtgatcatctaaccaagacgcaccatgatatgtttactaagggccaagttaccacgggccaataccgcatgctcgccaaacgaggcgggtatgtctgggtggagacccaagccacagtcatctacaataccaagaatagccaaccacagtgcatcgtgtgcgttaattatgtggtgagcggaatcattcagcacgatctgatttttagccttcagcaaaccgaatgcgtcctgaagccggtggaaagctccgatatgaagatgactcagctcttcacaaaggtcgagtcggaggacacttcgagcctgtttgacaaactcaagaaagagcccgacgccctgaccctgctggcgcccgcagccggcgatacgatcatatcactggatttcggatctaacgatacggagacagacgatcagcagctggaagaggtgccattgtacaatgacgttatgctgccatccccgaacgagaagcttcagaacattaacctggccatgtcaccgttacccacggcagagacaccgaaaccgctgcgatccagcgcggatccggccctcaaccaggaggtagcattgaaactcgagccgaacccggagtctctagagctaagtttcacgatgcctcaaatccaggatcagacaccttccccatccgacgggagcacccgccagtccagccccgagccgaactcgccatccgaatactgtttctacgttgattccgatatggtcaacgagtttaagctggagctggtggagaagcttttcgcggaagacacggaggcaaaaaaccccttctccacgcaggacacagatctagacctcgagatgctggccccctatatacctatggacgatgactttcagttgcgatcgtttgaccagttgtccccgctagagtctagcagcgccagcccggagtccgcctccccgcagtcgacagtgaccgtgtttcaacagacgcagatccaagaaccgaccgccaacgcgaccacgaccaccgccacaacagatgagttaaagacggttaccaaggatcgcatggaggatatcaagatcttgattgcctccccgtcgccaacacacatacataaggagactacgtcagcgacttcgtcgccttatcgtgatacccagtcgcgcacggcgtctccaaatcgggccggaaagggtgtaatagagcaaacagagaagagtcacccccgctcaccgaacgtgttaagtgttgccctgagccagcgcaccaccgtgccggaggaagaattgaaccccaagattttggccctacaaaatgctcaaaggaaacggaaaatggagcacgacggatctttgttccaggcggtgggcataggcactttattgcagcagccggacgaccatgcagccacgacctcgttgagttggaagcgcgtaaagggctgcaagtcatctgagcagaacggcatggaacaaaagacgatcatactgattccctccgacctggcttgccgtctgctcggacagtccatggatgaatcaggtctgccccagctgacctcatacgattgcgaggtgaacgcacctattcaaggttcccgcaatcttcttcagggtgaagagctgctccgagcactcgatcaagtgaat

SEQ ID NO: 118505 - DNA, 2478 bp, Artificial Sequence
  derived and/or modified sequence
atggaaggtgcgggcggcgccaatgataagaagaagatttcgtcagaaagacgcaaggagaaaagccgggacgccgcgcggagccggcgcagcaaggaaagcgaagtgttttacgagctggcccaccaactcccactgccgcacaatgtaagctcccatcttgacaaggcgtctgtgatgagacttaccatttcatatctgcgagtccgcaagctcctggacgcgggcgacctggatatcgaagatgacatgaaggcccagatgaactgcttctacctgaaggccctggatggatttgtgatggtgctgaccgacgacggcgacatgatctacatcagcgacaacgtcaacaagtacatgggactgacccagtttgaacttaccggccactctgtgttcgacttcactcacccttgcgaccatgaggaaatgcgcgaaatgctgacccaccggaacgggctcgtgaaaaaaggaaaggaacagaacactcagcggtccttcttcttgcggatgaagtgcactctgacgtccagagggcggactatgaacattaagagcgcgacgtggaaggtgctgcactgcaccggacacattcatgtctacgataccaactcgaaccaaccgcagtgcggctacaagaagccgcctatgacttgcttggtgctgatttgtgaaccaatcccgcatccgtcaaacatcgagatccctctcgattctaagacctttctgagcagacacagcctggacatgaaattctcttactgcgacgaaagaattactgagctgatggggtacgagcccgaagagctgttgggaagaagtatctacgagtattaccatgccctggattcggaccatctgactaaaacccatcatgatatgttcaccaagggacaagtcaccactgggcagtaccgcatgctggccaagcgcggagggtacgtgtgggtggagactcaagccaccgtcatatacaacactaaaaactcacagccgcagtgtattgtctgcgtgaactacgtggtgtctgggatcatccagcacgacctcatcttctcgttgcaacaaaccgaatgcgtgctcaagccagtggaatcgtccgacatgaaaatgacccagctcttcacgaaagtggagtcggaagatacttcctccctgtttgacaagctgaaaaaggagccggacgccctgaccctgctggctcctgccgctggagatactatcatctcgcttgatttcggatccaacgacacggaaactgacgatcaacagctcgaggaagtgccgctgtacaacgatgtgatgcttcctagcccgaacgagaaactgcagaacatcaacctcgccatgtcgccattgccaaccgcggaaacgcccaagccgctgaggtcgtcagcagatccagcccttaaccaagaagtggcgttgaagctcgagcccaacccagaatcactggagttgtcgttcactatgccgcagatccaggatcagaccccgagcccatctgatggttccactcgccagtcgtcaccggagccaaatagcccctcggagtactgtttctacgtggactccgatatggtgaacgaattcaaactggagctcgtcgaaaaactgttcgctgaggacaccgaagctaagaatccattctcaactcaggatactgatctggatctcgaaatgctggccccatacattcccatggacgacgattttcagctgcggtcattcgaccagctttcaccgctggagtcctcttcagcgtccccggagtcggcctcgccacaaagtaccgtgactgttttccaacaaactcagattcaagaaccgaccgccaacgcgactactaccacggccactactgatgaacttaagacggtcactaaggaccggatggaagatatcaagattctgatcgcgtcgcctagcccgacgcacatacacaaggagacgacctccgccaccagctccccatatagagacacccagtccagaaccgcaagcccgaaccgtgcgggaaagggggtgatagagcaaaccgaaaagtcccacccacgctccccgaacgtcctgtcggtggctctgtcccagaggactaccgtcccggaggaggaactcaaccctaagatcctcgcactgcaaaatgcgcaacggaaacgcaaaatggaacacgacggctcgctgttccaggcggtgggcatcggaacccttttgcagcaacctgatgaccacgccgcgactacctcgctttcgtggaagcgcgtcaagggatgcaagagctccgaacagaatggtatggagcagaaaaccatcatcctgatcccatcagacttggcctgcaggcttcttggacagtcgatggacgaatccggattgccgcaactcacctcctacgactgtgaagtgaatgcccctattcaaggatcacggaatctgctgcagggagaagaactgctcagagcactggaccaggtcaac

SEQ ID NO: 118506 - DNA, 2478 bp, Artificial Sequence
  derived and/or modified sequence
atggagggtgcgggaggagccaacgataagaaaaagatcagctcagagagacgaaaagagaagtcacgcgacgccgcacggtcgagacggtcgaaagaatccgaggtcttttacgagttggcacatcagctgccccttccccataatgtgtcgagccacctcgataaggcatcggtcatgcgccttactatttcatacctgcgtgtcagaaagctgctggacgcaggagatcttgacatagaggatgatatgaaggcacaaatgaattgtttctaccttaaggcccttgacgggtttgtcatggtgcttactgatgatggcgatatgatttacatctccgataacgtgaataagtacatgggactcactcaattcgaacttactggccattccgtgttcgattttacccatccatgcgatcacgaggaaatgagagaaatgctgacccatagaaacggtcttgttaagaagggcaaggagcaaaacactcagagatctttctttcttcgtatgaaatgcacccttacctcgaggggaagaactatgaacatcaagtcggccacctggaaggtgcttcactgtaccggtcatatccacgtctatgatactaactcaaaccagccccaatgtggatacaagaagcctcccatgacttgcctggtgcttatctgtgaaccaatccctcacccctctaacattgaaatccccctcgactcgaaaacctttttgtcgaggcactccctggatatgaaattcagctactgtgatgagaggatcactgagctgatggggtacgagcccgaagaacttcttggcagatctatctacgaatactaccatgcccttgactcggaccacctgactaagacccaccatgacatgtttactaaaggacaagtcaccacgggtcaataccgcatgctggcgaagagaggaggctatgtgtgggtggaaactcaggcaactgtgatttacaatactaaaaacagccagcctcagtgtatcgtgtgcgtgaactatgtggtgagtggaattatccagcatgatctgattttctccctccaacagaccgagtgcgtcctcaaacccgtggaaagcagcgacatgaagatgacccagttgtttacgaaagtggagtcggaagatacttccagcctgtttgacaagctgaaaaaggaaccggatgcactgacccttctggcacctgcggcgggagacactatcatttcgctggatttcgggtcaaacgacaccgaaactgatgatcaacaactggaggaagtgcctctgtacaacgatgtgatgctgccctcacctaacgaaaagctccagaacataaaccttgctatgtcgcccctgcctactgcagaaaccccaaagccactgagatcctccgcagacccagccctgaaccaggaagtcgcactgaagttggaaccaaaccctgaatccctggaactgtcctttactatgcctcagattcaagaccagacgccctctccttccgatggatcgactcggcaaagttccccagaacccaattcgccgtccgagtactgtttttacgtggattccgacatggtcaacgagtttaagctggagttggtcgaaaaactgtttgccgaagataccgaggccaagaaccctttttccacgcaagacaccgatcttgacctcgaaatgctggctccttacattccaatggatgatgattttcagcttagatcttttgaccagctcagcccactcgaatcgtcctccgcaagcccagaatccgcgtccccccagtcgaccgtgaccgtgttccaacaaacccagatccaagaacccactgcaaacgcaaccaccaccactgcaactacggacgagctcaagaccgtgaccaaggacagaatggaagatatcaagatattgatcgcaagcccttcgcctacccacattcataaggaaaccacctcagcaacttcgagcccctacagagacacgcaatcgcggactgcatcacctaacagagcaggaaagggagtgattgaacagactgaaaagtctcatcctcgaagcccgaacgtgctgtcagtcgcgctgagccaacgtaccacggtcccagaagaggagcttaatcccaagatactggcactgcaaaatgcgcaacgcaagaggaagatggagcacgatggttcactcttccaggcggtgggaataggtactcttcttcaacaacccgatgatcatgcggccaccacctctcttagctggaagcgcgtgaagggttgcaagtcgtcggaacaaaatggtatggagcaaaagacgataattctgatcccatccgatctggcctgccgcctgttggggcagtcgatggatgagtccggccttcctcaacttaccagctacgattgtgaagtgaacgcacctatccagggttccagaaacctgctgcaaggggaagagctcttgagagcactcgaccaagtgaac

SEQ ID NO: 118507 - DNA, 2478 bp, Artificial Sequence
  derived and/or modified sequence
atggagggagcaggaggggcaaatgataaaaaaaagatttcttcagaacggagaaaggagaagtctcgcgatgccgctaggtccagaaggagtaaagaatcggaggtattttatgaacttgcccatcagctgcctctcccacataatgtgtcctcacacctcgataaagctagtgtaatgcggctgactatctcgtatctccgggtgcgaaaactgttagatgccggggatctggatatagaagatgatatgaaagcccagatgaactgcttctatttaaaagctctggacgggttcgttatggtgcttactgatgatggagatatgatatatatcagtgataacgttaacaaatatatgggacttactcagttcgaacttacaggacattcggtattcgattttacgcatccttgtgatcacgaggagatgagagaaatgttgacacatagaaacgggctagttaaaaaggggaaagaacagaacactcagcggtctttcttcttgcggatgaaatgcacacttacttcaagaggacgcacaatgaatatcaagagtgcaacatggaaagtcctccattgtactggacatattcacgtgtacgacactaattccaaccagccccagtgtgggtataagaaacctcctatgacttgcctggttctcatctgcgagccaattcctcacccttccaacattgaaataccactggactccaaaacattcctatcaaggcatagtctcgatatgaaattttcctattgtgatgaacggatcacagaattaatgggatacgaaccagaagaattgttggggagaagtatttatgaatattaccacgctttagattccgatcacctcacaaaaactcatcacgatatgtttactaaaggacaggttactactggacagtatagaatgcttgctaaacgagggggatatgtttgggtcgaaacacaggccactgttatctataacacaaaaaactcccagccccagtgtattgtgtgtgtgaattatgtagtcagtggaatcattcagcacgatctcatattctctctgcagcaaacagaatgtgtgctcaaaccagtggaaagtagtgatatgaaaatgacacagctcttcactaaagttgaatccgaggatacatcttctctgtttgacaaactcaaaaaggaacccgatgcacttacacttctcgcacccgcagctggagatacaatcataagtctagatttcggaagtaacgatacagagacagatgatcagcagctggaagaggtccccctttataatgatgttatgttgcctagtcccaacgaaaaattacagaacatcaatttagctatgtccccattgcccacagcagaaacacccaaaccactgcggtcctccgcagaccccgctcttaatcaggaagtcgcactcaaactggagccaaatcccgaaagtttagagctcagttttactatgccacagatacaggatcagacaccgtctccctctgatgggtcaactcggcagtcctctccagaacccaattctccgtcggagtactgcttttatgtcgatagtgacatggtgaacgagtttaaacttgaattggtggaaaaactgttcgccgaggatactgaagccaaaaatcccttttcaacacaggatactgacctggatctggaaatgctggccccctatatacctatggacgatgactttcagctccgctcatttgatcagctctctcctctggaatcctcatccgcttcccccgaatctgcctcccctcagtcaactgtgacagtgttccaacagacacagatccaggagccaacagcaaatgcaacgactacgacagcaacaactgatgagctcaagacagtgacaaaagatcggatggaagatatcaaaatacttatcgcctctccatcccccacacatattcataaagaaactacatctgcaactagttctccttatcgggatacacagtctcgaactgcgtcgccaaatagggccggaaaaggggtgatcgaacagacagaaaaatctcatcctagatcccccaacgttctttccgttgccctctctcagcgcactacagtgccagaagaagaactgaaccctaaaatccttgccttgcaaaacgcacagcggaagcgaaaaatggaacatgatggatcactcttccaggcagtcgggattgggacactcctccagcaaccagatgatcacgcggctactacatctctttcgtggaagcgcgtcaaaggatgtaaatcttcagaacagaatgggatggaacagaaaacaattatcctgatcccatctgatcttgcttgtcgcctgcttggacagtcaatggatgagagtggactgccccagctgacatcctatgattgtgaagtcaatgcccctatccagggatccaggaaccttctgcagggggaagaactactccgagctctcgatcaggtcaat

SEQ ID NO: 118508 - DNA, 2478 bp, Artificial Sequence
  derived and/or modified sequence
atggaaggcgccggaggggccaatgataagaagaagatctcatcagagcggcggaaggagaagagccgggacgcggcgcgatccaggagatcgaaggaatcagaggttttctatgaacttgcccatcagctgccgttgccgcacaatgtgtcgtcacatctggacaaggcctcagtgatgcggttgacgataagctacctgagagtgcgtaagttgctggacgccggtgacttggacattgaggatgacatgaaggcacagatgaactgtttctacctgaaggcgctggatggattcgtgatggtgcttaccgacgatggagacatgatttacatctcagacaatgtcaacaagtacatgggactgacccagttcgagctgaccggccacagcgtctttgacttcacccatccatgcgaccatgaggagatgagagagatgctgactcacagaaacggactggtcaagaaggggaaggaacaaaacacgcagcggtcctttttcttgcgcatgaagtgcaccttgacctcgagaggacgaaccatgaacatcaagagcgcgacctggaaggtgctgcactgcaccggacacatccacgtctacgacaccaactccaaccagcctcaatgcggctacaagaagcctccaatgacctgcctggtgcttatctgcgaacccatcccacacccgtcaaatatcgagatccccctggactccaaaaccttcctcagcagacattccctggacatgaagtttagctactgcgacgagcgaatcaccgagctcatgggatacgagccagaagaactcctggggcggagcatctacgagtactatcatgccttggactcggatcatctcactaagactcaccacgatatgttcacgaaagggcaagtcactaccggccagtacagaatgctggctaaaagagggggatacgtgtgggtggagactcaggcgactgtcatatacaacactaaaaactcccaacctcaatgcattgtgtgtgtcaactacgtggtgagcggaatcatccagcacgatctgatctttagcctccagcagacggagtgcgtgcttaagccggtcgagtcgtcagatatgaaaatgacgcagctttttacgaaggtggaaagcgaagatacgagtagcctcttcgacaagctcaagaaagaaccagacgcactgaccctgctggctccagctgcaggagacaccatcatcagcttggatttcggctccaatgacacggaaaccgatgaccaacaactggaagaggtgccactgtacaacgacgtgatgctgccatcgccgaatgagaagttgcagaacatcaacctggcgatgtccccgctgccaactgcggagactcctaagccgctccgctcctccgccgacccagccctcaaccaggaggtcgctcttaagctggaaccgaacccagaatcactcgagctgagcttcactatgccacagatccaggatcagacgccttcgccttcagatggctccactcgccaatcctcgcctgaacctaattcgccatccgaatactgcttctacgtggattcggacatggttaacgagtttaaacttgagctggtcgagaaactgttcgcggaagatacggaggcaaagaacccattctccactcaagacaccgacctggacctggaaatgttggccccttacatccctatggacgatgattttcagctgcgctcattcgaccagctttcaccgctcgaatcctcgagcgcatcgccggagtcagcctccccgcagtcaaccgtgaccgtgttccaacagactcaaatccaagagcctactgccaatgcgactaccactacggctaccactgatgagctcaagactgtgactaaggatcgcatggaggacatcaagatcctgatcgcttccccatccccgactcacatccataaagaaactaccagcgctacctcgtccccctaccgcgatactcaatcacggactgcgtcgccgaaccgggccggaaaaggagtgatcgaacagactgaaaagtcccatccgcgctccccgaacgtgctgtcggtcgcattgtcccagcgcaccaccgtgcctgaagaagaacttaacccgaaaattcttgcgttgcaaaatgctcagcgcaaaaggaagatggagcacgacggctccctgttccaagccgtaggaatcggaacgctgctgcagcaaccggatgaccacgctgcgacgacctcactttcatggaagcgcgtgaaaggttgtaagtcctccgaacagaacggaatggagcaaaagactatcatcctgatcccgtcagacctggcctgccgccttttgggccagtcgatggacgagagcggcctcccacagctcacttcctacgattgtgaagttaatgctccgatccaaggttcccgcaatctcctccagggagaagaactgctgcgggcgcttgaccaggtgaat

SEQ ID NO: 118509 - DNA, 2478 bp, Artificial Sequence
  derived and/or modified sequence
atggagggggcaggtggagcaaacgacaagaaaaagatttcttctgagcgaagaaaggaaaaaagccgagacgcggcgcgatctagacgcagtaaggagagcgaagtgttctatgagctggcgcatcaactgcccctcccccacaacgtctcttcccatctggacaaggccagcgtaatgcgcctgaccatttcctacctgcgtgtaaggaagttgctggacgccggagatcttgacatcgaggacgatatgaaggcacaaatgaattgcttctacttgaaagccctcgatggctttgtgatggtgctcacggacgacggggacatgatttacatttcagacaacgtgaacaaatacatgggacttacccagttcgaactgacaggccattctgtttttgattttacccacccctgtgatcatgaagagatgcgggaaatgctaacgcataggaacggacttgttaaaaagggcaaggagcagaacacccagagaagtttttttcttaggatgaagtgcactctcacaagtaggggcaggacaatgaacattaagtctgccacctggaaagtgttgcattgtacagggcacatccacgtgtacgacacaaacagcaatcagccccagtgcgggtacaaaaagccacctatgacgtgtttggttctgatttgcgagcccatcccccaccctagcaatatcgagatcccgcttgactccaagacattcctttctagacattctctggacatgaaattcagttattgcgacgaacggattaccgagctcatgggctatgaaccagaggagcttctcggtcgttccatatatgagtattaccatgctctcgactcagatcacctgacgaaaacacaccatgacatgtttaccaaggggcaggtgacaacaggtcagtaccgtatgctagcaaaaaggggaggctacgtgtgggtggaaacgcaggccactgtgatttataacacgaaaaattcccagccacagtgtattgtctgtgttaactacgtggtgtccggcattatccagcatgacctgatcttttcactacaacaaacagaatgcgtgcttaagcccgtagaaagttctgatatgaaaatgacccagttgtttacaaaagtggaaagtgaggacaccagcagtctgtttgacaagctcaagaaagaacccgatgcgctgaccctgctggctccagccgctggagatacaattatttctcttgacttcggctcgaacgacaccgaaactgatgaccaacaactagaggaagtcccactctataatgatgttatgctcccaagcccaaacgaaaagttgcagaacattaacctggcgatgtcccccctcccaacagccgaaaccccgaagccacttcgaagctctgctgaccccgcactgaaccaggaggttgccttgaagttggagccaaatcccgaaagtctcgagctcagctttactatgcctcagatccaagaccagacacctagtccgtcagatggttcaactcgacagtcttcccctgagccaaacagtccatcggagtactgtttctatgtggacagtgacatggtgaacgaatttaagctggagctggtggagaagttgttcgcagaagatactgaggctaaaaacccatttagcactcaggatacggatctagacctggagatgttggccccctatatccctatggacgatgactttcaactcaggtccttcgaccagctgagccccttagagtcctcaagcgctagcccagagtccgcttcccctcaatccactgtaaccgtgtttcagcagacacagatacaagagccaacagccaatgcaactaccacgaccgccaccactgatgagctaaaaacggtgactaaggatagaatggaagacataaagatcttgatcgcgtccccttctcccacgcatatccacaaagagaccacaagcgcaacctccagcccttatcgcgatacccagtctcggactgcaagtccgaatcgggctggaaaaggggtcatcgagcagaccgaaaagagtcatcctcgaagtccaaacgtcctatctgttgcgctgagccagcggaccaccgtgcctgaagaagaactcaacccaaagatcctagctctccaaaatgcacagaggaaacggaagatggagcatgatggcagcctttttcaagctgtgggcattggcactctcctgcagcagccagacgatcacgctgccaccacaagcttgtcctggaagagggtgaagggctgtaaatcgtccgagcagaacggcatggaacagaagaccatcatattaatcccttcagacctggcttgccgactgttgggtcagagtatggacgaatcgggtctaccccagcttaccagttacgactgcgaggtgaacgcacccatacaggggagccgcaatctcctgcagggagaggagttgcttagggctcttgaccaggtcaat

SEQ ID NO: 118510 - DNA, 2478 bp, Artificial Sequence
  derived and/or modified sequence
atggagggcgcgggaggcgcgaacgataagaaaaagatcagctccgaacggcggaaagaaaagtcccgtgacgctgctagatcgcgcaggtccaaagagagcgaggtgttctacgagcttgctcaccaactgccgcttcctcacaacgtctcgagccaccttgataaggcctcagtcatgcgccttactatcagctacctccgggtccggaaactgctggacgctggcgacctcgacattgaggacgatatgaaggctcagatgaactgtttttacctgaaggccctggatggcttcgtcatggttcttaccgacgacggagacatgatctacatcagcgacaacgtcaataagtacatggggctcactcagttcgaactcaccggacactcggtgttcgactttactcatccttgcgatcacgaagagatgcgagaaatgctcacccaccggaacggtcttgtgaagaaaggcaaggagcagaacacccagcgcagcttttttctgcggatgaagtgcactctgacctcgcgcggacgcaccatgaacatcaaatcggctacctggaaagtgctccactgcactggacacatccacgtgtacgacactaactcgaatcagccacaatgcgggtacaagaagccaccgatgacttgcctggtgctgatctgcgaaccaatcccgcacccatcaaacatcgagatcccgctggatagcaagacgttcctgtcaaggcattccctggatatgaagttcagttattgcgacgaacgcatcactgaactgatgggatatgaacccgaggaactcttgggacgctccatctacgagtactaccatgcgctcgactccgatcacttgaccaagactcaccatgacatgttcaccaagggccaggtgactactgggcaataccggatgctggcgaagcgcggaggatatgtgtgggtcgaaacccaggctactgttatctacaacactaagaattcacagccacagtgcatcgtctgcgtgaactacgtggtgtccggaatcatccagcacgatctgattttctcgctgcaacagaccgaatgtgtgctcaaacctgtggaatccagcgatatgaagatgacccaactcttcaccaaagtggaatcggaggacacctcctcactgttcgataagctgaagaaggaacccgatgcgctgactctcctggccccagcggccggcgataccatcatctcgctggacttcggatccaacgacactgaaaccgatgaccaacagctggaagaggtcccgctctacaacgacgtgatgctgccatcgcctaatgagaaactccaaaacataaatctcgccatgagccccctgccaaccgcggagactcccaagccactgcgctcttcggccgatcctgccctcaaccaggaggtggccctcaaacttgagcccaatccagaatcgctggagctgtcatttaccatgccgcaaatccaggaccagacccctagcccgtcagacggcagcaccagacagtcatcacccgaaccaaactcgccatcagagtactgcttctatgtggatagcgatatggtgaacgagtttaaactggagctggtagaaaagctgttcgcggaagataccgaagcgaaaaaccccttctcaacccaggacactgacttggacctcgaaatgctcgccccgtacatcccgatggatgatgatttccagctgcgctcgttcgatcaattgtcacctctcgaatcgtcgtccgcgtccccggagagcgcgtccccgcagtcgaccgtgactgtgtttcaacagactcagattcaggaaccaactgcgaacgcaactactacgaccgcaacgaccgatgagttgaaaaccgttaccaaggacagaatggaagatatcaagatcctgatcgcaagcccctccccgactcatatccacaaggaaaccacctcagcaacctcgagcccttacagagatacccagtcccgcaccgcatcgccaaatcgcgcgggaaagggagtcatcgaacagaccgagaagtctcacccaaggtccccaaacgtgctgtcggtcgcactctcgcaaagaactactgtgcctgaggaggaactgaatcccaaaattctcgctctgcagaacgctcagcggaagaggaagatggagcatgacggatcactgtttcaagcggtcggcattggcaccctgctccagcaaccggacgatcacgctgcaacgacctcactctcatggaagcgcgtgaaaggttgtaaatcttccgaacagaacggcatggagcaaaaaacgatcattctcatcccgtccgacctggcctgtagactgcttggacagtccatggacgagagcgggttgcctcagctcacctcatacgactgtgaagtgaacgccccgattcaaggtagccggaacctgctgcagggggaagagctcctcagggcgctggatcaggtgaat

SEQ ID NO: 118511 - DNA, 2478 bp, Artificial Sequence
  derived and/or modified sequence
atggaaggagccgggggagccaacgataagaagaaaatctcgagcgaacgccgtaaggagaagagccgggacgccgcccggtcgcggcgctccaaggagtctgaagttttctacgaactcgcgcatcagctgcccttgccacataacgtgtcatcccatctggacaaggcttccgtgatgcgtctgaccatctcgtacctgcgcgtccggaagctgctggacgcaggtgacctggacatcgaagatgatatgaaggcgcagatgaactgcttctacctgaaggcgctcgacggattcgtgatggtgttgacggacgacggcgacatgatttacatctctgacaacgtgaataagtatatgggactgacccaattcgaactcaccggacattcggtgttcgacttcacgcatccttgcgatcacgaagaaatgagggaaatgctcacccaccgcaacgggctggtcaaaaagggaaaggaacagaacactcagagatccttcttcctccgcatgaagtgcactcttactagccgcggacggaccatgaacattaagagcgcaacctggaaagtgctgcactgtaccgggcacatccacgtgtacgacactaatagcaaccaaccacaatgcggttacaagaaaccgcccatgacttgtttggtcctcatctgcgagccgattccgcacccttccaatatcgagatcccgctggattccaagaccttcctgagccgacactccctggatatgaaattctcctactgcgacgagcggatcactgaactcatgggctacgagcctgaagagttgctgggtcgctcgatctatgaatactaccatgccctggatagcgatcatctgactaaaacccaccatgacatgttcactaagggacaggttaccaccggacagtacaggatgcttgcgaagcgcggcggatacgtgtgggtggagactcaggcaaccgtgatctacaatactaagaattcacagcctcaatgcattgtgtgtgtgaactacgtggtgtccggaatcattcaacacgacctcatcttctcactccaacagaccgagtgcgtgctcaaaccagtggaatcaagcgatatgaagatgacccagctttttactaaagtggagtccgaggacactagcagcctgttcgacaaactgaaaaaggaacccgacgcacttactctcctggcccccgcggcgggagataccattatctccctggacttcggaagtaacgatactgaaactgatgaccagcagttggaggaagttccactgtacaacgacgtcatgttgccgtcgccgaacgaaaaactgcagaatatcaatcttgcgatgtcgccactgccgaccgccgaaactccgaagccgctgaggagctccgccgatccggcactgaaccaggaggtcgcgctgaagctcgaacctaatccggagagcttggagctttcgttcactatgccacaaatccaagatcagaccccgagtccgtcagatggatcgactcggcagtcctcacctgaacctaattcccctagcgagtattgtttctacgtcgattcggatatggtgaatgagttcaagttggaactggtcgagaaactgtttgccgaggatacggaagcaaagaatccattttccactcaagacacggacttggacctggagatgctggccccatacatacccatggacgacgattttcagctgcgctcgttcgatcaactctcccctctggaatcctcttcagcatcgcctgaatcagcttcaccgcagtcaaccgtcactgtgtttcaacaaactcaaattcaagaacccacggcgaatgcaactaccaccacggccaccaccgacgaacttaagactgtgaccaaggatcgcatggaagatatcaagattctgatcgcttccccctcgccgactcatatccacaaggagacgacttccgcgacttcatctccgtaccgggacacgcagtcacgcactgcctcgccgaaccgggccgggaagggagtgatcgagcaaactgagaagagccacccaagatcccctaacgtcctctcggtagctctgagccagcgcaccactgtgcccgaagaagagctgaacccaaagatcttggcccttcagaatgcacaaagaaaacggaagatggaacacgatggctccttgtttcaggcggtgggaatcgggaccctgcttcaacaacctgacgaccatgcagcaacgacttcgctttcgtggaaaagagtaaagggatgtaaaagcagcgagcagaacggaatggaacaaaagaccatcatcttgatcccatccgatctcgcgtgccggctgctgggacagtccatggacgagtctgggttgccgcagctcacttcctacgattgcgaagtgaacgcccccatccagggctcacgcaatctcctgcagggggaagagctgttgagagcgctggatcaggtgaac

SEQ ID NO: 118512 - DNA, 2478 bp, Artificial Sequence
  derived and/or modified sequence
atggaaggagctggtggggccaacgataagaagaaaatttcgagcgaaagacggaaggaaaagtcaagagatgccgcgcggagccgccggtccaaggaatcggaagtgttttacgagctggcacatcagctgccactgccacataacgtatcgtcgcacctcgacaaagcgtccgtcatgaggctgaccatcagctatctcagggtgcgcaagctcctggacgccggagacttggatatcgaggatgacatgaaagcccagatgaactgcttctacctcaaagcgctggatggattcgtcatggtcctgaccgacgacggtgatatgatctacatctccgataatgtgaacaagtacatgggccttacccagttcgagctgacgggccactcagtgtttgatttcactcatccgtgcgatcacgaggagatgcgagagatgctcacccatcgcaatgggctcgtgaagaagggaaaggagcagaacacccagcgctctttctttctccggatgaaatgcacgctcaccagccggggacggactatgaatatcaagtccgcaacctggaaggtattgcactgcaccggccatatccatgtgtacgatactaactccaatcaaccgcagtgcggctacaagaagccgcctatgacctgcctggttctgatctgtgagccgatcccacacccatccaatatcgagataccgcttgactccaaaacctttctgagcagacacagcctggacatgaaatttagctactgtgacgaaaggatcacggagctcatgggctatgagcctgaggaactgctcgggcgctcgatctacgagtactaccatgcgctggattccgaccatctcacgaaaacccatcacgacatgttcaccaagggccaggtgaccaccggacagtaccgcatgctggcgaagcgagggggttacgtgtgggtcgaaacgcaggctaccgtcatctacaacacgaagaactcacaaccgcagtgtatcgtgtgtgtgaactacgtagtctcggggattatccagcacgatcttattttcagccttcagcagactgaatgcgtgctcaagccggtggaaagctcggacatgaagatgactcagctgtttacgaaggtcgagagcgaggacactagctcccttttcgataagctgaagaaggaacctgatgctctgactttgctcgcaccagccgctggtgatactataatctcgctggacttcggctccaatgacaccgaaactgacgaccagcagttggaagaggtccccctgtacaatgacgtgatgctgccgtcccctaacgaaaagctgcaaaatatcaaccttgccatgtccccgcttccgaccgccgagactccgaaaccgctgaggtcctccgcagatccagccctgaaccaggaggtggctctgaaactggaaccaaatcccgagtccctcgagctgagcttcaccatgccgcaaatccaggaccagactccaagcccgtcggacggcagtacgcgccagtcaagcccagaaccgaactcgccgtccgagtactgtttctacgttgattccgatatggtcaatgaatttaagctcgaactcgtggagaaattgttcgccgaagacactgaagcgaaaaacccgttctccactcaggatactgacttggatctcgaaatgctggccccgtacattccgatggacgacgacttccagttgaggtcgttcgaccagttgtcgcccttggaaagcagctcagcgtcaccagaatctgcctcgccgcagagcaccgtcaccgttttccaacagactcagattcaggaaccaaccgcaaacgccactactaccaccgctaccaccgatgagctgaaaactgtgactaaggaccgcatggaggacatcaagatcctgatcgcgtcaccgagccctacccacattcacaaggaaaccacctcggccacctcttcgccgtacagagacactcagtcgcggaccgcctcaccaaaccgggcggggaagggcgtgatcgagcaaactgagaagtcccatccgcgcagccccaatgtgctgagcgtggccctgtcgcagcggaccaccgtgcccgaagaggaattgaatcccaagatccttgcactgcaaaatgcccaacgaaagcgcaagatggaacacgacggatctctgttccaggcagttgggatcggaactctgctgcaacagccggacgatcacgcggcgactacgtcgctgtcgtggaagagagtcaagggctgcaaatcctcagagcagaacggtatggaacaaaagaccatcatccttatcccaagcgatcttgcctgccggctgctgggacaaagcatggatgaatccggattgccacaacttacttcctatgactgcgaggtgaacgctcctatccaaggttcgcgtaacctcctgcaaggagaggagctcctgcgcgccctcgaccaagtgaac

SEQ ID NO: 118513 - DNA, 2478 bp, Artificial Sequence
  derived and/or modified sequence
atggagggagcgggaggagctaacgataagaagaagatttcctcagaaagaagaaaggagaagtccagggatgccgctaggagccgcaggagtaaagagtctgaggttttctatgaacttgctcatcagctgcctctgccacataacgtgtctagccacctcgataaggcttcagtgatgaggctgaccatatcctatctgagagtgaggaagttgctggatgctggtgacctggacattgaggatgatatgaaggcgcagatgaattgcttctacctgaaggctttggacggctttgttatggtgttgaccgacgacggagacatgatctacatttccgataatgtgaataaatatatgggactcacccaattcgagctgacaggacacagcgtgttcgactttacccatccatgtgatcacgaggagatgagagagatgcttacccaccgcaatggtctggtaaagaaaggtaaagagcaaaatactcagcgctcattttttctgagaatgaagtgtacgctgacatctaggggccgcactatgaatataaagagcgccacatggaaggtgctgcattgtaccggtcacatccacgtgtatgataccaactccaatcagccccagtgcggatataagaagccacctatgacctgccttgtgcttatatgcgagccaattccccacccatccaatattgaaatccctttggattccaagaccttcctgtcccgccattctctggacatgaaattttcttactgtgatgaacgcatcactgagctcatgggttacgaaccagaggagctcctcggcaggtccatctatgagtactatcacgcattggactctgaccacctgaccaaaacccaccacgacatgtttaccaagggtcaggtgactacgggtcaatataggatgctggctaagagaggaggttacgtttgggtagagacacaggctaccgtgatctacaacaccaagaactcccagccccagtgcatagtgtgtgtgaattacgtggtgtccggtatcatccaacacgaccttattttcagccttcaacagactgagtgcgtcctcaagccagttgagagttcagacatgaagatgacgcagctgttcactaaggttgagagcgaggatacttcaagcctgtttgacaaactgaaaaaggagcccgatgccctcacactgctggccccagccgccggcgacactatcatatctctggacttcggctctaacgacacagaaaccgacgatcagcagctggaggaggtcccattgtacaacgatgtgatgctgccatctccaaatgaaaagctgcagaacataaacctggctatgtcaccattgcccactgctgagacccctaagcctctgagatcaagcgctgacccggccttgaaccaggaggtcgccctcaagctcgaacctaaccccgaaagcctcgaactctccttcactatgccacagatccaggatcagactccctccccatctgatggttcaacacgccagtcaagcccggagccaaactctcccagcgagtattgcttctatgtcgactcagacatggtaaacgagttcaagctggaactggtggagaagctgtttgctgaagataccgaggcgaagaatcccttcagcacgcaggacaccgacttggatttggagatgttggccccgtacatccctatggacgacgattttcaattgcgcagtttcgatcagctcagtcccttggagtcctccagcgcctctcccgagagcgcctccccccagagtaccgtcacagtgttccaacaaacacagattcaagagcctaccgctaacgccaccactacgaccgcaacgaccgatgagctgaagaccgtcaccaaagacaggatggaggatatcaagatactgatcgcttctccttccccgacccacatccacaaagaaactacttcagcaacctcaagtccatatagggatactcagtctcgcaccgcttcccctaatcgcgcgggaaagggcgtgatcgaacagactgaaaaaagccaccctcgcagcccgaatgttctgtccgtcgcactgtcacagcgcacaacagttcctgaggaagaactgaatccaaagatcctcgctctccaaaacgcacagagaaagcgcaagatggagcacgacggcagtctcttccaagcagtgggcatcggaaccctgctccaacaaccagatgaccacgctgccaccacctccctgtcttggaagcgcgtgaagggctgcaaaagtagcgaacaaaatggcatggaacaaaagaccataatactcatcccctcagatctggcatgcaggctgcttggacagtctatggacgagtcaggcctcccacagctcactagttatgattgcgaggtgaacgcccctattcaaggttcaaggaaccttttgcagggagaagaactcctccgcgccttggatcaagtcaac

SEQ ID NO: 118514 - DNA, 2478 bp, Artificial Sequence
  derived and/or modified sequence
atggagggcgccgggggagcaaacgataagaagaagatctcctcggagaggcggaaagaaaagtcccgcgacgccgctcggagccggcggtcgaaggagtcggaagtgttctacgagctggctcaccagctgcctctgccgcacaacgtgtcctcgcacctggacaaggcatcggtgatgaggttgaccatctcgtatttgcgcgtccggaagttgctggatgcgggcgacctggatatcgaagatgacatgaaggcccagatgaattgcttctacctcaaggcactggatggcttcgtcatggtgctcacggatgacggcgacatgatctacatctcggataacgtgaacaagtacatgggcctcacccagttcgagctgaccggccattccgtgtttgacttcacccatccgtgtgatcacgaagagatgcgggaaatgctgactcaccgcaatggactggtcaagaaggggaaggagcagaacacccagcgctccttcttcctgcggatgaagtgcactctgacttcaagaggcaggacgatgaatatcaagtcggccacctggaaggtcctgcactgcactggtcacatccacgtgtacgacaccaactcgaatcagccgcagtgcggatacaagaagcctccgatgacttgcctcgtgctgatctgcgaaccgattccacatccttcgaacatcgagatcccactggactccaagacttttctctcaagacatagcctggatatgaaattcagttactgcgacgagcggatcactgaactcatgggttacgaaccggaagaattgctgggccgttctatctacgaatactaccatgcgctcgactcggaccatctgactaagactcaccatgacatgttcactaagggacaagtgacgacgggacaataccgcatgctggcgaagcgagggggatacgtgtgggtggaaactcaagccaccgtgatctacaacaccaagaactcccagccgcaatgtatcgtgtgcgtgaactacgtggtgtccgggatcatccagcatgacttgattttctcactgcaacagacggagtgcgtgctgaaaccggtggaatcttccgatatgaaaatgactcagctcttcacgaaggtcgagtcggaggacacttcctcactgttcgacaaactgaagaaagagcctgacgcccttacgctcctggccccagcggctggagataccataatctcgctcgacttcggatcaaacgacaccgagactgacgatcagcagctggaggaggtgccgctctacaatgacgtcatgctgccgtcaccgaatgagaaacttcagaatatcaacctggctatgagcccgcttccgaccgccgaaaccccgaaaccgttgagatcctcagcggacccagcgctcaaccaggaggtggccctgaaattggagccgaacccagaaagcctggaattgagcttcaccatgcctcagattcaggatcaaaccccaagtccgtccgacggatcaacccgccagtcatccccagagccgaactccccgtcggagtactgcttctacgttgattccgacatggtgaacgaattcaaactggaactcgtggaaaaactcttcgctgaagataccgaggcaaagaatccgttcagcacccaggataccgacctggatctggagatgctggctccctacattcctatggacgacgatttccagttgcgctcgttcgaccagctctcgccactcgaatcatcgagcgcgtcgcctgaatccgcctcgccacaatccactgtcaccgtgttccagcaaacccagatccaggaaccgactgccaacgcgaccaccaccaccgccacgactgacgagcttaagaccgtcactaaggaccgcatggaggatatcaagatcctgatcgcctcgccgtcccctacccacatccacaaggaaactacttcggctacgtcgtccccttaccgggatacccagtccagaactgcctccccgaacagagcaggaaagggagttatcgagcagaccgaaaagagccacccgcggtcgccgaacgtgctctcagtggcgcttagtcagagaactaccgtgcccgaggaagaattgaacccaaagatcctggccctccagaatgcccagcggaaacggaagatggaacatgacggatcgcttttccaggccgtgggtattggtacgctcctgcaacagcccgacgatcacgcggcgactacctcgctgagctggaaaagagtgaagggttgcaagtcatccgaacagaatgggatggaacaaaagaccatcattttgattccatccgacctggcgtgcagactgctgggacagtcgatggatgaatcagggctgccccaactcacttcctacgactgcgaagtgaacgcgcctattcaaggatcgcgaaatctgctgcagggagaagaactcctgagagctctggatcaggtcaac

SEQ ID NO: 118515 - DNA, 2478 bp, Artificial Sequence
  derived and/or modified sequence
atggaaggggcaggcggtgcgaacgataagaaaaaaatctcatcagagcggagaaaagagaaaagtagggacgcggctagatcacggaggagcaaagagtctgaagtcttttacgaactggcccaccagctgcctttaccacacaacgtcagttcacacctggacaaggccagcgtgatgagacttacaatcagctacctccgcgtcagaaaactgttagatgcaggcgatttggacattgaggacgacatgaaggcgcagatgaactgtttttatctcaaggcgctggatggatttgttatggttttgaccgacgatggagatatgatctacatctctgataatgtgaacaaatatatggggttaacccagttcgagcttactggacattctgtctttgatttcacccacccttgtgatcacgaagagatgcgagagatgctgacgcacagaaacgggctagtcaaaaaaggtaaagagcagaatacccagagatctttcttcctaaggatgaaatgcaccctgacctcacggggccggaccatgaacattaaatctgccacatggaaggtgttgcactgcacgggacatatccacgtgtatgacaccaattcaaatcagcctcaatgtggctataagaaaccgccgatgacctgcctggtgcttatctgtgagcccattccacacccttctaacattgagatccctctcgattctaaaaccttcctgagtagacattccctggacatgaaatttagctattgtgatgaacgcatcacagaactgatggggtacgaaccagaagaactcctggggcgcagcatctacgaatattatcacgcattggacagcgatcacctgacaaaaacccatcacgacatgttcacaaagggacaggtaacgaccggccagtacagaatgttggcaaagagagggggatatgtttgggtggaaactcaggccacggtgatatacaatactaaaaacagccaaccacaatgcatcgtgtgcgttaactatgtggtaagtgggataatccagcacgatttgatattctccctgcagcagactgagtgtgtgctgaaacctgtcgaatcatccgacatgaaaatgacccagttattcacgaaggtcgaaagtgaagatacctcgagtctgtttgataagctcaagaaagagcccgacgcgttgactctccttgctcccgccgcaggagatactatcataagccttgattttggctccaacgatacagagaccgatgaccaacagctggaggaagtccccctctataacgatgtgatgctgccgagccccaacgagaagctccagaatataaatctggccatgagccccctgcccaccgcagaaacacccaagccattaagatcatctgctgaccccgccctgaatcaggaggtggctttgaagctagagcctaaccctgagagcctggagctgagtttcaccatgcctcaaatccaggatcagacacccagtccctcagacggaagtactcggcagtcctcccccgaacctaattctccgtctgaatattgcttttatgtcgattcggatatggtaaacgagttcaaactggaactagtggaaaaactctttgccgaggacacagaggccaaaaatcctttctccacccaggatacagacttggacctagagatgctggccccctacatccctatggatgatgactttcagctgagatccttcgatcagctgtcgccacttgagagcagctccgcgagccccgagagtgcttccccccagtcaacagttacagtgttccaacagacacagatacaggagccaactgctaatgctactactactacggcaactacggatgaactcaaaacagtcacaaaggatagaatggaggacataaagattttgattgcatcaccgtctccaacgcacattcacaaagaaacaactagtgcaacctcttccccctaccgggatactcaaagcaggaccgccagtcccaaccgagctggcaagggcgtgattgagcagaccgaaaagtctcacccacggtcgccaaatgtgctttccgtggcgctgtcccagcgaactaccgtgccagaggaggaactcaaccccaaaatcctggcgctgcagaatgcacaacggaagcggaaaatggaacacgacggaagcctgttccaggcagttggcataggtactctcctgcagcagccagacgatcatgccgccaccacgtctctgtcatggaaaagagtgaaaggttgtaagagctcagagcagaacgggatggagcaaaaaacaataatcctgatcccatcagacttggcctgtaggctcttaggacagtcaatggatgaaagcggactgcctcagttaactagctacgactgtgaagtcaacgctccaattcagggatccagaaaccttctgcagggcgaagagctcctcagggccctggatcaggtaaat

SEQ ID NO: 118516 - DNA, 2478 bp, Artificial Sequence
  derived and/or modified sequence
atggaaggagccggaggggcaaacgataagaagaagatctcttctgagagaaggaaggaaaaatctagagacgccgcaagatcaaggcgtagcaaagaatcggaagtattctacgagctcgcccaccaactccctctgcctcacaacgtgtcgtcacacctggataaggctagtgttatgaggttgacgatcagttatctacgtgtgcgaaagttacttgacgcaggagaccttgatatcgaagatgatatgaaagcccagatgaattgcttttacctaaaagccctggacggctttgttatggtgcttacagacgatggggacatgatttatatttccgacaatgtcaacaagtatatgggactgacacagtttgagctcaccggacactcagtctttgactttactcacccatgtgaccacgaggagatgagggaaatgttgacacacaggaacggtctggtgaagaaaggtaaggaacagaacacacaaaggagcttctttctgagaatgaagtgtacgttaacaagccgggggagaaccatgaacatcaaaagcgctacctggaaagtcttacactgtacgggccacatccatgtttatgacacgaatagcaatcagccacagtgtggttacaagaaaccacccatgacttgcctcgtccttatttgtgagcctataccacatccgtctaatattgagattccgctcgattccaagaccttcctgagccgacacagtctcgacatgaaattttcctactgtgatgagcgaatcaccgagctgatgggttatgaacctgaagagctgctcggacgatccatctatgagtattatcatgccctggattctgatcatttaactaaaactcatcacgacatgtttacgaaggggcaggtgaccacgggacagtatagaatgctggcaaaaagagggggctatgtgtgggtggagacgcaggcgactgtaatctacaatacaaagaatagccagccacagtgcatagtgtgcgtgaattatgttgtaagcggaataatccagcatgacctaattttctccctgcagcagactgaatgcgtgctcaagcccgttgagtcttccgacatgaagatgacacaattattcacaaaggtggagtccgaggacacttcgtctctgttcgacaagcttaagaaagaacccgacgctttgacactgctggcacctgctgccggggacaccataatcagcctagatttcggctcaaatgatactgaaaccgacgaccagcagcttgaggaggtgcccctttacaatgatgtgatgctgcccagccctaacgaaaagctgcagaacataaatctggcaatgagccccttacccaccgcagaaaccccaaagccccttcgctctagtgccgacccagccttgaatcaagaagtggctctcaaattggaacccaatcctgaaagtctcgaattgtcttttaccatgccgcagatacaggaccagaccccgagtccaagcgacggttcaacgcgccagtcttccccagagcctaactcccctagcgagtattgcttttatgtggacagcgacatggtcaacgagtttaagctggaactggtagagaagttatttgctgaggacactgaggccaagaacccattcagcacccaggatacggatctggatctggaaatgcttgcaccatatatcccaatggacgatgacttccagctgagaagttttgatcagctgtccccactcgagtcatcatctgcttcccctgagtctgcctctcctcaatctaccgtgaccgtttttcaacagacacagattcaggaaccgacagcgaacgccacaactacaactgccacaactgacgaactgaagacggtgactaaggaccggatggaggacatcaagattctgatcgcgtcaccctcccctacgcacatccataaagaaaccacaagcgccacctcctcgccttaccgagatacacagagccgtacagcttcaccaaacagggccggcaagggagtgatagaacagactgagaagtcacaccctcgcagcccaaacgtcttatctgttgcactgagccaacggaccactgtccccgaggaggagctaaaccccaaaatcttggcccttcagaacgcccagcgtaaacgaaaaatggaacatgacggtagcctcttccaggcagtggggatcggcactctgcttcagcagcccgatgaccatgccgccaccacttccctgtcttggaagcgggtaaaaggctgcaaatcttctgaacaaaatggcatggagcagaagacaatcatactcatccccagtgacctagcctgtcgtctgttaggccaatctatggacgagtcaggccttccccagctgacatcttatgactgcgaagtgaatgccccaattcagggctcaaggaatcttctgcagggcgaggagcttttacgagcgctagaccaggtgaac

SEQ ID NO: 118517 - DNA, 2478 bp, Artificial Sequence
  derived and/or modified sequence
atggagggagcgggtggagccaatgacaaaaagaagatttcgtcagagaggagaaaggaaaagtcgcgggacgccgcccgcagcaggcggtcaaaggaatcggaagtgttctacgaactggcgcaccaactcccgctgccgcacaacgtctcatcccacttggacaaggcctctgtgatgcgactcactatatcctacctccgggtgagaaagctcctggacgcaggagatctcgacatcgaagatgatatgaaggcccagatgaattgcttctacctgaaagccctggacggattcgttatggtcctgaccgatgatggcgatatgatctacatctcagacaacgtgaataagtacatgggactcacgcagttcgagctgaccggacattcggttttcgacttcactcacccttgtgatcacgaagaaatgcgagaaatgctgactcatcgaaacggcctggtgaagaagggtaaggagcaaaatactcaacgcagcttcttcctgagaatgaagtgtactctgacctctcgcggacggaccatgaacatcaaaagcgcaacctggaaggtcctccactgcactggacatatccatgtgtacgacacgaattccaatcaaccccaatgtggctacaaaaagccaccaatgacgtgcctcgtcctgatctgcgaaccgatcccacatccatcgaatatcgagattccactcgattcgaaaaccttcctgagcagacattcgctcgatatgaagttcagctattgcgatgagcgcatcaccgaactgatgggatacgagccggaggagctgcttggccggagcatttacgaatactaccacgccctggattcggaccatctcaccaaaacccaccacgacatgtttaccaagggacaagtgactaccggacagtaccgcatgcttgctaaaagaggaggatacgtgtgggttgagactcaggcaaccgtcatctacaacactaaaaactcccaaccacaatgcatcgtgtgcgtgaactacgtcgtttccggcatcattcaacacgatctgatcttttcgcttcaacagactgaatgtgtgctgaaaccggtggagtcatcggacatgaaaatgacccaactcttcactaaggtggaatcggaagatacctcatccctcttcgacaagctgaagaaagaacctgatgccctgacccttctggccccggcggccggagacactatcatctcgctggactttggaagtaacgacactgagactgacgaccaacagctcgaagaagtgccgctgtacaacgacgtcatgctcccgtccccgaacgaaaaactgcagaatatcaatctcgcgatgtcaccactgcccaccgccgaaaccccaaagcccctccgctccagcgccgacccggcacttaaccaggaagtcgctctcaagctcgaaccgaacccggaatcgttggaactcagcttcaccatgcctcagattcaagaccagaccccatcaccgtcggacggttccacccggcagtcgtcaccagagccgaactcgccgtcagaatactgcttctacgtggactcggacatggtgaatgaattcaagctggaactggtcgagaagctcttcgcggaggacactgaggccaaaaacccgttctcgacgcaggacaccgatctcgacctcgaaatgttggctccatacatcccgatggacgatgacttccagcttaggtcattcgaccaactttcgcctcttgagtcgtccagcgccagccccgagtcagctagcccacagtcgaccgtgaccgtgtttcagcaaacccaaattcaagagccgactgctaatgccaccaccaccactgctactaccgacgaattgaaaactgtgactaaagatcggatggaggacattaagatcttgatcgcatccccgagcccgacccacatccacaaagaaaccacctccgccacttcctcgccgtaccgggacacccagagcagaaccgcctcaccgaaccgcgccggcaaaggcgtgatcgagcaaactgaaaagtcccacccacggtccccgaacgtgttgtcggtcgcgttgtcgcagcgcactaccgtgccggaagaagagctcaacccaaagattcttgcgcttcagaacgctcaacggaaaaggaaaatggagcacgacgggtccctgttccaagccgtcgggatcggaaccttgcttcaacagccggatgatcatgctgccaccacttccctgtcatggaagagagtcaaaggctgcaagtcctcggagcagaatggaatggagcagaaaaccatcatcctcattccatctgacctggcgtgccgcctgttgggacagagcatggatgagtcgggacttcctcaactgacttcatacgattgcgaggtgaacgcgccgatccagggctcgcggaacctgctccaaggcgaagaattgctgcgagccttggaccaggtcaac

SEQ ID NO: 118518 - DNA, 2478 bp, Artificial Sequence
  derived and/or modified sequence
atggaaggagcgggtggtgcaaacgataagaagaagatttcttcggaaagaaggaaggagaaatcccgagatgcagcacggtcaagaagatcaaaggagtcagaggtgttttatgaacttgcacatcagttgccgctgccccataacgtctcttcccatctggataaggcatcggtgatgagacttactatttcctacctgagggtgcgaaagctgttggatgccggagatctggatatagaagatgatatgaaggcccagatgaactgcttttacctcaaggccctggacggcttcgtgatggtgcttacggacgacggtgatatgatctacatcagcgataatgtgaacaaatacatgggcctgactcagtttgaactgaccggacacagcgtgtttgatttcacccatccatgtgatcatgaagaaatgagagagatgcttactcaccgcaacgggcttgtgaaaaagggaaaggaacagaacacccagcgcagcttcttccttagaatgaagtgtacccttacttcccgaggaaggacgatgaacatcaaatcggctacctggaaggtgctgcattgtacgggccatatccacgtgtacgacaccaattccaatcaacctcaatgtggctacaagaagcctcccatgacttgcctcgtgctgatttgtgagcccattccacaccctagtaacatcgagattccacttgattctaaaacgtttctgtcgagacactcgcttgatatgaagttctcatactgtgacgagcgcatcaccgaactgatgggttacgaacctgaggaattgctcggacgtagcatatatgagtactaccatgcacttgattcagatcatctcaccaagacccatcacgatatgtttaccaagggtcaggtgacgacgggacagtaccgaatgcttgcgaagcgagggggctacgtctgggtcgaaacccaagcaaccgtcatctacaacaccaagaattctcagcctcagtgcatcgtctgtgtgaattacgtggtgagcggcatcattcagcatgatctcatattcagtctccaacaaaccgaatgtgtcctgaaaccagtggaaagctccgacatgaagatgacccaactttttaccaaggtggaatctgaggacacctcgtccctttttgacaaacttaagaaggaaccggacgcgcttactctgctcgccccagcagctggagacaccatcattagcctggattttggatccaacgatacggaaacggacgatcagcaactggaagaggtgccactgtacaacgatgtgatgcttccttcacccaacgagaaacttcagaacatcaatcttgcaatgtcgccactcccgaccgcagaaaccccaaagccacttcggtcctcagcagatcccgcattgaatcaagaagtcgcactcaaactggaacctaatccagaatcgttggagctgtcattcaccatgccacaaattcaagatcagactccttccccaagtgacggtagcacccgccaatcgtcgcctgagcctaactcgccgagcgaatactgcttttacgtggactccgacatggttaacgaattcaagctcgaacttgtggaaaagctctttgccgaggacaccgaggcgaaaaatccattctcaactcaagatactgacctcgatcttgaaatgttggcaccttacattcctatggatgatgactttcaactccggtcatttgatcagctgtcgcccttggagtcctccagcgcatcgcctgagagcgcgtcaccacagtcgacggttacggtgttccagcaaactcaaatccaagagcctaccgccaatgccaccactactactgccacgactgatgaactgaaaaccgtgacgaaagacagaatggaagatatcaaaattcttattgcttcccctagtccaacccacatccataaggaaaccacttccgcaacttcctcaccataccgtgatacgcagagccggactgcctctccaaacagggctgggaaaggcgtcattgagcagaccgaaaagagccatcctaggtcgcccaacgtcctctccgtggcactgtcccagagaactactgtcccagaagaggagcttaaccccaagatcctcgctcttcagaatgcacaacgcaaacgcaagatggagcacgacggaagcctgtttcaggccgtcggtattgggactctcctccaacaaccagatgatcacgccgcaaccactagcctttcctggaagagagtgaaggggtgcaagtcctcggaacaaaacggaatggaacaaaaaacgataattctgatccctagtgatttggcgtgccgactgttgggtcaatcgatggatgagagcggcctcccacagctgacttcgtacgattgtgaagtgaatgcacctatccaaggatccaggaacctccttcaaggagaagaattgctgcgggcgcttgaccaggtcaac

SEQ ID NO: 118519 - DNA, 2478 bp, Artificial Sequence
  derived and/or modified sequence
atggagggtgcgggtggcgcaaacgacaagaaaaagatcagttcagaaaggcgcaaggaaaagtctcgcgacgccgccagatccagacgaagtaaggaatccgaggtgttctatgagttagcccaccagttgccactcccccacaacgtgtcgagccatcttgacaaggcgagtgtcatgcgccttactataagttacctgcgcgttaggaagctccttgatgctggagatctcgatatcgaggacgacatgaaggcccagatgaactgtttttaccttaaggcattggacgggttcgtgatggtgcttaccgacgacggggatatgatttacatcagcgacaacgtgaacaagtatatgggcctaacccagttcgagttaaccgggcattcggtgttcgactttacacacccctgcgaccacgaagaaatgcgagagatgctgactcacagaaacggcctggtcaagaagggtaaagaacaaaacacccaaaggtccttcttcttgcgaatgaagtgcactctgacctcgaggggtcgcaccatgaatataaaatccgccacatggaaagtcctccattgcactggccacattcatgtgtacgacaccaatagcaatcagccacagtgcggctacaagaaacctcccatgacatgcttggtattgatttgcgagcccatcccgcatccctcaaacattgagatacccttagacagtaagacattcctgtccaggcacagcctcgacatgaagttttcctactgtgacgaacggatcactgagctgatgggctacgaacccgaggagctccttggcaggagtatttacgaatattatcatgcactggacagcgaccatctgaccaagactcatcatgacatgttcacaaagggtcaggtcacaaccgggcagtatagaatgttggctaaaaggggggggtacgtgtgggttgagactcaagcgaccgtgatatataatacaaaaaactcccagccccaatgcatagtgtgcgtgaattatgtcgtctccgggatcatacagcatgatcttatcttcagcctccagcaaaccgagtgcgtcctgaagccagtggagtcatccgacatgaaaatgacccagctttttaccaaggtggagtctgaagatacgtcttcgctgttcgacaagttgaagaaagagcccgatgcactcacactccttgcccctgcagctggcgacaccatcatcagcctggatttcgggagtaatgatactgagaccgacgaccagcagctcgaggaggtacctttgtacaacgatgtcatgctgccttctcccaatgaaaaactgcagaacataaatctggccatgagccctcttcctacagctgagaccccgaaacccctcaggtcttctgcggatccagccctgaatcaggaggtggctctgaagcttgagcccaatcccgagagcctcgaactatccttcactatgccacagatccaggatcagacgccctccccatctgacggtagcacccgacaatctagccccgaaccaaattcgccttctgaatattgcttctatgtggattccgacatggtgaacgagttcaaactggagctggtcgagaaattattcgcggaggacaccgaggctaaaaacccattctccacccaggacactgacctcgacttggaaatgctggcgccgtatatcccgatggacgatgatttccagctgaggtccttcgatcagctgtcgcccttagagagctcctcggcgagccccgagtccgctagccctcaatcaacagttacagtattccagcagacccagatccaggagccaaccgctaatgctaccaccactactgccaccaccgatgagttgaagaccgtgactaaagaccggatggaagacattaaaatcctaatcgccagcccaagccccacgcatatccacaaggagactacaagcgccactagctcaccttaccgcgatacccagagccgcaccgcgtcccctaatcgggccggaaagggggtgattgaacaaaccgaaaagagtcatccgcgcagccctaacgtcctaagcgtggctctctcacagcgcacgaccgtcccagaggaggagctgaatcccaaaattttggcccttcagaatgcgcagagaaagcgcaagatggaacatgacggctctctgttccaggcggtgggcattggcacgcttctccagcagccagacgaccacgccgcgactacttctcttagctggaagagagtgaagggctgtaaatcgtcggaacaaaatgggatggagcaaaagacaatcatccttattcccagtgatttggcttgtcgtttgctaggacagagcatggacgaatccggcctgcctcagcttacatcgtacgactgcgaagtgaacgctccaatccaagggagccgaaacctcctgcaaggtgaggaacttctgcgcgcactcgaccaggtgaac

SEQ ID NO: 118520 - DNA, 2478 bp, Artificial Sequence
  derived and/or modified sequence
atggagggtgctggaggagcaaacgacaaaaaaaagatcagtagcgaacgccggaaggaaaaatcacgcgacgcagcgcgctcgagacgatccaaagagtctgaggtgttttacgagctggcccatcagctccccctgccacataacgtctcgtcccacctggacaaagcgtctgtcatgaggcttactatctcttacctcagagtgcgaaaattgctggacgctggcgatctggacatcgaggacgatatgaaagcacagatgaactgcttttacctgaaagccctcgatggtttcgtcatggtgctgacagatgacggtgacatgatttatatcagtgacaatgtcaataaatacatgggcctgacacagttcgagctgaccgggcactcagtgttcgacttcacacatccgtgtgatcacgaggaaatgcgggaaatgcttacacatcggaatggactcgtcaagaaaggcaaagagcagaatacgcaacgcagcttcttcctgaggatgaagtgcacactcacaagccgcgggagaactatgaacatcaaatctgctacgtggaaagttctgcattgcaccggtcacattcacgtgtatgatacaaactccaatcaacctcagtgtgggtacaagaagccccccatgacctgtcttgtgctgatttgtgaaccgattccgcacccttctaacatcgaaatacccctggactcaaagacatttctctcacgacactctttggacatgaagttttcctattgcgatgagcgaataacagaactgatgggctacgagccagaggagctgctgggcaggtcaatctatgagtactatcatgcccttgacagcgatcacctcaccaagactcaccacgacatgttcactaagggccaggtgaccactggtcagtatcggatgctcgctaaacgagggggatatgtgtgggtcgagacacaggctacagtgatttacaatacaaagaactctcaacctcaatgcattgtatgcgtgaactatgtggtatcagggatcattcaacacgacctgatcttttctctgcaacaaaccgagtgcgttctcaagccagtggaatcaagcgatatgaagatgacccagctgttcacgaaagttgaaagtgaagatacttcttcgctgttcgataaactgaaaaaggagcctgacgctctgactctattggcacctgcagcaggagacaccattattagtctggatttcggcagcaacgacactgaaactgacgatcagcagctcgaagaggttccactctacaacgacgtaatgctgcccagccctaacgaaaagcttcagaatataaatcttgcaatgagcccacttcctactgcggaaacacctaagccccttcggtcgagcgccgaccctgcactcaaccaggaggtagcactgaagctcgagcctaaccctgaaagcctggagttgtcctttacaatgccacagatacaggatcagacacccagccctagtgatggctctactaggcagtcctcccctgaacccaacagtccctccgagtattgcttctacgtagactccgacatggttaacgagttcaagttggagctagtagaaaaattgttcgcagaggatactgaggccaaaaatccatttagcacccaggatacagacctagacctagagatgctggccccttacataccaatggacgacgattttcagttgagatcattcgatcagctgagccctctggagagctcctccgcctcgcccgaatctgctagcccccaatccactgttactgtatttcaacagacgcagattcaagagccaacagccaacgctacgaccactacagcaacgacagatgaactaaagaccgttactaaggaccggatggaggatatcaagatactgatcgcctctccatctccgactcatatccacaaagaaacaacttccgccaccagctctccttatagagacacacagtctcgaacagcatcccctaaccgggccggcaagggcgtaatagaacagactgagaagtcccaccccagaagtcccaacgtgctaagtgtggctctgagtcagaggaccaccgttcctgaagaggagttgaatccaaagattcttgcccttcagaacgcacaaaggaagcgaaagatggagcatgacggttctctgttccaggctgtgggaatagggaccctgctccaacaaccagacgaccatgccgcgactacttccctcagttggaaaagagtcaagggctgcaaatcgagtgagcagaacggcatggagcagaagacaatcatcctcattccttctgatcttgcctgccgactgctgggacagtcgatggacgagagtgggctgccacagctaacatcttatgactgtgaagtgaacgctcccatccagggatccagaaacctcctgcagggcgaggagctccttcgggctctggatcaggtgaac

SEQ ID NO: 118521 - DNA, 2478 bp, Artificial Sequence
  derived and/or modified sequence
atggagggggctggaggcgctaacgacaagaaaaaaataagctcagagcgtaggaaagagaaaagcagagatgctgcgagaagccggagaagcaaggagtccgaggtgttctacgagctggcacatcaactgcctctgccgcataacgtgagctcccatctggataaggcatctgtgatgagactaacaatctcatatctcagggtgcggaagctccttgacgccggagatcttgatattgaggatgatatgaaagctcagatgaactgtttctacctaaaagctctcgatggatttgtcatggtgctgacagatgatggagacatgatttatatcagcgataacgtgaacaaatacatgggtctgactcaattcgagctgaccggccatagcgtgttcgacttcacacatccctgcgatcacgaagaaatgagggagatgcttacccaccgcaacggattggtgaaaaaaggcaaagagcagaacacccagaggagcttcttccttcgaatgaaatgtacactgaccagcaggggccggactatgaacattaagtctgctacgtggaaagtgctgcattgcacagggcacattcacgtgtatgacacaaactcaaaccagcctcaatgtggatacaagaagcctcctatgacatgccttgtcctgatctgcgagcccatacctcacccatctaatattgaaatccctctggacagcaaaaccttcttgtcgcgccattccttagacatgaaattttcatactgtgatgaacggatcacagagctgatggggtatgagccagaggagttgctggggcgcagcatttacgaatactaccacgctctggacagcgatcacctgactaagacacaccacgatatgttcaccaagggccaggttaccactggtcaataccgcatgctggctaaacgtggtggctacgtgtgggtcgaaacacaggccactgtgatttacaacaccaagaacagtcaaccacaatgcattgtctgtgtaaactatgtggtcagcgggatcatacaacacgatctgatcttttcacttcagcagaccgaatgcgtactgaaacccgtcgagtccagtgacatgaagatgactcagctattcacaaaggtggaaagtgaagacaccagctctctgttcgataaacttaagaaggaaccagacgctctgacactcctggcacctgcagctggagacacaattatcagtcttgacttcggatctaacgacactgagacagatgatcaacagctggaggaggtcccactctacaacgatgtcatgctgcccagccctaacgaaaaattgcagaacattaacctggccatgtctccactgccaaccgccgaaacccccaaacccctcagaagcagcgcagatcccgccttaaaccaagaagtggctcttaaacttgaaccaaacccagagagcctggagctgtcttttacaatgcctcagattcaggatcagacccctagccccagcgatggaagtacccgccaatcctcccccgagccaaacagcccctcggagtactgtttctacgtcgactccgatatggtaaatgaatttaagctggagctggtggagaagttgtttgcagaagacacagaagccaaaaacccattttcaacccaagacactgacctcgatctggaaatgctcgctccctacatcccaatggacgatgatttccaactgaggagtttcgatcagcttagcccactggagtcttcctctgctagcccagaaagtgcatccccgcagagcaccgtgacggtttttcagcaaacccaaatccaagagccaaccgcaaatgctacaactaccacagcaaccacagacgagctcaaaaccgtgactaaggacagaatggaagatatcaagatactgatcgctagcccatctcccactcatatccataaggagaccacatctgcgactagtagtccatacagggatacacaatcacgcaccgcaagtccaaaccgggctgggaaaggcgtgatcgaacaaactgagaagagtcacccaagaagcccaaatgtgttgtcagttgccctgagccaaaggactaccgtcccggaggaggaactgaatcccaagatactcgccctgcagaacgcacaaagaaagaggaaaatggaacacgacggctctctttttcaagcagtcgggatcggaactctgcttcagcagcctgacgaccatgcagctacaacttccctgtcatggaagagagtcaagggatgcaagtctagtgaacagaacgggatggagcaaaaaacaatcatcctgatccctagtgatcttgcttgcaggctgttgggacagtccatggacgagtcaggactgcctcagctcacttcctacgactgcgaagtcaacgctcccatacagggttctcgcaacctgctccagggggaagaactccttagggcacttgaccaggtgaac

SEQ ID NO: 118522 - DNA, 2478 bp, Artificial Sequence
  derived and/or modified sequence
atggaaggtgcggggggtgccaacgacaagaagaagatcagttcagagcgccggaaagagaagtcacgcgacgcagcgaggagccgaagatccaaagagtcggaggttttctacgaactcgcacaccagttgccattgccacacaacgtctcctcacatctcgataaggcttcagtgatgcgactgacgatctcatacttgagggtccggaagctcctggacgccggagatcttgatattgaggacgacatgaaagcgcagatgaattgcttttacctgaaagcattggacggattcgtgatggtgttgactgacgatggcgacatgatctacatctctgacaatgttaacaagtacatgggcctgacccagttcgagcttactggacactcggttttcgacttcactcatccgtgtgaccacgaagagatgcgcgaaatgctgacccatagaaacggactggtgaagaaaggcaaggaacaaaacactcagcgctcgtttttcctccggatgaaatgtaccctgacttcaagaggtcggaccatgaatatcaaatcagccacgtggaaggtccttcactgcacgggacacatccatgtctacgacactaactctaatcaaccacagtgcggctacaagaagcccccaatgacttgccttgtgctgatctgtgaaccaatcccgcacccgtcaaacatcgagattccacttgactcaaagacttttctctctcgtcattcactggacatgaagtttagctattgcgacgaaagaatcacggaactcatgggatacgaaccggaagaactcctgggccgctcgatctacgagtattaccacgccctcgattcggatcacctgaccaagacccatcatgacatgttcaccaaaggacaagtgaccactggacagtaccgtatgctcgcgaagcggggaggatacgtgtgggtcgaaactcaggccactgtcatatacaacacgaagaactcacaaccgcaatgcatcgtctgcgtgaactacgtggtgagcgggatcatccagcatgacctgatcttttcactccagcaaaccgaatgcgtgctgaagcctgtggaaagcagcgacatgaaaatgacgcaactcttcaccaaggtggagtcggaagatacctcatcattgttcgacaaactcaagaaggaaccggatgcattgactctgctggcgccggccgcaggggacactattatctcgttggatttcgggtccaacgacaccgagactgatgatcaacagctggaggaggtgccgctgtacaacgacgtgatgttgccctcaccgaatgaaaagctgcaaaacatcaatttggcaatgtcaccgctccctactgcggaaaccccgaagcccctgagatctagcgccgacccagccctgaatcaagaagtggctctcaaacttgaaccaaatccggagagtctcgagctcagctttaccatgccgcaaatccaggaccagactccgtctccttcagatggaagtactcgccaatcaagccccgagcctaactcgccgtctgaatactgcttttacgtcgactccgatatggtgaacgaattcaagctcgaacttgtcgaaaaacttttcgcggaggataccgaagccaaaaaccctttctcgacgcaagacactgatctggatctggagatgctggcgccctacatcccaatggatgacgatttccagctgagatcgttcgatcagctgtcacctctggaatcgtcctcggcttctccggaatccgcctccccccagagcaccgttaccgtgttccagcagacccagatccaggagccgaccgccaatgccaccactaccaccgccactactgacgaacttaagaccgtgaccaaagatcgcatggaagatatcaagattctgatcgcaagtcccagcccgacccacattcataaggaaactaccagcgcaacctcctcgccttatagggacactcaatcgaggaccgcctcgccaaaccgggctggaaagggcgtcatagagcagacggagaaatcgcacccacgatcgccgaacgtgctttcggtggcactgagccagcggactacggtacctgaagaggagctcaacccgaagattctggccctgcaaaatgctcagcgcaaacggaagatggagcacgacggctccctttttcaggccgtggggatcggtacgttgttgcagcagccagatgaccacgccgctaccactagcctgtcctggaagcgcgtcaaggggtgcaagtcgtcggaacaaaatggaatggaacaaaagaccatcatcttgatcccgtccgatctcgcgtgtcggctgctgggccagagtatggacgagtcaggactgcctcagcttactagctacgactgtgaggtcaacgcaccaattcagggatcacgcaacctgctgcaaggagaggagctccttcgggctctggaccaggtgaat

SEQ ID NO: 118523 - DNA, 2478 bp, Artificial Sequence
  derived and/or modified sequence
atggaaggcgcgggaggagccaacgacaagaagaagatctcctcggaaagacggaaggagaagtcaagagacgcagccaggtcacgacgatcgaaggagtcagaagtgttctacgagcttgcccaccagctccccctcccgcacaatgtgtcctcccatcttgataaagcgagcgtgatgcggctgactatctcatacctgcgagtccgcaaactgctcgacgccggggatttggacatcgaagatgatatgaaggcccagatgaattgcttctacctgaaggccttggacggttttgtgatggtcttgaccgacgacggggacatgatctacattagcgacaacgtgaacaagtacatggggctgacccagtttgaattgaccggacacagcgtgttcgacttcacgcacccttgtgaccacgaggaaatgagagagatgctgacgcatcgtaacggcctcgtgaagaaggggaaggagcaaaatactcagagatccttcttcctccgcatgaagtgcaccctgacttcacggggtcgaaccatgaatatcaaatcggccacttggaaggtcctccactgcactggacacatccacgtgtacgacaccaacagcaaccaaccgcagtgcggatacaagaagccgccgatgacgtgtctcgtgctgatctgcgaacctattccacacccctcgaacattgagatccctctcgattctaaaaccttcctgtcgaggcactcgcttgatatgaaattctcctactgtgatgaacgaatcactgagcttatgggatacgagcccgaggaactcttgggcaggagcatctacgaatactaccacgctctggattcagatcacctgaccaagacccatcacgatatgttcaccaagggtcaggtcacgactgggcagtatagaatgctggctaagcggggcggctacgtctgggtggaaactcaggcgactgtgatctacaataccaaaaacagtcagccgcagtgtatcgtgtgcgtgaactatgtggtgagcggaatcatccagcacgatctgatcttctcactgcaacaaaccgaatgcgtccttaagccggtggaatcgtccgacatgaaaatgactcaactgttcacgaaggtggaatcggaggacactagctcccttttcgacaagctcaagaaggagccggacgccctgaccctgctcgccccagcggcaggggacactatcatttccctggacttcggttcgaatgatactgaaaccgatgaccagcagctggaagaagtcccgctctataacgacgtgatgctcccttcgccaaacgagaaactccagaacattaatctggccatgtctccactgcctaccgcagagactccaaagccgctgaggtcgagcgcagatcctgccctgaatcaagaggtcgctctgaagctggaaccgaacccggagtcgctggagctctcattcactatgccacagatccaggaccagactccgtccccttccgacggttcgactcgccagtcgtccccggaaccaaattcaccgagcgagtattgcttttacgtggactcagatatggtcaacgagtttaaactggaactggtcgagaagctcttcgcagaggacaccgaagcgaagaacccgttcagcactcaggacactgacctggacctggaaatgctcgctccctacattcctatggatgacgacttccagttgagatcattcgatcagctgtcccctttggaatcttcatcggccagccccgaatcagcttcgcctcaaagcactgttaccgtgttccagcagactcaaatccaggagccaaccgcaaatgccacgaccaccactgcgacgactgacgagctcaagactgtgactaaagaccggatggaggacatcaagatcctgatcgcatcaccctccccgacccacatccacaaggaaaccacttcagccacttcatccccataccgcgacacccagagccggaccgcttcgcccaatcgcgctggtaagggcgtcatcgagcaaaccgagaaaagccatccacggagcccaaacgtactgtcagtggccctgtcccaacgcacgactgtgccggaggaggaactcaacccgaagatcctggcccttcaaaatgcccagcggaaaagaaaaatggagcatgatggatcccttttccaggccgtgggcatcggaaccctcctgcagcagccggacgatcacgctgcaactacttctctgtcctggaagcgggtgaaaggttgtaagtcgagcgagcagaatgggatggagcaaaagacgatcattctcattccgtcggatctggcctgtcggctgctcggtcaatcgatggacgaatcgggactgccgcaactgacctcctatgattgcgaagtcaacgcccctatccagggaagcaggaacctgctccaaggagaggagctcctgagagccctcgaccaggtgaat

SEQ ID NO: 118524 - DNA, 2478 bp, Artificial Sequence
  derived and/or modified sequence
atggagggcgctggaggggccaacgacaagaagaaaatcagcagtgaaagaagaaaggaaaagagtcgagacgctgcccgctcacggagatctaaggaaagcgaagtcttctacgaactcgcccatcaacttccgctgccacacaacgtaagctctcatctggataaggccagtgtgatgcgactcacaatctcatacctgagagtgcggaagttgctggatgccggcgacctggacattgaggatgatatgaaggcacagatgaactgtttctatttgaaggcgctcgacgggtttgtaatggtcctgactgatgatggcgacatgatttacatttcagacaatgtgaacaaatatatggggctgactcaatttgagcttaccggacattccgtatttgacttcacacatccatgcgatcacgaagaaatgagagagatgcttacccataggaatgggcttgtaaagaaaggtaaggagcaaaacacgcagagatcattctttctgcgaatgaagtgcaccctgacgtcccgcggtcgcaccatgaatattaaaagcgcaacttggaaggtgctgcattgcacggggcacattcacgtctatgatactaactccaaccagccacagtgtggatacaagaagcccccaatgacctgcttggtcctgatctgtgagcctataccccacccgagcaacatcgaaatacccctggactccaagacctttctgagcaggcactcacttgatatgaagttttcctactgtgatgaaagaattaccgaactcatgggatatgagcccgaggagttgctcgggcggagcatttacgagtactatcatgcgttggacagcgatcatctgaccaaaactcatcatgatatgttcaccaaagggcaagtgacgaccggtcagtatcggatgctggccaaacggggcggatatgtatgggttgagacccaggccacagtgatctacaacacaaaaaattcccagccacagtgcatcgtatgcgttaattacgtggtgagtggcataatccaacacgacctgattttctctcttcagcagaccgaatgcgtgctgaagcccgtcgaaagttctgatatgaaaatgacacagctgtttactaaggtggaatccgaggatacatcaagtttgtttgacaagctgaagaaagaacccgacgcactgaccctcctcgctccagccgctggcgacacaataattagtttggatttcggcagcaacgatactgaaaccgacgaccagcagctggaggaggtgcccctctataacgatgtgatgctgcccagtcccaacgaaaaacttcagaatatcaatttggcaatgtcacctctcccaaccgccgagacacccaagccactgcgatcatctgctgaccctgcgctgaatcaagaggtggccctgaaactggaaccaaacccagaaagcctggaattgtcctttaccatgccccagatccaggatcagaccccctctccttctgacggttccacccgacagtctagcccggagccgaacagcccaagcgaatactgtttctatgtggattctgatatggtaaatgagtttaagctggagctcgtcgaaaaactgttcgccgaggacaccgaggccaagaacccgttctctacgcaggatacagatctggacctcgagatgttggcaccctatatccctatggacgatgatttccaactgcggagcttcgatcagctgtcccccctcgaaagctcctctgcgtctcccgagtcagcatctccacagagcaccgttaccgtatttcagcaaacccaaatacaagagcccactgctaatgctacaactacgaccgccaccactgatgagctgaaaaccgtaaccaaggacaggatggaggatatcaagattctcatcgcctctccctcacctacacacatccataaggagactacatctgctacctcttctccttacagggatactcagtctaggacagctagtccgaacagggccggcaagggcgtgatcgagcaaacagagaaaagtcaccctagatctcccaatgtgctgagcgtggccctgtcccagcggaccaccgtcccagaggaggaattgaatcctaaaatactggccctgcagaatgcccagcgaaaaaggaaaatggaacacgacggttctctgttccaagccgtggggatcggcactttgctccagcagcctgatgaccacgctgcaacaactagcctgagttggaagagggtcaaagggtgcaaatcatctgaacagaatggaatggagcaaaagacaataatccttataccaagtgatttggcctgcaggttgctggggcagtctatggacgagtccggcctgccccaactgacgtcttatgattgtgaggtcaatgccccaatccagggctcacggaatctcctccagggggaggaactgctcagagctctggaccaggtaaac

SEQ ID NO: 118525 - DNA, 2478 bp, Artificial Sequence
  derived and/or modified sequence
atggagggcgctgggggggctaacgacaagaagaagataagcagcgagcggaggaaagaaaaaagcagagacgctgcacggtcccgtcgaagtaaggagtcagaggtcttttatgagctcgcccatcagctgccactcccccacaacgtctcgtctcacctagataaagcctctgtcatgaggctgaccatctcatacttacgagtgaggaaactattagacgccggggacctggatatcgaggatgatatgaaagctcagatgaattgtttttacctcaaagcgttggatggcttcgtcatggtactgacagatgacggcgatatgatctatatctcagacaatgttaacaagtatatgggtctgacccagttcgagcttacgggacatagcgtctttgattttacacatccttgtgatcacgaagagatgcgtgaaatgctgacccaccgcaacggtctagtgaaaaagggaaaagagcagaatacacaacggtctttttttctgcgcatgaagtgcactctgacctccaggggacgcaccatgaatatcaaatctgccacatggaaggtgctacactgtaccggccatatccacgtgtacgacacaaactcaaaccagccacaatgcgggtataaaaagcctcccatgacatgccttgttctgatctgtgagccgataccacacccgagtaacatcgagatccctctcgactccaaaacgtttctcagcaggcactcgctcgacatgaaattttcctattgtgacgagaggattacagagcttatgggctacgagccagaggaattgctcggccgcagcatctacgaatactatcacgcactcgatagcgaccacctcactaagacccaccacgacatgtttacaaaggggcaagtgaccaccggccaatatcgcatgctcgccaagaggggagggtacgtctgggttgagacgcaggccaccgtgatatacaataccaagaactctcagccacaatgcatcgtatgtgttaattatgtggtcagtggaattattcagcacgacttaatcttttctctgcagcaaaccgaatgcgttttgaaacctgtggagagttctgacatgaagatgacacaactcttcactaaggtggaatctgaggatacctccagtcttttcgacaaactgaagaaggagccagatgctttaactctgctggcccccgccgccggcgataccattatctccctagacttcggtagcaatgatacagagaccgacgatcagcagctggaggaagtgcccctgtataacgatgttatgctcccctcgccaaacgaaaagctgcagaacattaatctagcaatgtcaccattgcctacggcagagacccctaagcctctgcgaagctccgccgatcccgccctgaatcaagaagtggctctgaaactggaaccgaaccccgagtccctcgagctgtcttttaccatgccacagattcaggatcagacaccttcccctagcgatggtagcacaaggcaatccagccctgaacctaactcacccagcgaatactgtttttatgtggactccgatatggtgaatgagttcaaactcgaactggtcgagaagcttttcgccgaagatactgaggcaaagaatcccttttctacacaggatacagatctcgacttggaaatgctggctccctatatacctatggacgacgacttccagttgagaagctttgaccagctatcgccactcgaatctagtagcgcgtctcctgagtcggcgtcccctcaatcgaccgttaccgtgttccagcagacccaaatccaagaaccaaccgcgaatgccactaccacaaccgctaccactgacgaactgaaaaccgtaactaaggaccggatggaagacataaaaatcctgattgcctccccctccccgacacatatccataaagaaacgacctcagccacttcatcaccataccgcgatactcaatcgcgaaccgcctcacctaatcgagccggaaaaggagtgatcgaacaaaccgagaagtcccatccaaggtcccctaacgtgttgagcgtcgcactgagccagagaacaaccgtgcccgaagaggaactgaaccctaaaattctggccctccagaatgcccagcgaaagcggaagatggagcacgatggcagccttttccaagcagtggggatagggactcttctgcaacagcctgatgatcacgcggctacaacatccctttcgtggaaacgggttaaggggtgcaagtcttctgagcaaaatggcatggaacagaagactatcattctgattcccagtgatctggcatgcaggctcctaggccagtcgatggatgagtcagggctacctcagctgaccagttatgactgtgaggtcaacgcccccatacagggctccaggaatctcctccaaggcgaggaactcttgagggccctggaccaagtaaat

SEQ ID NO: 118526 - DNA, 2478 bp, Artificial Sequence
  derived and/or modified sequence
atggagggggctggaggagcaaacgataagaagaagataagcagtgagcggcggaaggagaagagtagggacgccgcacgtagtaggagatccaaggaaagtgaagtgttttacgaactcgcccaccagctgcctctgccacacaacgtgtccagccaccttgacaaagcctctgtaatgagattgaccatcagttatctcagagttcggaaactgttggacgccggagaccttgatattgaagatgacatgaaggcacagatgaactgtttttatctgaaagccctagatggatttgtcatggtgctgactgatgatggcgatatgatttacatctccgataatgtgaacaagtacatggggcttacacagttcgagcttacaggacatagtgtgttcgactttactcatccctgcgatcacgaagaaatgagagaaatgctaactcatcgaaatgggttggtcaagaaaggtaaggagcagaacacccaacgctcttttttccttcgaatgaagtgtacccttacgtcacgggggaggactatgaacatcaagagtgccacgtggaaggtgctccactgcacgggtcacatacacgtgtacgacaccaactccaaccaacctcagtgcgggtataagaaaccgcccatgacttgtctcgtactcatatgtgagcccattccacacccctctaatattgagattccccttgacagcaagacttttctgagccggcactcactagacatgaaattttcatactgcgacgaacggatcactgaactgatggggtacgaacccgaagagctcctcggccggtcaatctacgaatattaccacgccctagatagtgaccatctcactaagacacaccacgatatgtttactaaagggcaggtcacgacagggcagtataggatgctggccaagcgtggcggttacgtctgggtagagacacaggctactgtcatttataacacaaaaaattcccagcctcaatgtatcgtctgcgttaattatgtggtgagcggaattatccagcacgacttgatttttagcctccagcagacagagtgcgtgctaaaaccagttgaaagttctgacatgaaaatgacacaactgtttactaaggtcgaatccgaagataccagtagcctgttcgataagctgaagaaagaacccgacgccctgaccctcctggctcctgccgcgggcgatacaattatttcactggactttgggagtaatgacactgaaacagacgaccagcagctcgaagaggtgccactgtataacgatgtaatgttgccctcccctaatgaaaaacttcaaaacatcaacctggcgatgagcccgctgccaaccgctgaaactcccaagcctctgagatcgtctgccgatccagcccttaatcaggaggtcgcattaaaactggaaccaaaccctgagagcctggaactaagctttacgatgcctcaaatccaagaccagacaccatcaccatctgatggatccacacgccagtctagtccagagcccaactcacctagcgaatattgtttttacgtagacagcgatatggtgaacgaatttaagctggagttagtggagaaactgtttgccgaagacactgaggccaagaatccattcagtacgcaggatactgacctagatctcgagatgctcgccccttatattcccatggacgacgacttccagctcaggtcattcgaccagctgtccccattggagtcctcctcagctagtcccgagtcagcaagccctcagtccacagttaccgtgttccaacagacacagattcaggagccaaccgccaacgcgacaactacaaccgcaaccaccgacgaactaaagactgtgaccaaggaccgcatggaagatatcaagatcctgatagcgagcccttcacctacgcatatccataaggagacaacgagcgctacatcctctccgtaccgagacacgcagtcgagaactgcttcacccaaccgcgctgggaagggcgttattgaacaaaccgaaaagtcccatccccgaagccccaatgttctgtccgttgcgctgagccagcggaccacagttcctgaggaagagctgaaccctaagatcctggcgctgcagaacgcccagcgcaagagaaagatggagcatgacgggtccctgttccaggctgtgggcattgggaccttgctccaacagcccgacgaccacgccgctacaacatcactgagctggaagagggtgaaggggtgcaagtcatccgagcagaacggaatggagcaaaagacgatcattctgatcccatctgacctcgcctgtcgcctactgggtcagtcaatggacgagagtggactgcctcaactgacgtcatatgactgtgaggtcaacgctccgatacaaggaagccgtaatttgctgcagggcgaggaactgcttagggcattagatcaggtgaac

SEQ ID NO: 118527 - DNA, 2478 bp, Artificial Sequence
  derived and/or modified sequence
atggagggagctggtggtgcaaatgataagaagaagatctcaagcgagcggcggaaggaaaagagcagagacgccgcacgctcacgccgctctaaggaatcagaagtcttttacgaactcgcgcaccaactccccctgccgcacaatgtgtcgtcacatctggataaagcatctgtgatgagactgaccatctcgtacctgcgagtgcggaagctgctggatgctggggatctggacattgaagatgacatgaaggcccagatgaattgcttttacctcaaagcgctggacggattcgtgatggtgctcactgacgacggcgacatgatttacatctcagacaatgtgaacaagtatatgggactcacccaattcgaactcactgggcattcagtctttgactttacgcacccttgtgatcacgaagagatgcgcgaaatgctcacccatcgcaatggcctcgtgaaaaagggtaaagaacaaaacacccagagatcgttctttctgcgcatgaaatgtactctgactagccgcgggcgcaccatgaacattaagtccgccacctggaaagttctgcactgcaccggacacattcatgtctacgacactaattcaaatcagccgcaatgcggatacaagaagccacccatgacctgcctcgtcctcatttgtgaacccattcctcatccgtcgaatatcgagatccctctggatagcaagaccttcctgtcccgccactccctggacatgaagttttcttactgtgacgagcggatcaccgaacttatgggatacgagcctgaggagctgctgggtaggagcatttacgagtactaccacgcgctggactcagaccaccttaccaaaacgcatcatgacatgtttacgaagggacaggtcactaccgggcagtaccgcatgctggcaaaacgaggaggatacgtgtgggtggaaacccaagcgactgtcatctacaataccaagaatagccaaccccagtgcatcgtgtgcgtgaactacgtggtttcaggaattatccaacacgatctgatcttcagcctgcagcaaaccgagtgcgtgctcaagccagtcgagagctcggacatgaagatgacccagctgttcaccaaggtggaatccgaggacacttcaagccttttcgacaagctgaagaaagagccagatgccctgactctgctcgcaccagccgcgggagataccattatctcattggatttcggctcgaatgacaccgagactgatgaccagcagttggaagaggtgccgctgtataacgatgtgatgctcccatcccccaatgagaaattgcagaatatcaacctggctatgtcacccctgccaaccgccgagactccaaagccgctccggtcgtcggcagacccggccctgaaccaagaagtggctctgaagctggaaccaaatcctgaatccctcgagctctcgttcaccatgccgcagatccaggaccagactccgtccccgtcggatgggtcaacccgccagtcatctccagagcccaactcgccgtcagaatactgtttctacgtcgactccgacatggttaatgaattcaagctggaactggttgagaagctgtttgcggaggatactgaagccaaaaaccctttcagcacgcaggatactgaccttgacctggaaatgctcgccccgtacatcccgatggacgacgatttccagctccggtcgttcgaccaactctcaccgctggagagctcctccgcaagtcctgagtcagcgtccccgcagtccaccgtgactgtgttccaacagactcaaatccaagagccaactgcaaacgctaccactaccaccgcgactactgacgaactcaagactgtgactaaagacagaatggaggacatcaagatcctgatcgcttcgcctagccctacgcacatccacaaagagactacctcagctacgtcgtccccctacagggacactcagagccggacggcttcgccgaaccgggcgggaaagggagtcattgaacaaactgaaaagtcacacccgcgctctcctaatgtgttgagcgtggcgttgagccagcgtaccaccgtgccggaggaggaactgaacccaaagatccttgccctccagaacgcacagcggaaacgcaagatggaacacgacggctcactgttccaagcagtcggaatcggaaccctcctccagcagcccgatgaccatgcggctactacctcgctctcgtggaagagagtcaagggttgcaaatcgtcggaacaaaacggaatggagcaaaagaccatcatcctgatcccctcggacctggcatgtcgcctgctcggtcagtcgatggacgaatcgggactgccccagcttacctcgtacgactgcgaggtgaatgcgccgatccagggatcacgcaatctgctccagggcgaggagcttctgagggccctggaccaagtcaac

SEQ ID NO: 118528 - DNA, 2478 bp, Artificial Sequence
  derived and/or modified sequence
atggaaggagcaggaggagctaacgataaaaagaaaatttccagcgaacgcagaaaggagaagtcccgggacgcggctagaagtcggcgcagtaaggagagtgaggttttttatgaactggctcaccaattgccgctgccacacaacgtctcctctcaccttgacaaggcatccgtgatgcggttaaccatctcctacctcagggtccgcaagcttctggacgctggtgatctagatatcgaggacgacatgaaggcccagatgaactgtttttatcttaaagcactggatggatttgttatggtgctgaccgacgacggagatatgatctacatttccgataatgtgaacaagtacatgggacttacacaattcgagcttactggccacagcgttttcgacttcacacatccgtgtgaccatgaagagatgcgagagatgctgacccatcgcaacggactcgtgaaaaaaggaaaagaacaaaatactcagagatcctttttcctcaggatgaaatgcacccttacaagccgaggcaggaccatgaatatcaagagcgccacttggaaggttctgcattgcactggtcacatccacgtgtatgatacgaatagtaaccagccacaatgtggatacaaaaaaccaccaatgacatgccttgtgctgatctgcgagccaataccccaccctagcaacatagagatcccacttgacagcaaaaccttcctttcacgccattccctggacatgaagttctcctattgcgatgagcgaatcactgagctgatgggatacgagcccgaggagctgttgggaaggtcaatctacgaatattaccatgccctcgactcggaccacctgaccaagacacaccacgatatgtttactaaaggtcaggtgactacagggcagtacaggatgctggcaaaacgcggcggatatgtctgggtggagacacaggcaaccgtgatctacaatacaaagaattcacagccacagtgtatcgtttgtgtaaactacgtcgtttcaggaataatccagcatgacctgatctttagcctccagcagacagagtgcgtactaaaacctgttgagagcagcgacatgaaaatgacacagctgttcacaaaggtggaatcagaagatactagcagtttgtttgacaaactgaaaaaggaacccgatgcgttgacccttttagccccagccgcaggagacactattatctcgcttgattttgggagcaatgataccgaaacggacgatcagcagctcgaggaagtaccgttgtacaacgatgtcatgcttccttcccccaacgaaaagctacagaacatcaacctcgcaatgagtccactgcccaccgctgaaacaccaaaacccctgagaagtagtgcagaccctgctctcaaccaagaagtggctctgaagttagaacccaaccccgaaagtctggaactgtctttcaccatgccacagatccaagatcagacacccagcccatcagacggcagcacgagacagagcagcccggaacccaacagcccatccgagtactgtttttatgttgacagcgatatggtcaacgaattcaagctggaactcgttgagaaattgttcgctgaagataccgaggctaaaaatcccttcagcactcaggatacggacttggacctagaaatgctggcaccctatatcccgatggatgatgacttccagctcagatcttttgaccagctgtcccccctggagtccagtagtgcctcgcctgagtcagcttcacctcagagtaccgtgaccgtgtttcagcagactcaaattcaagaacctaccgctaatgcgaccactactaccgccacgaccgacgaactgaagacagtgacaaaggaccggatggaggatatcaagatcctgatcgcaagcccatccccaacccatatccataaggagacaactagcgcgaccagctccccttatagagatacacagagtcgcacagcttctcctaatcgagcaggcaagggcgttatcgaacagacggaaaagagccacccaaggagtcctaatgtcctgagtgtggcactgtcccaacggactaccgtgccagaagaggaacttaaccccaaaattctggctttgcagaatgcgcagcgcaaacgtaagatggagcatgacggctcactgttccaggccgtgggcatcggaacccttcttcagcagcctgatgatcacgctgcaaccacttctctgtcatggaaaagggtcaagggatgtaaaagctcagaacaaaacggcatggaacagaaaaccatcatcctaatacccagcgatcttgcttgccgcctgctcggacaaagtatggatgagagcggactccctcaactcacctcttacgactgtgaggttaatgcaccaattcagggctccaggaacctgctgcaaggcgaggaattgttgagagcactggatcaagtgaat

SEQ ID NO: 118529 - DNA, 2478 bp, Artificial Sequence
  derived and/or modified sequence
atggagggggctgggggggcaaacgacaaaaaaaaaattagcagcgagcgacggaaggagaagtctcgggatgccgcgagatctcgccgctcaaaagaatcagaggtgttttacgagctggcccaccaactgcccctacctcacaacgtatcttcccacctggataaggcaagcgtcatgcggctgactatctcttacctgcgggtacgtaagctgctggatgcaggagacctggatatcgaggatgacatgaaggcccagatgaattgtttctacctgaaggccctcgatggatttgtcatggtcttaactgatgatggcgacatgatctacatctcagacaacgttaataaatacatgggtctcacacagtttgaactgactggccattctgtttttgacttcactcatccttgtgaccatgaagagatgcgtgaaatgctcactcatagaaatgggctagttaagaaaggaaaggagcagaacacgcagcggtcattcttcctgcggatgaaatgcacactgacaagccgcggccgaaccatgaatattaaatctgcgacctggaaagtgctgcactgcactggccacatccatgtgtacgacacaaacagcaaccagccacagtgcggttataaaaagcctcctatgacctgtctcgtcctgatttgcgagcctattccacaccccagcaacatagagattccattagattctaagacttttctttccaggcattcactggatatgaagttctcctactgtgatgaacggattactgaacttatgggttacgaacctgaggagttgcttgggagaagtatctatgagtattaccacgccctggactctgaccatctgactaagacacaccacgatatgttcactaaggggcaggttacaactgggcagtataggatgctcgcaaagcgcggggggtatgtctgggtagagactcaggctaccgtgatttataacacgaaaaactcgcagccacagtgtatcgtctgtgtgaattatgtggtttccggaatcatccagcacgatctaatattctccttgcagcaaaccgagtgtgttctgaagcccgtcgagagcagtgatatgaaaatgacccagttgttcaccaaagtggagtcagaagatacctcttcattgttcgacaaactgaaaaaagagccagatgccctgactttactagctccagccgccggcgacactatcatatccctcgattttggatccaatgacacggaaaccgatgatcagcagctcgaagaagtaccactctacaatgatgtgatgttgccctccccaaacgaaaagctgcagaatatcaatcttgccatgagccccctgcctactgccgaaacgcccaagcctctgcgctcaagcgcagatcccgccctgaaccaggaagtggctctgaagcttgaacctaatcccgaaagcctggaactaagcttcaccatgcctcagatacaagaccagacacctagcccctctgatgggagcacccgacagtctagcccagagcccaacagtcctagcgaatactgcttctatgtggatagcgatatggtaaacgagtttaagttagagcttgtggagaaactgttcgcagaggataccgaagctaagaacccatttagcacacaggacaccgatttagatctggagatgctcgccccatacattcctatggacgacgatttccagttgaggtctttcgaccagctatcgccactcgaatcttcgagcgccagccccgagtccgctagccctcagtctacagtaactgtcttccagcagactcagatccaggagccaaccgccaacgccactactaccactgccacaactgacgaattgaagaccgttacaaaggatcgtatggaggatatcaaaatattgatcgctagtcccagccccacccacatacataaggagaccacctccgcaacctctagcccataccgggacacacagtcgaggacagcgagccccaaccgggccggcaagggcgtaattgagcagacagaaaaaagccacccccgctcgcccaatgtgttgtctgtggccctaagtcagaggaccacggtgcccgaggaagaactcaacccgaagattctggccttgcaaaatgctcagcgtaagaggaagatggaacatgatggctctctgttccaggctgtcggaatagggaccctcttacaacagccagatgaccacgccgccacgacatctcttagttggaagcgggtcaagggctgcaaaagttcggaacagaacgggatggaacagaaaaccatcattctgattccatcagaccttgcatgcagactcctcgggcagagcatggacgagtcgggtctgcctcaactcacttcctatgactgcgaggttaatgccccaatccaggggtctcgtaatctactccagggtgaggaacttctgagggcattggaccaggttaac

SEQ ID NO: 118530 - DNA, 2478 bp, Artificial Sequence
  derived and/or modified sequence
atggagggggcaggaggcgctaacgacaagaaaaagatcagctcagaacgccgaaaagagaagtcccgggacgcggcacgctccagaaggtcgaaggagtcagaggtgttttatgaactggcccatcagctgccgctgccgcacaatgtctcaagccatttggataaagcctcagttatgcggctgaccatctcctatcttagagtgcggaagctcctggacgcgggcgacctcgacatcgaagatgatatgaaggcacagatgaattgcttctatctgaaggccctggatggtttcgtgatggtgctgactgacgatggagatatgatctacatctccgacaacgtgaacaaatacatggggctgacccagttcgagctgaccgggcattccgtgttcgacttcactcatccgtgtgaccacgaggagatgcgggagatgcttacccaccgcaacggcctggttaagaagggaaaggagcagaacacccaacgcagcttcttccttcggatgaagtgcacgctcacctcgcgcggacggactatgaatatcaagagcgccacttggaaggtgctgcactgcactggccacattcatgtgtacgacactaactcgaaccaaccccaatgcggatacaagaaaccgccgatgacttgcctggtcctgatctgtgaaccgattccacacccttccaatatcgaaatcccactggacagcaaaaccttcttgtcacgccactcactcgacatgaagttctcctactgcgatgaaaggatcactgagctcatgggatacgaaccagaggaactgctgggacgctccatctacgagtactaccacgcactcgactcggaccaccttactaagacccaccatgatatgtttaccaagggtcaagtgaccaccggccagtaccggatgttggcgaaaagaggaggatacgtctgggtggaaacccaagccaccgtgatttacaataccaagaactcacaaccgcagtgcatcgtgtgtgtgaattatgtggtgtccggtatcatccagcatgatctgatcttctccctgcagcaaaccgaatgcgtgctcaagccggtcgaatcgagcgatatgaagatgactcagctctttaccaaagttgagtcggaggatacctcgtcgcttttcgataaactcaaaaaggagccagacgccctcactctgttggcgcctgccgcgggagataccatcatctcactggacttcggctcgaatgataccgagacggacgaccaacagctggaggaggtgccgctgtacaacgatgtgatgctgccctcgccaaatgagaagctgcagaacataaatctcgcgatgtcccccctgcctacggcggaaactcccaagccgcttcggagcagcgccgacccagcgcttaaccaggaagttgccctgaaattggaaccaaacccggaatcgctggagctgtccttcaccatgccacagatccaagaccaaactccatccccaagcgacgggtcaacccgacaatcgagcccagagccgaactccccttcagaatactgcttctacgtggattccgacatggtgaacgaattcaagctggagctcgtggaaaaactgtttgcagaagataccgaagctaagaacccgttctccacgcaggacaccgacttggacctcgagatgctggcgccttacatccctatggacgacgatttccaattgaggtccttcgaccagctgtcccctctggaaagctcatccgcctccccggaaagcgcatcaccacaaagcaccgtgacggtgtttcagcagactcaaatccaggaaccgacggcaaatgccaccaccactactgctaccaccgacgaactcaaaactgtgactaaggaccgcatggaggacatcaagatcctcatcgccagcccgtcgcctacgcatatccacaaagaaaccacctcagctacttcgagcccgtaccgggacacccaatccaggaccgcctcgcccaaccgcgcgggcaaaggagtcattgaacaaaccgagaaatcacacccaaggagcccgaacgtgctgtcggtcgccctctcgcagcggactacggtgccggaagaggagctgaatccgaagatcctcgcactgcagaacgcccagcgcaagaggaaaatggaacacgatggatcgctgttccaggcagtgggtatcggaacgctgctgcaacagccggacgaccatgcagcaactacttctctgtcatggaagcgcgtgaagggctgtaagtcatcggaacagaacggaatggaacaaaagaccatcatcctgatcccgagcgacctcgcctgccgcctccttggacaaagcatggatgaatccggacttccgcagctgacctcatacgactgtgaggtgaatgcacctatccagggatcccggaacctgctccagggcgaggaactcctgcgcgccctggaccaggtgaac

SEQ ID NO: 118531 - DNA, 2478 bp, Artificial Sequence
  derived and/or modified sequence
atggagggcgcaggcggggccaatgataaaaaaaaaataagtagcgaacggcgcaaagaaaagtcccgggacgctgcaagatctcggaggtccaaagagagcgaagtgttctacgaattggcgcatcaacttcccctgccccacaacgtttccagccacctcgataaggcctcagtaatgagacttacaataagctacctccgcgtgcgcaagctcctggatgctggcgatctggatatcgaggacgatatgaaggcccaaatgaactgtttttatcttaaagccctcgacggattcgtcatggtcctgacagacgacggcgatatgatttatatctctgataacgtcaacaagtatatgggcctgacccagtttgagctgacaggccacagtgtgttcgattttactcacccatgcgatcatgaggaaatgagagaaatgctgacccaccgcaacgggcttgtcaagaaaggcaaggagcagaacacccaacggtccttcttcctgagaatgaagtgcacactgacttccaggggcagaacgatgaacattaagtcagcaacctggaaggtgctgcactgcactggacacatccacgtttatgataccaactccaaccagccacagtgtgggtacaagaaaccgcccatgacgtgtttggtactgatctgcgaacctatcccacacccaagcaatatcgagatccctttggactcaaaaacctttctgtccaggcactcactcgacatgaagttttcttattgcgacgaaagaatcacagagctgatgggctatgagcccgaggaactgcttggcaggtccatctacgagtactatcatgctctggacagcgaccatctcacaaaaactcaccacgacatgttcactaagggtcaagtgacaactggccagtacagaatgctcgcaaagcggggagggtatgtttgggtagagacccaggcaaccgttatatataacacgaaaaattcccagccccaatgcattgtgtgcgtgaactacgtggtgagtggcattatccagcatgaccttatatttagcctgcaacagactgaatgcgttctgaagcccgtagaatcatcagatatgaaaatgactcagctttttaccaaggtggagagcgaggacacctccagtctgttcgataagttgaagaaggaaccggatgcactgaccctgctggccccggccgcgggagataccatcatcagtcttgattttggatctaatgacaccgaaacagacgaccagcagctcgaggaagtccccttgtataacgatgtgatgctgcctagccccaatgagaagctgcagaacattaatctggcaatgtcacccctgccgaccgcagaaacccccaagcccctgcggtccagcgctgaccctgctctgaatcaggaggtagccttgaagttggaacccaaccccgagtcacttgagctgtcatttactatgccccaaatccaggatcagacccccagcccctccgacgggtctaccaggcagtctagccctgagcccaacagcccaagcgagtattgcttctatgtggatagcgacatggtcaacgagttcaagcttgagctggtggagaaactgtttgcggaggacaccgaggctaaaaatccattctccacccaagacactgatttggacctggagatgctggccccttacatcccaatggatgatgactttcagttgcgatccttcgaccagcttagcccgctggagtcatcctctgcctcccccgaaagcgcatcaccacagtccaccgtcacggtctttcagcagacacagatccaggaaccgaccgctaacgctacaacaacgaccgccacaaccgatgagctgaaaactgttacaaaagatcggatggaggacatcaaaattttgatcgccagtcccagccccacacacatacataaagaaactacctctgctacaagctctccctatagggatactcagtccaggacagcgagccctaaccgcgcaggaaagggagtcatcgagcaaaccgagaaatcccatccgaggtcaccaaatgtcctcagcgtggccctgtcacagagaacaaccgtgccggaggaggagctgaaccctaagattttggcactgcaaaatgcacagagaaagcgcaagatggaacacgatgggtccctgtttcaggcagtgggaatcgggaccctgctgcagcaacctgatgaccatgccgcgacgacaagtttgagttggaaaagggtaaaagggtgtaaaagcagcgaacaaaatggtatggagcaaaaaactattattctgatcccctctgatctggcatgtcgcctcctgggtcagagtatggatgagtcaggtctcccacaacttacaagttatgattgtgaagtaaatgctcccatccagggctctcgaaacctgctccagggtgaagaattgcttcgcgcactggatcaagtcaac

SEQ ID NO: 118532 - DNA, 2478 bp, Artificial Sequence
  derived and/or modified sequence
atggagggcgctggaggagctaacgataagaagaagatatcgagcgagagacgcaaggagaaatcccgggatgctgcgaggagcaggaggagtaaagagagcgaagtgttctatgagttagcccatcagctcccattacctcataatgttagtagtcacctggacaaagcttctgtgatgagactcaccatctcttacctccgggtgcgcaaactcttagacgctggggacctggatattgaagatgacatgaaggcacagatgaattgcttttacttgaaagcactggacggttttgttatggtgctcaccgacgatggagatatgatttatataagcgataatgtgaataagtacatgggcctgacgcagttcgagctcacagggcactccgtgtttgacttcacgcacccgtgtgatcacgaggaaatgagagagatgttgactcatcgtaatgggttggtcaagaaaggcaaggagcaaaatacgcaacggagtttttttctgagaatgaaatgtaccttgacctctaggggccgcacaatgaacattaaatcagcaacatggaaggtactgcactgcaccggtcacattcatgtttacgacaccaacagcaaccaaccccagtgtggctacaagaaaccaccaatgacctgcctcgtgcttatatgcgagcctatcccacacccatctaacatcgagatccctttagactccaaaacgtttctgagtcggcactctctcgatatgaagtttagttactgtgatgagcggatcacagagttaatgggatacgagccagaggaactgctgggccgcagcatctatgaatattatcatgcgctagactctgaccatctaactaagacccaccatgatatgtttactaagggtcaggttaccactgggcaataccgcatgcttgccaagcgtggtggctacgtttgggtcgaaactcaagccaccgtgatttacaataccaaaaattcacagccccagtgtatagtgtgtgtgaactacgtggtttccgggataattcaacacgacttaattttttccttacaacagacagaatgcgtgctgaaacctgtggagtcttcagacatgaaaatgacccagctgtttacaaaagtcgaatcagaagatacgagctcactgtttgataagctgaagaaggaacccgatgcattgactctccttgcacccgcagccggtgatacaataatctctttggatttcggtagtaacgatactgagactgatgaccagcagctcgaagaggtgcctctgtataacgacgttatgctgccatctcctaatgagaagcttcaaaacattaacctggctatgtctcctctgccaaccgctgaaactcccaagccattgcgcagtagcgccgacccagccttaaatcaggaagtagcgctaaagcttgaaccaaatccggaatccctggaactcagttttacgatgcctcagattcaggatcagactcccagcccatcagatgggagtacacgccagtcctctcccgagccaaatagcccttctgaatactgcttttacgtcgattccgacatggttaatgaattcaagctggaacttgtggaaaagctctttgccgaagacactgaggccaaaaatccattttctactcaggacacagatcttgatctggagatgctggcaccctatatcccaatggatgatgactttcagttgcgaagctttgatcagctgtcaccactggaatcctcttccgcctccccggagtctgcctctccacagtcaaccgtaaccgttttccagcaaacacaaattcaagaaccaacggctaatgcaaccacgacaactgctaccactgatgagcttaaaaccgttaccaaggaccgcatggaggacataaagatactgattgcttctccttcccctacccacatccacaaagagaccaccagtgccacaagcagcccataccgagatactcagagtcgcactgccagtcccaatagagctggcaagggggtgatcgagcagacagaaaagtcccatccacggtcccccaatgtactctcagtggccctctcacagcgaacaaccgtaccggaagaggaactgaatcccaagatcctggcactgcagaacgctcagcggaagagaaaaatggaacatgacggttccctatttcaagcggtcggtatcggtaccctcctgcagcagcctgacgatcacgccgcaactacctcactctcttggaagagggtcaagggctgtaagagctctgagcagaacggaatggaacagaagacaattattttgattccatctgatctggcgtgtcgtctacttgggcagtctatggacgaaagcggcctcccacagttaaccagttatgattgcgaagtgaatgcccccatccagggctcccggaacctgctccagggagaggagttactgcgggctctggaccaggtgaac

SEQ ID NO: 118533 - DNA, 2478 bp, Artificial Sequence
  derived and/or modified sequence
atggaaggagccgggggtgccaatgataagaagaagatatcctccgaaagacgcaaggaaaagagccgggacgccgcaaggtcgcggcggagcaaggaatcggaagtgttctacgagctggcacatcagcttccactgccacacaacgtgagcagccatctggacaaggcatcggtcatgagacttactatttcgtacttgagagtgcgcaaacttctggatgcgggtgaccttgacatcgaggacgatatgaaagcacagatgaattgcttctaccttaaggcccttgatggtttcgtgatggtgctcaccgacgacggagatatgatctacatttcagataacgtgaacaagtacatgggacttacgcaatttgagcttaccggccattcggtgtttgactttactcatccgtgcgaccacgaggaaatgcgtgaaatgctgacccacagaaatggactcgtgaaaaaggggaaggaacagaacacccaacgctcgtttttcctgcgcatgaagtgtactcttacttcccgcggcaggaccatgaatatcaagtcggccacctggaaagtgctccactgcacgggccacatccacgtgtacgataccaattcgaaccaaccgcagtgtggatacaaaaagcctcccatgacgtgtctcgtgctgatttgtgagcctatcccacacccgtccaacattgaaataccactggattccaaaacttttctgtcaagacatagcctggatatgaagttttcatactgcgacgaacggatcaccgagttgatgggatacgaaccagaagaactgcttggtcggagcatttacgaatactaccacgcactggattcagatcacttgaccaagacccatcacgatatgtttaccaagggacaggtgaccaccggtcaataccgaatgctcgcgaagaggggaggctatgtgtgggtcgaaacccaggcaactgtcatatacaatactaaaaactcacagccccagtgcatcgtgtgtgtgaactacgtggtgtcaggtatcatacagcacgacctgattttcagcctgcaacaaaccgaatgtgtgctgaagccggtggaatcatccgatatgaaaatgactcagctgtttactaaggtggagagcgaagatacttcgtcattgtttgataagctcaagaaagaacctgatgcactgaccctgttggcgccggccgcgggcgacactattatctccctggattttggctcgaacgataccgaaaccgatgatcagcaacttgaagaagtgcctctttacaacgacgtgatgctgccgtcccctaacgaaaagctgcaaaacataaaccttgctatgagcccgctcccaactgcagaaactcccaaaccactccggtcatcagcagatcctgcacttaatcaggaagtggcacttaagctggaacctaatcctgaatcactcgaattgtcatttacgatgcctcaaattcaagatcagaccccgtccccctccgatggcagcacccggcagtcctcgcccgagcccaactcaccctcggaatactgtttttacgtcgactccgatatggtgaacgagttcaagctcgagctggtggagaagctgtttgctgaagataccgaggccaaaaaccccttcagcacccaggacacggatcttgaccttgagatgctcgcaccttacattcctatggacgacgattttcaacttcgctccttcgatcaactttccccactcgaatcgtcaagcgcatcgcctgaaagcgccagcccacaatctaccgtcacggtgttccaacagactcagattcaagaacctactgcaaacgccaccaccaccacggcaaccactgatgaacttaaaaccgttaccaaggatcggatggaggatatcaaaatactgattgcaagcccttcccctactcatattcacaaggaaaccacgtctgcgacgtcgagcccgtacagagacactcaatccaggaccgcctcaccaaatagggcaggaaagggagtgatcgaacaaactgaaaagtcccatcccaggtccccaaacgtgctgagcgtggcactgagccagcggactaccgtgccagaggaagaactgaatccaaagatcctcgcactgcaaaacgcccagagaaagaggaagatggaacatgacggctctcttttccaggccgtgggaattggaacccttcttcagcaacccgacgaccacgcggcaacgactagcttgtcctggaagcgagtcaagggatgtaaatcttcggaacaaaacggcatggaacaaaagaccattatacttattccgtcggaccttgcatgtcgactcctgggccaatcgatggacgaatcgggtctgccacaactgacttcgtacgactgtgaggtcaacgcaccaatccagggatcccgtaacctgcttcagggcgaggagctgctgagggcactggatcaagtcaac

SEQ ID NO: 118534 - DNA, 2478 bp, Artificial Sequence
  derived and/or modified sequence
atggagggggccgggggggccaatgacaagaaaaaaatctccagcgagcggagaaaggaaaaatcccgggatgctgctaggtcccgacgctccaaggagtcagaggtgttttacgaattggcacaccagctccccctgcctcataatgtgtcctcccacttagacaaagccagcgttatgagacttacgatttcttatttgagagtaagaaagctcctggatgccggcgacctggatatagaagatgacatgaaggcgcagatgaactgcttctaccttaaggctctggatggcttcgtgatggtgctgacggacgatggagacatgatttacattagcgataatgtcaacaaatacatgggcctaactcagtttgagctaactggacattcagttttcgacttcacacacccatgcgatcatgaggagatgcgggaaatgttaacacatcgcaacgggctggtcaagaaggggaaggagcaaaatacccagcggagcttcttcctgcggatgaagtgcaccttaacaagcagaggcaggacaatgaacattaaatcggcaacatggaaggtccttcattgcactggtcacatccacgtctatgacaccaatagcaaccagccccagtgtggttacaagaaaccacccatgacttgcctggtcctgatctgtgagcctattccccatccttcaaacatagagatcccgttagactccaaaactttcctgtcccgccactctcttgatatgaagttttcgtactgcgacgaacggattaccgagttgatggggtatgagccagaagaactgcttggcagatccatttacgaatattatcatgcactggatagcgaccacctcacaaagactcatcatgacatgttcacaaagggccaggtcactactggccagtatcgcatgctcgccaagcgcggcggatacgtctgggtggagactcaggcaacggtgatctataatacaaagaacagtcagccgcaatgtatcgtatgtgttaactatgtggttagtggtattattcaacacgatctcattttttcacttcaacagacggagtgcgtgctcaagcctgtcgagtccagcgacatgaagatgactcagctctttaccaaggtggagagcgaagacacatcaagcctttttgacaaactgaagaaggagccagatgctcttacactgctggcgcccgccgccggggatacgataatctctttagacttcggctcgaacgatactgagacagatgatcagcagttagaggaggtacccctgtataatgatgttatgcttccatccccgaacgagaaactgcaaaatatcaacttggctatgtcccctctgccaaccgccgagaccccaaagcccctgaggtcttcagcagacccagcccttaatcaagaagtcgccctgaagttggaaccgaaccctgagagcttggagctgtccttcacgatgccacaaatccaggaccaaacaccttcccccagtgacgggagcacgcggcagtcttcccctgagcctaattcaccttctgagtactgcttctacgtggacagcgacatggtgaacgagttcaagttggaattggtggagaaattatttgcggaagatacagaagccaagaaccctttttcgacgcaggatacagatctggatttggaaatgctggctccttatatcccgatggatgatgactttcaactgcgttccttcgatcaactttcacccttggaaagctctagcgcgagccctgaatctgccagtccgcagtccaccgtgaccgtgtttcagcagacccagatccaagaaccaacagctaatgccacgaccaccaccgcaactacagacgaactgaagaccgttaccaaggacaggatggaagacattaaaatattgatcgcaagcccttcgccaactcatattcacaaggaaacaacatccgcgacgagcagtccctatcgcgatacccagtcacgaacagccagccctaatagagctggaaaaggcgtaattgagcagactgaaaagtctcacccgcgctctccaaatgtcctcagtgtcgcccttagccaacgcacgactgtgcccgaagaggagctcaacccaaagatcctcgccctgcagaatgctcagcgcaaaaggaaaatggagcacgacgggtctttgtttcaagctgtcgggattgggactctgctgcagcagccagatgaccacgccgcaaccaccagtctgagctggaagagagtgaagggctgtaagtcctctgagcagaacggaatggagcagaagacaattattctcataccatctgacctggcctgtcgtctgctcggccagagcatggacgagtctggactgcctcaactgacctcttacgattgcgaagtgaatgcaccaatccagggaagtcggaatctgctacagggcgaggaacttctcagggctttagaccaggtaaat

SEQ ID NO: 118535 - DNA, 2478 bp, Artificial Sequence
  derived and/or modified sequence
atggaaggggctggtggagctaatgataagaagaagatctcatcggagagacggaaagagaaaagccgggacgcagcccgctcccgccggagcaaagagtccgaagtgttctacgagctggcgcaccaactcccactgccgcacaatgtctcatcacatctggataaagcctccgtgatgcggcttaccattagctatcttcgcgtgagaaaactgctggacgccggcgaccttgatatcgaagatgacatgaaagcgcaaatgaattgtttctatctgaaagcgctggatggattcgtgatggttctcactgatgacggcgacatgatctacattagcgacaacgtcaacaagtacatggggctgactcaattcgagctgaccggacattccgtctttgacttcactcacccctgcgaccacgaagaaatgagggaaatgctcacccaccgcaacggactggtgaagaagggaaaggaacagaacacccagcgttcctttttcttgcggatgaaatgcacccttactagcagaggccggacgatgaatattaagtccgccacctggaaagtcttgcattgcactggacacatccacgtctacgataccaactcaaatcagccgcaatgtggatacaagaagccgccgatgacctgtctcgtgttgatatgcgaaccgatccctcacccatcgaacatcgaaattccactcgacagtaagacttttctgtcccggcacagcctggatatgaagttctcctactgcgacgaacgcatcaccgagctcatgggatacgagccagaagagctgctgggcaggtccatctacgaatactaccacgccctggacagcgatcatctgaccaagacccatcatgatatgtttaccaagggacaggtcacgaccggccaataccgcatgctggccaagcgaggaggttacgtgtgggtggagactcaggcaacggtcatctataacactaagaactctcagccgcagtgtatcgtttgcgtcaactacgtcgtgtcgggtatcatccagcacgatctgatcttttcgctgcagcagactgaatgcgtgcttaagcctgtggaatcctcggacatgaagatgacccagctgttcaccaaggtggaatcggaggacacctcatctctgttcgacaaactcaagaaggaacctgacgctctgaccctcctggcgccggcagcaggagacaccatcatctcactcgacttcggaagcaatgacactgagactgacgatcagcagttggaggaagtgccgctctacaacgacgtgatgctgccttcaccaaatgagaaattgcaaaacatcaatcttgccatgtcaccgctgcctacggccgaaaccccgaagccactcaggtcgagcgcagaccctgcccttaaccaggaggtggctttgaagctggagccgaatcccgagagcctcgagctctccttcaccatgccacaaattcaagaccaaactccgtccccgtcggacggatcaactagacaatcatcccctgagccgaactcgccatccgaatactgcttctacgtcgatagtgacatggtgaacgaattcaagctggaactggtggagaagctgttcgcagaggacacggaggcgaagaatccatttagcacccaagatactgacctggaccttgaaatgctcgcaccctacatcccgatggacgatgactttcaattgagatcgttcgaccagttgtcccccctcgagtcaagctctgcgtcgccagaatccgcaagcccacagtccactgtcactgtgttccagcagacgcaaatccaagagcctaccgccaacgcaactactactacggcgaccaccgacgaactcaaaaccgtgaccaaggatcgcatggaagatatcaagattctgatcgcttcgcccagcccgactcacatccataaggagactacttcagccacttcgtcgccgtaccgggacacgcagtcgcggaccgcttcaccgaatagagcggggaagggggtgattgagcaaaccgagaagtcccatccgcgctcgcctaacgtgctctccgtggccctgtcgcagcgcactaccgttccagaagaagaactgaatcccaagatcctcgctctccagaacgcccaacgaaagaggaaaatggagcatgatggatccctgttccaggcggtcggtatcggaactcttctccagcagccggatgatcacgccgccaccacctcgctgtcatggaaaagagtgaagggttgcaaatcgagcgagcaaaacggcatggaacagaaaactatcatcctgatcccatcggacctcgcctgccgcctgctcggacagtcaatggatgaaagcggcctcccccagctgacctcgtacgattgcgaagtgaacgccccgatccagggcagccggaacctgctgcagggggaagaactgttgcgcgcgctggatcaggtgaac

SEQ ID NO: 118536 - DNA, 2478 bp, Artificial Sequence
  derived and/or modified sequence
atggaaggcgcagggggggccaatgataaaaagaagattagctccgagcgaaggaaggagaagagtagggacgcagctcggtctcgacgctctaaagaatctgaggtgttctacgagctagcccatcagctgcctctgccacacaacgtgtcctctcatctggataaggcatcagtcatgagactgacaattagttacctgcgggtcagaaagctcctcgatgcaggagatctggacattgaggacgatatgaaggcccagatgaactgcttctacctgaaggccctggacgggttcgttatggtgctgacagatgacggcgacatgatatatatctcagacaatgtgaacaaatacatgggcttaacacagttcgaactcaccggtcattctgtctttgatttcacccacccatgcgatcatgaggagatgagggaaatgctgactcaccgcaacggtctggtaaaaaagggcaaagagcagaacacacagcgatctttctttctaagaatgaaatgtaccctgacaagtcggggacgcactatgaacatcaagagcgccacttggaaggtcctgcactgcaccggccacatacatgtgtacgatacaaacagtaaccaacctcagtgtggatataagaagccaccaatgacctgcctagttctgatatgcgagcctattcctcacccatctaatattgaaattcctcttgactctaagactttcctatcacgacattccctcgacatgaaattcagctattgtgatgagaggatcaccgagttgatgggctatgaacccgaggagctgcttggcagatctatttacgagtactaccacgcactggatagtgatcaccttaccaagacccatcatgacatgtttactaagggacaggtgaccactggccagtacagaatgctagccaagcgaggtggctatgtgtgggttgaaacccaggcaacagtgatttataacaccaagaattcacaaccacagtgcatagtgtgcgtgaactacgtcgtaagtggaatcatacagcacgacctgattttcagcctacagcagacagagtgcgttcttaagccagtagaaagcagcgatatgaaaatgactcaactattcaccaaggtggaaagcgaggatacatcttcactattcgacaaactgaagaaggaaccagacgccctcactctactggcccccgccgccggggacaccataatctccctggattttggctctaacgatactgagaccgacgatcagcagctggaggaggtgccactttataacgacgttatgctcccatcaccaaatgagaaattacagaatattaacctggccatgagccccctgcccaccgccgaaaccccgaagccacttaggtcaagtgcagaccctgctttaaatcaggaggttgccctaaaactcgaaccaaatcctgagtcattagaactatcctttaccatgccacagattcaggatcagaccccaagcccatccgacggcagcacaaggcagagcagccctgagcctaactctccctctgagtactgcttctacgtggacagcgacatggtgaatgaattcaagctggaattggttgaaaagctgtttgccgaagataccgaagcaaaaaatccatttagtacccaggatacagatctggatctagagatgctggccccatacatacccatggatgatgatttccaactgcgaagcttcgaccaactatcccctctagagtctagttctgctagtcccgaatcagcatccccacagtctacagtgaccgtgttccagcagacccagatacaggaacctaccgccaatgctacaacaaccaccgctacaaccgacgagctgaagaccgtcaccaaggaccgtatggaggacatcaaaatcctgattgccagccccagtcccacccatatccataaagaaacaacatcagccacctctagtccatacagagacacacagtctagaaccgccagcccaaacagggcaggaaaaggggtgatagagcagacagaaaagtcccacccaaggagtcccaacgttttatctgtggctctttcacagaggaccaccgtccccgaagaagagttgaatcctaaaatcttggccctccagaacgctcagcgaaagcgcaaaatggaacacgacggctccctttttcaggctgtcggaattggtactctactccaacagcccgacgatcatgcagctacaacttcattgtcctggaaacgtgtcaaggggtgtaagtcctcagaacaaaatggcatggaacagaaaaccattattttgattccatctgatctggcttgtcggctcctgggacagagtatggatgagtctgggctgccccaactgacttcctacgactgcgaagtcaacgctccaatccaaggttcacggaatttgctgcaaggagaggagctgctacgcgcactggatcaggttaat

SEQ ID NO: 118537 - DNA, 2478 bp, Artificial Sequence
  derived and/or modified sequence
atggagggggccggcggagcgaacgacaaaaagaagatttcctctgagcggagaaaagaaaaatccagggacgctgctcggtcaaggagaagcaaggagagcgaagtgttctacgaactcgcgcatcagctgccgctcccccataacgttagttcccatttagataaagcttcggtgatgagactgaccatctcctatctacgggttcgcaagctgctggacgccggagatctggacatagaggatgatatgaaggcccagatgaattgcttctacttgaaggcactcgatggcttcgtcatggtgctgaccgacgatggagatatgatttacatttctgataacgtaaacaagtacatgggcctgactcagtttgagctgactgggcattctgtgtttgattttacgcatccgtgcgaccacgaagaaatgcgagagatgctgactcataggaatggtctggttaagaaagggaaggagcagaacacccagcgatctttctttctcagaatgaagtgcactctgaccagcagaggtcggaccatgaatataaagagtgccacgtggaaggtgctgcactgtaccggtcatatacacgtctatgataccaattcaaaccagcctcagtgtggctataagaagccccccatgacgtgcttagtactcatatgtgaacccattcctcacccatccaacatcgaaattccactagattctaagactttcttatcgaggcattcactggacatgaagttcagctactgtgatgaacggataacagagttgatgggctatgagcctgaagagctgctggggaggtctatctatgagtattaccacgcgttggactcagatcacctcaccaagacacaccatgacatgttcaccaagggacaggttactactggccaataccgcatgctggctaagcgggggggctacgtgtgggtggaaactcaggcgactgttatctataacacgaaaaatagtcagcctcaatgcattgtatgcgtgaactacgtggtgagtgggattatccagcacgatttgatttttagtctgcagcagaccgaatgtgtgctaaaacccgtggaaagctctgatatgaaaatgacacagctgtttacaaaagtggagtcagaagataccagttctctatttgacaaactcaaaaaggaacccgatgccctaaccctactagcccccgctgcaggcgatacaattatcagcctagacttcggttccaatgataccgaaaccgacgaccaacagctcgaagaagttcctttatataatgatgtgatgctcccctccccaaacgaaaagctgcagaatataaacctcgctatgtccccactgcctaccgccgaaacgccaaagcccctccgcagtagcgcagacccagctctgaatcaggaggtggcattgaaactcgaacctaatcctgagagtctcgagttgagttttactatgccacagatacaagatcagacaccatcaccctcggacggctccacacggcaaagctcccctgaaccaaattctccgtctgagtattgcttttacgtagactccgacatggtcaacgaattcaagctggagttggtcgaaaagctctttgctgaagatacagaagccaaaaatccgttctcaacacaggacacagacctggatctggagatgctggcaccatacatacccatggacgatgatttccaactgagaagtttcgaccaactgtcccctttggagagcagctcagcatcacctgagtcagccagtcctcagtctaccgtgactgtattccagcagacacagatccaggaacctacagctaatgctactactacgaccgctacaacggacgagctgaaaacagtgaccaaagaccgaatggaggacatcaagattctgatcgccagcccttctccaacccatatccacaaagaaactacaagcgccacttcaagtccctacagggatactcaatctagaacggcttcccccaacagggctgggaagggggttatagagcagacagaaaaatcgcacccaaggagccctaatgtgctcagcgttgccctttctcagaggaccactgtccccgaagaagagctgaatcctaaaatcttggcccttcagaacgctcagagaaagaggaagatggaacacgatggaagtctcttccaggccgtggggataggcacactgctgcagcaaccagatgatcatgcagccaccaccagcttgtcctggaagcgagtgaaagggtgcaagagctccgaacaaaatggcatggagcagaaaaccattatcttgatcccatccgatcttgcctgcaggctgctcggacaatcgatggacgagtcgggcctgccgcaactgaccagctacgactgcgaggtgaatgctccaatccaaggctctcggaacctgctgcagggagaggagctgctcagggctctggatcaggtcaat

SEQ ID NO: 118538 - DNA, 2478 bp, Artificial Sequence
  derived and/or modified sequence
atggagggcgccggcggagccaatgacaagaaaaagatctccagcgaaagacggaaagaaaagtcgcgggacgcggcccgctctcgccggagcaaggaatctgaggtgttctacgaattggcgcatcaactgccgcttccgcataacgtctcgtcgcacctggataaagctagcgtgatgcggctcactatctcctacctgcgggtgcgcaagctcctcgacgcaggcgatctcgatatcgaagatgacatgaaggctcagatgaattgcttctaccttaaggcactggacgggttcgtgatggtgctgactgacgacggagatatgatctacatctccgacaatgtgaacaagtacatgggactcacgcagttcgagttgaccggacactccgtctttgacttcacccatccgtgcgatcacgaggaaatgagagagatgctgacccacagaaacgggctggtgaagaagggtaaggagcagaacactcaaagatccttcttcctcagaatgaagtgtaccctgacctcaaggggacgaacgatgaacattaagtcggcgacttggaaagtcctccactgcaccggccatatccatgtgtacgacaccaactcaaatcagccgcagtgcggatacaagaaaccgccaatgacttgcctggttctcatctgtgagccgatcccgcacccaagcaatatcgaaatcccgctggattccaaaaccttcctgtcgcggcactccctcgacatgaagttttcatactgcgacgaaaggattactgaactgatgggctacgagccagaagaactgctgggaaggtcgatctacgagtactaccacgctttggactccgaccacctcacgaaaactcaccatgatatgttcactaagggccaggtcacgaccggacaataccgcatgctggccaaacgcggcgggtacgtgtgggtggaaactcaggctacggtgatttacaatactaagaattcccagcctcaatgcatcgtgtgcgtcaattacgtcgtgtcgggaatcatccagcacgacctgatcttctcactgcagcagactgaatgcgtcttgaagccggtggagtcctcggacatgaaaatgacgcagctgttcaccaaggttgagtcagaggacacctcatcactgtttgacaagttgaaaaaagagccggacgctcttaccttgctggcaccggccgccggggacaccattatctcccttgactttggaagcaatgacactgagacggatgaccagcagctggaggaggtgcctctgtacaacgacgtgatgctgccgtcaccaaacgagaagctgcagaacatcaatctcgcaatgtcccccctgcccaccgccgagactccaaaaccactccgctcgtctgccgacccggctctgaaccaagaggtggcactgaaactggaaccgaacccggagtcccttgagctttcgttcaccatgccacagatacaggatcagactccaagcccgtctgacggatcgactcgccagtcctctccggagcctaatagcccgtccgaatattgcttctacgtggacagcgacatggtgaatgaattcaaactggaactggtggaaaagctgttcgcggaggacaccgaggccaagaacccgttctccactcaggacactgacttggatctggagatgcttgcaccatacatcccgatggacgacgattttcagctgagatcctttgatcaactcagcccgctcgagagctcgtcggcgtcccccgagagcgcctcacctcaaagcaccgtgactgtctttcagcagacccagattcaagagccgaccgcgaacgcgaccactactaccgccactactgatgagttgaaaaccgtgactaaggacagaatggaggacatcaagatcctcatcgcgtcgccgtcccccacgcacatccacaaggagactacctcggccacctccagtccatacagagatacccaatcaagaactgcctcgccgaaccgcgcgggaaaaggagtgattgaacaaactgaaaagagccatccgagatccccgaacgtgctgagcgtcgcactctcgcaaaggaccaccgtgcccgaagaagagctgaatccgaagatcttggccctccagaacgcccagcgcaagagaaaaatggaacatgacggatcactgttccaggccgtcggcataggcactctcctgcagcaaccggacgatcatgcagccaccacttcactctcctggaaaagagtgaaggggtgcaagtcctcagaacaaaacggaatggaacagaaaaccatcatcctgatcccctccgatctggcctgccgccttctgggccagtcaatggatgagtctggactgccacagctcacttcatacgattgcgaagtcaacgcacccatccagggttcgaggaacttgctgcaaggagaagaactcctgcgcgccctggatcaagtcaac

SEQ ID NO: 118539 - DNA, 2478 bp, Artificial Sequence
  derived and/or modified sequence
atggagggagccggaggcgcaaacgacaagaaaaagatttcgagtgaaagaaggaaagagaagagccgcgatgccgcccgatctcgacgctcaaaggagtctgaggtgttctatgagcttgcccaccagctgccgctgccccacaacgtctcttctcacctggataaagcctctgtgatgcgcctgactataagttatcttcgcgttaggaaactcctcgatgccggagatttggacatagaggacgatatgaaggcccaaatgaactgtttctacttaaaagccctggacggtttcgtcatggtactgaccgacgacggagacatgatatatatcagcgataacgtgaacaaatacatggggctgacccagtttgaactcacgggacacagcgtttttgattttacacacccatgtgaccatgaagagatgagagagatgctgacacatagaaatggtctcgtgaaaaagggcaaggaacaaaacactcagcgttctttcttcctgcggatgaaatgtactttgacatcacgcggaaggacaatgaatattaaaagcgccacttggaaagttctccattgtactgggcatattcatgtctacgacactaattcgaaccagccccagtgtggctacaagaagccacccatgacttgtctggttctaatctgcgagccaatccctcacccttcaaatattgaaataccgctggatagtaaaacctttctatctcgacattctttggatatgaaattcagttattgcgatgagcggataaccgagctgatggggtacgagccggaggagctgctagggcgcagtatctacgagtattatcacgcgctcgatagcgatcacctcaccaaaacccaccatgacatgtttacaaagggccaggtcacaaccggccagtataggatgttggccaagaggggcggctacgtctgggtcgagacgcaggctacggtcatctacaataccaaaaattcccagcctcagtgcatcgtgtgtgtaaactacgtcgtgtcagggataattcagcatgacttaatcttctcactgcaacagacagagtgtgtattgaagccagtcgaaagcagtgacatgaagatgacccagctttttacgaaggtggagagcgaggacacttcctccctgtttgacaagctcaaaaaggagcccgatgccttgacactactggcccccgccgccggtgataccataattagtctggattttgggtccaatgatactgaaaccgatgatcagcaattggaggaggtaccgttgtataacgacgtgatgctgccaagtcctaacgagaaactgcagaatattaatcttgcaatgtcccccctgccgaccgctgaaaccccgaaaccactaagaagcagcgcagatcccgctcttaatcaagaagtcgctttgaagcttgagcccaaccctgaatctcttgagttgagcttcaccatgccgcagatacaggatcaaacaccctctccctcagatggctcaacccggcaatcttctccagaaccgaatagcccatctgagtattgtttttatgtcgactcagatatggtaaacgaattcaaactggaattggttgagaaattgtttgccgaagacacagaggctaaaaatcccttctcaacacaggataccgacttggatctggagatgctggctccctacattcctatggacgatgactttcaactcagatctttcgaccagctgtcccccctggagtcaagctcggccagtcctgaatcggcgtctccccagagtaccgtaaccgtgtttcagcaaacacagatccaggagcctacggcaaatgcaacaacgacgaccgctacaaccgatgagctgaagacggtgactaaagacaggatggaagacatcaagatactaatcgctagcccttctccaacacacattcacaaggagaccacaagcgccacaagttccccttatagggatacacagtccaggaccgccagcccaaatagggctggaaagggggtgatcgaacagaccgagaagagccaccctcgcagtcctaatgtactatccgtggcgctctctcaacgaaccaccgtaccagaagaagagctgaatccgaaaatacttgctctccagaatgcccagcggaagcgcaagatggagcacgacggaagcctttttcaggccgttggcattgggactctgctgcagcaaccagatgaccatgccgccactacttctctaagttggaaacgcgttaaggggtgcaagtcgagcgaacagaacggaatggaacaaaagactatcatcctcatcccttctgacttggcctgtcgcctcctgggacaaagcatggatgagagcggtctaccccaattgacttcctacgactgtgaggtgaacgcacccattcagggtagccgcaatttgctgcaaggtgaggagctgctcagggcgctggaccaagtgaac

SEQ ID NO: 118540 - DNA, 2478 bp, Artificial Sequence
  derived and/or modified sequence
atggagggtgccggaggcgccaacgacaagaagaagatcagctccgagagacggaaggagaagtcgcgcgacgccgcccggtcaaggcgctctaaagaatcggaagtcttttacgaactcgctcaccagcttccgctcccccataatgtgtccagccatctggacaaggcctccgtgatgcggctgactatttcataccttagggtgagaaaattgctcgatgccggggacctggacatcgaagatgacatgaaggctcagatgaattgcttctacctcaaggccctggatggattcgtcatggtgctcactgacgacggggacatgatctacatcagcgacaatgtcaataagtacatgggattgacccagttcgaattgaccggccattcagtgttcgacttcactcatccgtgtgatcacgaagagatgagagagatgctgactcatcggaatggacttgtcaagaagggcaaagaacaaaacacccaacggtccttcttcctgcgcatgaaatgcactctgacctcaaggggccggacgatgaacatcaagtccgcgacttggaaggtgctgcactgcaccggacatatccatgtctacgatactaactccaaccagccccaatgcggctacaagaagccgccaatgacttgcctggtgctgatttgtgaaccaattccgcatccgagcaatatcgagatcccactcgactcgaaaactttcttgtcccgacactcgctggatatgaagttttcatactgcgatgagcgcatcactgaactgatgggatacgagccggaagaactcttgggccgcagcatctacgaatactaccacgctctggactcggaccatctgaccaagacccaccacgacatgttcaccaaaggacaggtcactactggacagtaccggatgctggcgaaacggggcggatacgtgtgggtggaaacccaggccaccgtgatctacaatactaagaattcccagccgcaatgcatcgtgtgcgtgaactacgtggtgtcagggatcatccagcacgacctgatcttcagcctccagcaaacggaatgcgtgctgaagcccgtcgaaagctccgacatgaagatgacccagcttttcactaaggtcgagtcggaggacacctcgtcgctcttcgacaagctcaagaaagaaccggacgcgctcacccttcttgcgccagcggccggagacaccattatctccctcgacttcggatcgaatgacactgaaacggatgatcaacagctcgaagaagtgcctctttacaatgatgtgatgctgccgtcacccaacgagaagttgcaaaacatcaatttggccatgagcccgctgccgactgctgagacgcctaagccactgagatcctcggcagatccggcgctcaaccaggaggtcgctttgaaactcgaaccgaaccccgaatccctggaactcagcttcaccatgcctcagatacaagaccagacgccatcgccatcggatggttcgacccgccaaagctccccggagccgaactcgccgtcggagtactgcttctacgtggactcggacatggtgaatgagttcaagctggaactcgtggagaagctgtttgctgaagataccgaggccaagaacccgttctcaacgcaggataccgatctcgacctcgaaatgctggcgccctacatccctatggacgacgacttccaactccggagcttcgaccaactgtctccactggagtcatcttccgcgagcccggaaagcgccagcccacagtcgaccgtgacggtgttccagcagactcaaatccaagaacccaccgccaacgccactacgactaccgccactaccgacgaactgaaaactgtcactaaggacaggatggaggacatcaagatcctgatcgcatctccttcgcctacccatatccacaaggagactacttccgccacttccagcccgtatagggacactcagtcgcggaccgcctcgccgaatcgcgccgggaaaggagttattgaacagactgagaagtcccatccaagatccccaaacgtgctgagcgtggcgctgtcccaaagaaccactgtcccggaagaggaactgaaccctaagatccttgctctgcagaacgcacagcgaaaaagaaaaatggagcacgatggatcactgtttcaggctgtggggatcggaactcttcttcagcagccagatgaccacgcagcaaccacctcgctgtcgtggaaaagagtcaaggggtgtaagtcctccgaacagaacggaatggagcagaaaaccatcattctgattccaagcgatttggcatgccggcttctgggacagtcaatggacgagtcggggctccctcagcttaccagctacgactgcgaggttaacgcgccgattcagggatctcgcaatcttctccaaggtgaggagctgctgcgggccctcgaccaagtgaac

SEQ ID NO: 118541 - DNA, 2478 bp, Artificial Sequence
  derived and/or modified sequence
atggaaggtgccggcggagccaacgacaagaagaagatatcgtcggagagaagaaaggagaaatcgcgggacgcagcaagatctcgaaggtccaaggaatcggaagtgttttacgaattggcccaccagcttccactgccacataatgtatcctcccatttggataaagctagcgtgatgaggctgactatatcctacctgcgggtccgaaaactgctggacgctggcgacctggacatagaagatgacatgaaggcacaaatgaactgtttttacctgaaagcgctggatgggtttgtcatggtgctgactgatgatggagatatgatttacatcagcgacaatgtgaacaaatacatgggacttacccaatttgagctgaccggacattcagtgtttgatttcacccatccttgtgatcacgaagaaatgagggaaatgctcactcaccgaaacggacttgttaagaaaggcaaggagcaaaatacccagcgttcattctttctccgtatgaagtgtacgttgactagcagaggacgtactatgaacattaagtcggcgacctggaaggtgctgcattgcacgggacacatccacgtgtacgacaccaacagcaaccagcctcagtgtggttacaagaagccgccaatgacctgcctggtgctgatctgtgaacccatcccacatccttctaatatcgaaatcccattggactccaaaaccttcctgtcacgccactcgcttgatatgaagttttcttactgtgatgaaaggatcactgaacttatgggttacgagcccgaagaactgcttgggcgctcaatttacgagtactaccatgcacttgatagcgaccatctgactaaaacccaccatgatatgtttaccaagggacaagtgaccaccgggcagtatcggatgctcgccaagagaggtggatacgtgtgggtcgaaactcaggcaactgtgatttacaatactaagaattcgcaacctcagtgcatagtgtgtgtcaattacgttgttagcggcattatacaacatgacctgattttctcactgcagcaaaccgagtgtgtcctgaaaccagtggaatcgagcgacatgaagatgactcaactctttaccaaagtggaatccgaggacactagctcccttttcgataagctgaagaaggagccggatgcacttacgcttctcgctcccgcggccggagacaccatcataagccttgattttggtagcaatgataccgaaaccgatgatcaacagctggaggaagtgcctttgtataacgacgttatgcttccttcccctaacgaaaagctgcagaacatcaaccttgcgatgtcgcctctgccaactgcagaaactccgaagcctcttaggtcgtctgcagatcctgcactcaaccaagaagtggctctgaaactcgaaccaaaccctgaatcccttgaacttagcttcaccatgccacaaattcaggatcagaccccttcgccttcagacggatcgaccagacaaagctcgcctgaacctaatagcccaagcgagtactgtttttacgtggattcagacatggtgaacgagtttaagctggagttggtggagaagctgttcgctgaagataccgaagccaagaatcctttttccactcaggacactgatcttgaccttgaaatgcttgcaccttacattccaatggatgatgattttcagctgcggtcgttcgaccaactgagccctctcgaatccagctcggctagccccgaatcggcaagccctcagtccacggtgactgtgtttcaacagacccagattcaggaaccgaccgcaaacgcaactacgaccactgcaaccactgatgagctcaagaccgtgaccaaggataggatggaagatatcaagattcttatagctagcccgtcgcctacccatatccataaggaaaccacttcggcaacgtcatccccataccgagatactcaatcccgaacggcctcgccaaaccgcgcaggaaagggggtgatcgagcagactgaaaagagccaccctagatcaccaaatgtgctttcggttgccctgagtcagagaaccaccgttcctgaggaagaactgaatcccaaaattctcgccctccagaacgcacaaaggaaaagaaagatggaacacgatggtagccttttccaggcagttggcattggaaccttgctgcaacaaccagatgaccatgctgccaccacctcgctgtcgtggaaacgggtcaagggatgcaagtcaagcgaacaaaacggaatggagcaaaagactatcattctcatcccttcagatcttgcatgcagacttcttgggcaatcaatggatgagtcgggccttcctcaacttactagctacgattgcgaagtgaacgctcccattcagggatctcgaaaccttctccaaggcgaggaactgctccgggccctcgaccaagtgaac

SEQ ID NO: 118542 - DNA, 2478 bp, Artificial Sequence
  derived and/or modified sequence
atggaaggcgcaggaggtgctaacgataagaaaaagatttcttcagaacgtcgaaaagagaaaagtcgtgacgcagcgcgttcacggcgtagtaaggaatccgaagtgttctacgagctagctcatcagctaccgcttccccacaacgtgtcttcacatttggataaagcgtctgtcatgagactgaccatatcatacttaagagtccggaagttgcttgatgctggggatttggatatcgaagacgacatgaaagcacagatgaattgtttctatttgaaagcacttgatggattcgtgatggtgcttaccgatgatggtgacatgatctatatttctgataatgtaaataaatatatgggattgacgcaattcgaattaacaggccactctgtgttcgatttcacacacccttgcgatcacgaggaaatgagggaaatgttgacacaccgaaacggtttagttaaaaaaggcaaggaacaaaatacacagagatctttttttcttcgtatgaaatgcacactaacgtcccgcggaagaacaatgaatattaaatctgctacatggaaagttctacactgcacgggtcacattcatgtctacgatactaactctaatcagccgcaatgcggttataagaagccgccgatgacttgcttggtgttaatttgcgagcctattccacatccgtccaatatcgagattccattggattccaaaactttcttgtctcgacacagcttggatatgaaattcagttactgcgatgaacgaattaccgagcttatgggctacgaacctgaggaacttttgggcagatctatctatgaatattatcatgcacttgatagcgatcacttgactaagacccatcatgatatgtttacgaagggacaagtcactactggtcaatatagaatgctggcgaaacgtggaggttatgtctgggttgaaactcaggccactgtgatctacaacacaaagaactctcagccacaatgtattgtttgcgttaactatgttgtatccgggattattcagcacgatcttattttcagtctacaacaaaccgagtgcgtcttgaagccagttgaatcaagtgatatgaaaatgactcagctttttacgaaagttgaaagtgaagacacgtcgtcgctctttgacaaactgaagaaagaaccagatgctctaacattgctcgcaccagcagctggtgacactattatttcactcgattttggatccaacgataccgagaccgatgatcaacagcttgaagaggtgccgctctacaacgacgtcatgttacccagcccaaatgagaaactccaaaacattaatctcgctatgtcccctctacctacagctgaaactccgaaaccactcaggtcaagtgctgatccagctttgaaccaagaggtcgccctcaaactggaacccaatccagagtcgctcgaattgtcttttacaatgccacaaatacaagaccaaaccccatcaccctcagacgggtcaacacgacagtcgtctccagaaccaaatagtccatcagaatactgtttctatgttgatagtgatatggtcaatgaattcaagcttgagttggttgagaagttgttcgctgaggatacagaagcaaaaaaccctttcagtactcaggacacggacctggacttggaaatgctggcgccatacatcccgatggacgatgacttccaattacggagtttcgatcagctgagcccattagagtcatcctctgcatctcctgaaagcgcttctcctcagtcaacggttacggtgttccaacaaacccagattcaagaaccgacagctaatgctacaactactacggccaccacagatgaactgaaaacagttacaaaagatcggatggaggatattaagatcttgattgcatcgccctcacccacccatatacataaagaaactacgagtgccacaagctctccttatcgggatacacaatcccgaactgcatcaccaaatagagctggcaagggagttatagagcaaacggaaaaaagccacccaagatcgccaaatgtcctgtccgtagctctttctcaaagaactacagttccagaggaagaattaaatccgaagatcctggcacttcaaaacgcgcaaagaaaaagaaaaatggaacatgacgggtcactgttccaggctgttggcattgggacacttcttcaacaacctgatgaccatgctgccacaactagcctctcatggaaacgtgttaagggatgtaaaagctcagaacaaaatggaatggagcagaaaacgattatattgattccatcagacttggcttgcagattgttggggcaatctatggatgaatcaggactcccacaactcacctcctacgactgcgaagttaacgctccaattcagggatcaagaaacttgttgcaaggagaggaattgttgagggcgttggaccaagttaac

SEQ ID NO: 118543 - DNA, 2478 bp, Artificial Sequence
  derived and/or modified sequence
atggagggggccgggggggcgaatgataaaaagaagatttcctccgagaggcggaaggagaaatctcgagatgccgctcgctcccgcagaagtaaagaaagcgaagtcttctatgagctcgctcaccagttgcccttgccgcacaacgtcagctcccatttagacaaggcctccgtgatgcgtctgaccatctcttatctgagagtgagaaagcttctggatgccggtgacctcgacatcgaggatgacatgaaagcacaaatgaattgtttctacttgaaggccctcgacggattcgtgatggtgctgactgatgacggcgacatgatttatatctctgacaatgtgaacaagtatatggggcttacacaattcgaacttaccggccatagtgtctttgatttcacgcacccgtgtgaccacgaggagatgagagagatgttgactcaccgcaatgggctggtgaagaagggtaaggaacagaatacacagcgaagcttctttctgcgaatgaaatgcacactgacttcaaggggccgaaccatgaacattaagtctgcgacatggaaagtcttgcactgtacgggccacatccacgtctatgatacgaattctaaccagccacagtgcggctataagaagccgccgatgacttgcctcgtgctgatttgcgaacccattccacaccctagcaacatcgaaattcccctggattctaagacttttctctcacggcattctctcgatatgaaattctcatactgtgacgaaaggataacagagctaatgggatacgagcccgaagagcttctcggtcggtcaatttatgagtattatcatgctctcgactcagatcatcttactaagacccatcacgacatgtttaccaaaggacaagtcactacgggccagtataggatgctcgctaagcgcgggggctatgtttgggtggaaacacaagccactgtgatctataacaccaaaaatagccagccccagtgtatcgtgtgtgtgaactacgttgtatccggcatcattcagcatgacctgatcttcagcctacagcagacagagtgtgtcctgaaacctgtagagtcgagtgatatgaagatgacacagctatttaccaaggtcgaaagcgaggatacttcatctctgtttgacaagctgaagaaggagccagatgcacttacgctgctggcccctgccgcgggcgatactattatctcactggattttgggtccaatgatactgaaacagatgaccagcaacttgaagaagtccctctgtacaacgacgtcatgcttccaagcccgaacgaaaagctccagaacattaacctcgccatgtctccccttccaaccgccgaaacgcctaaacctctccgatcttctgctgatcccgcccttaaccaggaggtcgctctgaaactggagccaaaccctgagagtctcgaactgtcttttaccatgccgcaaatacaagatcaaacaccttccccctctgacggtagcacaaggcagtcttccccggagcctaattcaccttctgaatattgcttctatgtggactctgatatggtgaacgaattcaaacttgagctcgttgagaagctgtttgcagaagatactgaggctaagaatcccttctccacacaggatacagacttggacctcgagatgctggcaccatacatccctatggacgatgacttccagctccgctcttttgatcagctcagcccactcgaatcttcatccgcgtctccagaatcagccagccctcagtcaactgtaacagtctttcagcagacccagatccaggagccaacagcaaatgcaacgactaccacagcaactactgacgagttaaaaaccgtgacaaaagatagaatggaggatattaagatcctcatcgcatctccatctcccacccacatccacaaggagaccacctccgccacaagctccccttatcgcgacacccagtctcggaccgcaagccccaaccgagctggaaagggcgtgatagaacagactgaaaaaagccacccaagatccccaaacgtcctgagcgtcgctctcagtcagaggacaacagtgccagaagaagaactcaacccaaagattctggccctgcaaaatgcccagcgcaaacggaagatggagcatgatggatcattattccaggctgtgggaattggcactctgttgcagcagcccgatgaccatgctgccaccacctctctgagctggaagcgggtaaagggctgtaagtcctctgagcagaacggcatggagcaaaagaccatcatccttatcccttctgatcttgcatgccggctcctgggccaatccatggatgagtccggcctaccccagctcacctcttatgactgtgaggtgaacgcaccgatccagggtagtcggaacctcctgcaaggagaggagctgctcagagccctggaccaagtgaat

SEQ ID NO: 118544 - DNA, 2478 bp, Artificial Sequence
  derived and/or modified sequence
atggaaggcgctgggggcgccaacgataagaagaagatctcaagtgagcgccgtaaagagaagagcagggacgcagcccggtcaaggcggagcaaagagtccgaagtgttttatgagctggcccatcagcttcctctgccccacaatgtgtcatcacatctggacaaagcaagcgtcatgcggttaactatctcctatcttcgggtgcgcaagcttttagatgcgggcgatctggatatcgaggatgacatgaaagcccaaatgaattgcttctatctcaaggccttagacgggtttgtgatggtactgactgatgacggcgatatgatctacataagcgataatgtcaacaaatatatgggcttaactcagtttgagctgactggccattctgtgttcgacttcacccatccgtgtgaccacgaagaaatgagggagatgttgacgcacagaaacggccttgtgaagaaaggcaaggagcaaaacactcaacgttccttctttctccggatgaaatgcactttaacttcaagaggtcgaacgatgaatattaaatccgcaacctggaaggtactccattgcactggacacatccatgtctatgacaccaacagtaatcaaccgcagtgtgggtacaagaagccccccatgacctgcttagttctgatttgcgaacccattccacatcctagtaacatagaaatcccattggacagcaagacttttcttagccgccacagtctggacatgaaatttagctattgcgatgagagaattacagagctgatgggatacgagcccgaggaattactgggcaggtccatatatgaatactatcacgccctggactctgaccacctgactaaaacgcaccatgacatgttcacaaagggccaagtaacaaccggccagtatcgcatgctggcgaaacgcggcggttatgtttgggtggagactcaggccacggtgatatataatactaagaactcccagccccagtgcatagtgtgcgttaactatgtggtgtctggcattatacaacatgacctgatcttctcactgcagcagacggagtgtgtattgaaacccgttgaaagctcagacatgaaaatgactcagctgtttaccaaagtggaatcagaggacactagctctctgttcgacaagctcaagaaagaacctgacgccctgacgcttctggctcctgccgctggagatacaatcatctctttagattttggtagtaacgataccgaaacagacgaccagcagctcgaagaggtaccactgtataatgatgtcatgttgccttcccccaacgaaaaactgcaaaatattaacctagcgatgagcccattgccaaccgctgaaacccccaaacctttacggtcttccgccgatcctgcactcaatcaggaggttgcgctgaagctcgaacccaatcccgagtccctcgagctgagctttaccatgccgcagattcaggatcagacaccaagtccttctgacgggtcaacccgtcagtcgtcaccggagccaaattcaccttcggagtattgtttttacgtggactcggatatggtcaatgagttcaagttggaactggtggagaagttgttcgctgaggatacagaagcaaagaatcccttttcgactcaggataccgatcttgatctggagatgttagctccatatattccgatggatgatgacttccaattgcgctcatttgatcaactgtctccactggagtcctcctctgcttcccctgagtccgcatcccctcaatctactgtcaccgtatttcagcagacacagattcaagagccaacggctaacgctactactacaacagctacaacagacgaattgaagaccgtgaccaaggaccgaatggaggacattaagattctcatcgcatcccccagccccacacatatccacaaggagacaacatccgctacatcatctccatatcgggatacacagtctcgcaccgcatcacctaatagagccggcaagggggtgattgaacaaaccgagaagagccatccgcgaagtccgaacgtgctcagtgtagctctttctcagaggaccacagtgcccgaggaagaactgaatcccaaaattttggccctccaaaatgcacagcgtaagcgcaagatggaacacgacggatctcttttccaggccgttggcataggcaccctgctgcagcagcccgacgaccatgctgccaccacttctctaagttggaagagggttaagggatgcaagagcagtgagcagaacggcatggagcaaaagacgataatcttaataccatcagatttagcctgccgccttcttggccagtctatggacgaatctggactgccccagctgacctcctacgattgtgaggtgaatgctcctatccagggcagcaggaacctgctgcagggcgaagagctcctgagggcccttgaccaggtgaat

SEQ ID NO: 118545 - DNA, 2478 bp, Artificial Sequence
  derived and/or modified sequence
atggaaggagcaggaggagcgaatgataagaagaagatttccagcgagcgtaggaaggaaaagtcccgtgacgcagcacgctcccgtcgttccaaggagtcggaggtgttctacgagcttgcgcatcaactcccccttccacataatgtgtccagccatctggataaggctagcgtcatgcggctcactatctcgtaccttagggtgaggaagctgctggatgcgggtgacctggatatagaagatgatatgaaggcccagatgaattgtttctacctcaaggcccttgacggtttcgtgatggtgctcactgatgatggtgatatgatctatatcagtgataatgtcaacaagtacatgggcctgacccagtttgagcttaccggccactccgtgtttgattttacccatccatgtgaccacgaagagatgcgggagatgcttacccatagaaacgggctggtcaaaaagggcaaggagcagaacacccagcggagcttttttctgaggatgaagtgcaccctgaccagccgaggtcggactatgaacattaagtcggcaacttggaaggtgcttcattgtactgggcatattcacgtgtacgacaccaactccaatcagccacaatgcggatacaagaagccaccaatgacgtgcctggtgcttatttgtgaacctattccgcatccgtcaaatatcgaaatccctttggatagcaagacttttctctcgcgccattcccttgacatgaagttctcgtactgtgatgaacgtattaccgaactgatgggatacgaacctgaagaactgttgggacggtccatatacgaatactaccacgctctggactcggatcatctgaccaagacccaccatgatatgtttaccaagggtcaggtcaccacggggcaataccgcatgctggcaaagagaggtggctacgtctgggtggaaactcaggccacggtgatttacaacactaagaactcacagccacagtgtatcgtttgtgtcaactacgtggtgtcagggattatacagcatgatctgatcttttccttgcagcagactgaatgtgtccttaagcctgtggaatcgagcgacatgaaaatgactcaactctttactaaagtcgaatcggaggacacgagcagcctctttgataagctgaagaaagaacctgatgccctcactctgctcgcaccagccgcaggggacactatcatttcgctggacttcggctccaacgacaccgaaaccgacgatcaacagctggaggaagtccccctctacaatgatgtgatgcttccatcgcctaatgaaaagctccaaaacatcaacctggccatgtcgcctcttcctactgcagaaactccgaagcctctgcgatcatcggcagatccagcactgaatcaggaggtggcccttaaactcgagcctaaccctgagtcactcgagctctcctttactatgcctcaaatacaggatcagaccccctctccatccgatgggagcactagacagtcgtcccctgaaccaaacagcccttcggaatattgcttttacgtggattcagatatggtcaacgagttcaagctggagctcgtggaaaagctgtttgcagaggacactgaagcaaagaaccccttttcgactcaggatactgatcttgatcttgagatgttggcaccatacattccgatggacgatgatttccagttgaggagctttgaccagctttcgccccttgagtcatcgtccgcatcgcctgagagcgcctcgcctcaatccacggtcaccgtctttcagcaaactcaaattcaggaaccaacggccaacgcaactactaccaccgcaaccacggacgaactgaaaaccgtgactaaagatcgcatggaagatatcaagattctcatagcatcaccatcgccaactcacattcacaaagaaactacctccgcgacgtcatccccctatagagatacgcaatcccgcactgcgtcacctaaccgtgcaggaaaaggagtcatcgaacagactgaaaagtcacatcctaggtcgcctaacgttcttagcgtcgccctgtcacaaagaaccaccgtgcccgaagaggagctcaaccccaagatcctcgctctgcaaaacgcacagagaaagcggaaaatggaacacgatggatcgctgtttcaagcagtgggaattggtactctgcttcaacagcctgacgatcacgcagcaaccacgtccctttcttggaagcgtgtgaagggctgcaagtcctcggagcaaaacggaatggaacaaaagacgattattctgattccctccgatctggcatgcagactgctggggcaatccatggacgaatcgggactgccacaactgacgtcctacgattgtgaggtgaatgctccaatccaaggatcacgcaatctccttcagggtgaagagcttctgagagcgcttgatcaggtcaac

SEQ ID NO: 118546 - DNA, 2478 bp, Artificial Sequence
  derived and/or modified sequence
atggaaggcgcaggtggagctaacgataagaaaaagatcagctccgagagaagaaaggaaaagagccgggatgccgcccggagccgccggagcaaggaatccgaggtgttctacgaactggctcatcaattgcctctgcctcacaacgtgtcctctcaccttgataaggcttcggtgatgagactgactatctcctacctgagagtcagaaagctccttgacgctggtgatctggatatcgaagatgacatgaaagcccagatgaactgtttctacctcaaggccctcgacgggttcgtaatggtgttgaccgatgacggagacatgatctacatcagcgacaacgtgaacaagtacatgggcctcactcagtttgaactgaccggccactcggtgttcgacttcactcatccatgtgatcatgaagagatgagagaaatgctgactcatcgtaatggcctcgtgaaaaaggggaaggagcagaacactcagcggtcgtttttcctgcgcatgaaatgcactcttacctcgagagggcggaccatgaacattaagtcggccacttggaaggtgctccactgcactgggcacatccatgtgtatgacactaactcaaatcagccgcagtgcgggtacaaaaagccgccaatgacctgtctggtcctcatctgcgagccaatcccgcaccctagcaacatcgagatcccattggactcgaaaacttttctgtcccgccactcactggacatgaagttctcgtattgcgatgaacggattactgaacttatgggatacgagcctgaggagctcctgggaagatcgatctacgaatactaccacgccctggatagcgaccacctcactaagacccaccatgacatgttcaccaagggccaagtgactaccggacaatacaggatgcttgcgaagcgcggaggatacgtctgggtcgaaactcaggccactgtgatatacaataccaagaactcgcaaccccaatgcatagtctgcgtgaactacgtggtttcagggatcattcagcacgatctgatcttctccctccagcagaccgaatgcgtccttaagcccgttgaatcgtcggacatgaagatgacccaactgttcactaaggtcgagtcggaggacacctccagccttttcgataaacttaagaaagaaccagatgctctcactcttttggcaccggctgccggggatactatcatcagcctcgacttcggaagcaatgataccgagactgatgatcagcagcttgaagaagtgccactgtacaacgatgtgatgttgccctcaccaaatgagaaactgcagaatatcaatctggccatgtctccactccctactgctgagactcctaagccgctgcgctcaagcgccgatcctgccctcaatcaggaggtcgcccttaagctcgaaccgaacccggaaagcctcgagctgtccttcaccatgccacagatccaagaccagaccccgtccccgtctgacggatccactcgccagtcatcgccggagccaaattcgccttcggagtattgtttctacgtggactccgatatggtcaacgagttcaaacttgagctggtggagaagctgttcgcggaagataccgaagctaagaatccctttagcacccaggacaccgacctggacctggaaatgctcgcaccgtacatcccaatggatgatgattttcaactccggagcttcgatcaattgtcaccgctggaatcttcatccgcctcgcccgaatccgcgtcacctcagtccaccgtcacggtgttccaacaaacccaaatccaagaaccgactgcgaatgccactaccaccaccgcgactaccgatgaacttaagaccgtgactaaggacagaatggaagatatcaaaatcctgatcgcctcgccatcacccacccacatccacaaagagactacttccgccacttcatcgccctaccgggatacccagtcaaggacggcgtcaccgaacagagccggcaagggagtgatcgagcaaaccgaaaaatcccatccccggtcgcccaatgtgctgtcggtggctctgtcgcaaaggaccaccgttccagaggaggaactcaacccgaagatcctggcacttcagaatgcgcaacggaaacgcaagatggaacatgacggttccctgtttcaggcggtcggcattggcacgctcctgcagcagccggacgaccatgcagcgaccaccagcctctcctggaagcgggtgaagggatgcaagtcaagcgaacagaatggaatggaacagaaaaccatcatcctcattccgagcgacttggcctgccggctgctgggccaatcaatggacgagtccggcctgccacaattgacttcgtacgactgtgaagtgaacgcaccaatccagggcagccgcaacctcctccagggggaagagctgctgcgggcattggaccaggtgaat

SEQ ID NO: 118547 - DNA, 2478 bp, Artificial Sequence
  derived and/or modified sequence
atggaaggagctggaggagcaaacgacaaaaagaagatttcctccgagcggagaaaagagaagagcagagatgcggcacgtagccggcggtccaaagaatctgaagtcttttacgaattggcgcatcaactcccattgccgcataatgtgtcaagccacctggataaggcatcggtcatgcgtcttactatctcttaccttcgggtcaggaaacttctcgatgcaggagatctcgacatcgaagatgacatgaaggctcagatgaactgcttctacctgaaggcactcgacggatttgtgatggttttgacggatgatggtgacatgatctacatcagcgataacgtcaacaagtacatgggccttactcagtttgaactgaccggccatagcgtctttgattttacccacccatgtgaccatgaagaaatgcgggagatgctgacgcaccggaatggactggtgaagaagggtaaggagcaaaacactcagaggtcctttttcctgagaatgaagtgcaccctgacctcgagaggtcggactatgaacattaagtccgcaacctggaaggtccttcattgtaccggtcatatccacgtgtacgacactaactccaatcaacctcagtgtggttacaagaagcccccaatgacttgccttgtgctgatttgtgagccaattccccatccctcaaacattgagatcccattggacagcaagacttttctgtcccgtcactctctggacatgaagttttcctactgcgacgagcgaattactgagcttatgggatatgagcctgaagaacttcttgggagatcaatttacgaatactaccacgctctcgattcggaccatctgaccaagactcatcacgatatgtttactaagggacaggtcaccaccggtcagtaccgtatgttggcaaaacgaggaggttacgtatgggtggaaacgcaagcaaccgtgatttacaacaccaaaaactcccaacctcaatgcatagtctgtgtcaattatgtggtgtccggcatcatccagcacgatcttatcttcagcctccagcagaccgagtgcgtgctcaagccagtggaaagcagcgacatgaagatgactcagctttttactaaggtggaatcggaggacacttcgtcgctgtttgataagctgaagaaagaaccggatgctctgactctgcttgccccagcagcaggtgacaccatcatttcgctcgactttggctcgaatgataccgaaactgatgatcagcagctggaagaagtgcccctttacaacgacgtgatgctgccctcccctaacgaaaaacttcagaacattaacctggcgatgtccccactgccaaccgctgaaacccctaagcctttgagatcgtcggcagatccggccctgaatcaagaagtcgcgctcaaactcgaaccaaatccggaatccctcgagctgtcgttcactatgcctcagatacaggaccagactccttcaccatccgatggatccaccagacaatcctcaccagaacccaactcgcctagcgaatactgtttttacgtggattcagatatggtcaacgaattcaaattggaactggtggaaaagctgtttgcggaggataccgaagcaaagaatccattcagcacgcaagatactgatcttgacttggagatgctggcgccctacattcctatggacgacgattttcaactgcggagctttgatcaactttcccctcttgaatcgtcgagcgcatcgcctgaatccgcatcgcctcagtcaactgtcaccgtgttccaacagacccaaattcaagaacctactgcgaacgcaaccaccaccacggctactactgatgagctgaaaactgtgactaaggacagaatggaggacattaagattcttattgccagtccttccccaacgcatattcataaggaaactacttcagcaacttcgtcgccttaccgcgatacccaatcacggaccgcgagcccaaatcgcgccggtaagggtgtgatcgaacaaaccgagaaatcgcatcctcgttcgccaaatgtgctgtccgtcgcactgtcgcagagaaccactgtgcccgaggaagaactgaacccaaagatcctggcattgcaaaacgcccaaaggaagagaaaaatggaacatgatggctcactttttcaggctgtgggtattggcacgctcttgcaacaacctgacgatcacgcggcaaccacgtcactctcgtggaagcgtgttaaagggtgcaagagctccgaacagaacggcatggagcaaaagaccattattctcattccgtctgatctggcttgtcggcttctgggtcaaagcatggacgaatcgggcctgccacaactgacctcatatgattgtgaagtgaatgctccaatacaaggctcacggaacctgctgcaaggtgaggaacttcttcgcgcccttgatcaggtgaac

SEQ ID NO: 118548 - DNA, 2478 bp, Artificial Sequence
  derived and/or modified sequence
atggaaggcgctgggggcgcaaacgataaaaagaagatttcttcagagcgccgaaaagagaagtcccgggatgcagcacggtctagacgctcgaaggagtctgaagttttttacgagctcgcccatcagctgcctctgccacacaacgtgtccagccaccttgataaggcctctgttatgcggttaacaatctcatatctgagggtccgaaaactgctcgatgcaggggaccttgacatagaagacgatatgaaggcgcagatgaattgtttttatctcaaagctctggacggatttgtgatggttctgactgacgacggagacatgatctatataagtgataatgtcaacaaatacatggggttgactcagttcgagctgacgggccactctgtattcgacttcacccacccctgcgatcatgaggagatgagagagatgctcacacacagaaatggactggtgaaaaagggcaaggagcagaatacccagcgctctttctttctgagaatgaaatgtactcttacctcgcgcgggagaacaatgaacatcaagtcagctacttggaaagtgctacactgcaccggccatattcacgtgtacgacacaaactctaaccaaccccagtgtggttacaagaaaccccccatgacttgtctggtcctgatatgcgagcccatccctcatccaagtaacatcgagatcccattggactctaagaccttcttgtctagacactcactcgatatgaagttctcctattgtgatgaacgaatcacagaactcatgggatatgagccggaagagctgttagggaggtccatttacgagtattaccatgccctggattccgaccaccttaccaagacacatcacgatatgttcaccaaggggcaggtgaccacaggccaatacagaatgctggcgaaacgaggcgggtacgtttgggttgaaacccaagccacagttatctataacaccaagaactctcagcctcagtgcatcgtgtgcgttaattatgtcgtgtccgggatcatacagcacgatctgatttttagtctgcagcagaccgaatgtgttctgaaaccggtggagagctccgatatgaagatgactcaactattcaccaaggttgagagcgaagatacttcatccctgtttgacaagttgaagaaagagcccgacgcgttgaccctgctggctcccgccgcaggcgatacaatcatctcattggactttggctccaacgacacagaaacagatgaccagcagctggaagaagtgcctttgtacaatgatgtcatgctgccatcacctaacgagaagctgcagaacattaaccttgctatgagtccactgcctactgctgagactcctaagccgctgcgctctagcgctgaccccgccctcaatcaagaggtggctctgaagctcgaaccaaatccagaaagcttggagctgtcttttacgatgccccaaatccaggatcagacccctagccccagcgacggcagcactcggcagagcagtcccgagcctaacagcccctccgagtactgcttttacgttgatagcgacatggtgaacgaatttaaactggagctggttgagaagctcttcgcagaagacacggaagcgaaaaaccctttctcaacccaagacactgacctggatctggagatgcttgccccttacatcccaatggacgacgactttcagctacggtcctttgatcagctgtctccacttgagagttccagcgctagtccagaatcagcctcaccccaatcaacagtgactgtgttccagcagacccagatccaggaacctacggccaatgcaaccactaccactgcaaccacagatgaactcaagaccgtgacaaaggatagaatggaagacattaagattctcattgcctccccatcgcccacgcacatacataaagagacaacgtcggcaacgtctagtccctaccgtgatactcaatctcgcactgcctctccaaaccgcgcagggaagggggtgatcgaacagactgagaaatctcacccacgctcgcctaatgttctgagcgtagccctgagtcagaggaccaccgtgcctgaggaggaattaaatcctaaaatccttgctctccagaacgctcagaggaaacgaaaaatggaacatgatggctccttgttccaggctgtcggaataggaactcttcttcagcagccagacgaccacgccgctaccacttctctatcctggaagcgggtcaagggctgtaagtcgtccgagcagaatgggatggaacagaagaccatcatcctcatcccatctgaccttgcctgccgattgcttggtcagtccatggatgagtccggtcttcctcagctgacaagctacgactgtgaggtcaatgccccaatccagggctcacgtaacctcctgcagggagaagagctactcagagcacttgaccaggtcaac

SEQ ID NO: 118549 - DNA, 2478 bp, Artificial Sequence
  derived and/or modified sequence
atggaaggagcgggaggggcaaacgataaaaagaagatatcatcggagcggcgaaaggaaaagtcccgtgatgcagcacgatctcgccgctctaaggagagtgaagttttctacgaactcgcacatcagctgccgctgccgcacaatgtatcctcccacctggataaagccagcgtcatgagactcacaattagttacctgagagtccggaaactgcttgatgcgggggacctggacatcgaagacgatatgaaggcccagatgaattgcttttacctaaaagccttggatggcttcgtgatggtactgacagatgatggtgatatgatctacatcagcgataatgtgaacaaatacatgggcctcacgcagtttgaattgactggccacagtgtgtttgacttcacccatccttgtgaccacgaggaaatgcgagagatgctcacacatagaaatggactggtcaagaaaggaaaggagcagaacacccagcgctctttctttctgcgcatgaagtgcaccctgacaagtaggggccgcaccatgaatattaaatctgcgacctggaaggtcctgcattgcacaggccatattcacgtgtacgacaccaattcaaatcagccccagtgcgggtataagaagccaccgatgacatgtctcgtgttaatctgcgaacccatcccccacccaagtaatatcgaaattcccctcgatagtaaaactttcctcagtagacattcacttgatatgaagttcagctactgtgatgaacggatcaccgagctcatgggttatgagcctgaggagcttcttgggcggtctatttatgagtactatcatgccctggatagtgatcacttgacaaagactcaccatgacatgtttaccaagggacaagtaacaacaggccagtaccgcatgctagcaaagagaggggggtacgtgtgggttgagacccaggccacagtcatctataatacaaagaacagccaaccccagtgcatagtatgtgtgaattatgtagtaagtggaatcattcaacacgacctgatcttttcactgcaacagactgagtgcgtcctcaagcccgtagagagctccgacatgaagatgacgcagttgttcacgaaagtggaatcagaggatactagctcgctcttcgacaaattgaagaaggagcctgatgcccttacccttctggcccctgccgccggcgacacaattatttcattggatttcgggtctaacgataccgaaacagatgaccagcagctcgaggaagtgccactctacaacgacgtgatgctgccgtccccaaatgagaagctccagaatatcaatctggctatgagcccattgcccaccgccgaaacccccaaacctctccgcagctctgccgacccggccttgaaccaagaggttgccttaaaattagaacctaatcccgaatccttggagcttagcttcaccatgccccagattcaggaccaaaccccctctccgtctgacggcagcacaaggcagtcctcacctgagcccaattctccatcagaatattgcttttatgtggattccgacatggttaatgaattcaaattagaactggtggagaaactgtttgcagaagacacagaagctaagaaccctttttccacccaggacacagacctagatcttgagatgctggcgccttatatcccgatggacgatgacttccagctaaggtccttcgatcagctgagtcctctggaaagttcctctgcctcccccgaatccgcctcaccccagtcaaccgtcactgtgttccagcagactcagatccaggagccaacagccaacgctacaacaacgaccgctacaaccgacgagctgaaaacggtgacaaaggacaggatggaagacatcaagatactcattgcctccccaagcccgacgcatattcacaaggagactactagcgccacgtcaagtccctaccgcgacacccaatcaagaacggctagcccaaatagggcaggtaaaggggttatagagcaaacggaaaagagccatccacgctcccctaatgtgttgagcgtcgcgttaagtcagaggactaccgtcccggaggaggaactcaatcctaagatcctggccctgcaaaacgctcagaggaaacgaaaaatggagcacgacggctcactgttccaggcagtcggcataggtactctcctgcaacagccggacgaccatgccgctactacctccctgtcatggaagcgggtaaaggggtgcaagtcgtctgagcagaacggcatggaacagaagactatcattctgattccatctgacttggcctgcaggctgcttggccagagtatggacgaaagtggcttgccacaactcacatcctacgattgtgaagtcaacgcgccgatccagggatcccgcaatttgttacaaggggaagagctgctgagggctttggatcaggttaac

SEQ ID NO: 118550 - DNA, 2478 bp, Artificial Sequence
  derived and/or modified sequence
atggagggcgccggtggtgcgaatgacaaaaagaagatttcctccgagaggaggaaggagaagtcaagggatgcagcccggtcccggcgctcgaaagagagcgaagtgttctacgaactggcccaccaactgcccctcccgcataatgtgagctcccacctcgataaggcctctgtcatgcgcctgactatctcgtacttgcgcgtccggaagctgctggacgcaggggacctcgacatcgaggatgatatgaaggcgcaaatgaactgtttctacctgaaggctctggacggtttcgtgatggtcttgactgacgacggtgatatgatctacatcagcgataacgtgaacaaatacatgggactgactcagttcgaattgaccgggcactccgtgtttgatttcacccacccatgtgaccatgaagaaatgcgggagatgctgacgcaccggaatggactggtcaaaaagggaaaggagcagaacactcagagatcattctttctgaggatgaaatgcacgctgacctcccgcggtcgcactatgaacatcaagtcggcgacctggaaggtgctccattgcaccgggcatatccacgtgtacgatactaatagcaaccagcctcagtgcgggtataagaaaccgccaatgacttgtctggtgctcatttgtgagcctatcccgcatccttccaatatcgaaatccccctggactccaaaacctttctctcgcggcactcgctcgacatgaagttctcgtactgcgatgaaagaatcacggaacttatgggatatgaacccgaagagctgctggggcgctcgatttacgaatactaccacgccctcgactccgatcatctgaccaagacccaccatgacatgttcaccaaggggcaggtgaccactggacagtatcgcatgctggcgaaacggggaggctacgtatgggtggaaacccaagcaaccgtcatttacaatactaagaatagccagccccagtgcatcgtgtgcgtgaattacgtcgtgtcgggaatcatccaacatgacctgatcttctctctgcagcaaaccgagtgcgtcctcaagcctgtggaatcctccgacatgaagatgacgcaactcttcactaaggtcgaatcggaggacacctcgtcattgttcgataaactcaagaaagagcctgacgccctcacgctgctcgctccggccgctggcgacaccatcatttcgctggactttggctccaacgacaccgaaaccgacgaccagcaactggaagaagtcccgctgtacaacgatgtgatgctcccaagccctaacgaaaagctccagaacatcaatctcgccatgtccccgctgcctactgccgaaactcccaagcctttgcgctcgtcggcggaccctgccctgaaccaggaggtggcgctgaagctggagccgaacccagaatcattggaactgtccttcaccatgccgcagattcaagatcaaactccatccccctccgacggatccacccggcagagctcgccagagccgaacagcccttcagagtactgcttctacgtcgactcggatatggtgaatgaattcaaactggaactggtcgagaaactgttcgcggaggacacggaagccaagaatccgttctccacccaagacactgatcttgacctggagatgctggcaccttacatcccgatggacgacgacttccagctgagatcatttgaccagttgtcaccgctggagtcgtcgtcagcatccccggaatcagctagcccgcagtcgaccgtcactgtgttccagcagacccagatccaagagccgactgcgaacgcaactaccacgactgctaccactgacgaattgaaaaccgtgaccaaggacagaatggaggacatcaagatcctcatcgcctcgccgtccccgacccacatccacaaagaaaccacgtccgccacttcctcaccctaccgggacacccagagccgcacggcatccccgaacagggccggtaaaggggtgattgagcagaccgaaaagtcccacccgcgctccccgaatgtgctgagcgtcgcactgtcccaaaggaccactgtgccagaagaagagctcaacccaaagatacttgccctgcagaatgcgcagcgcaagagaaaaatggaacacgacggctcattgttccaggccgtgggaatcggaacgctgctgcagcaaccggacgaccatgcagccaccacgtcgctgtcctggaagagagtgaaggggtgcaagagctctgaacaaaacggcatggagcaaaagacgatcatcctcatcccgtccgacctcgcatgcaggctgctcggccaaagcatggacgaatccggacttccgcaactcactagctacgattgcgaggtgaatgctccgatccaaggatccaggaacctgctgcaaggtgaagaattgctgcgcgctctggatcaagtgaac

SEQ ID NO: 118551 - DNA, 2478 bp, Artificial Sequence
  derived and/or modified sequence
atggaaggcgcaggtggggctaatgataaaaaaaaaatttcttctgaaagaaggaaggaaaagtctcgtgatgcagcccgtagccgacggagcaaggaatctgaagtgttctatgagttggctcatcaacttccccttccccataatgtaagctcccacttagacaaggctagcgttatgaggttgaccattagctatcttagagtgcgtaagttgttggatgctggcgaccttgacatcgaggacgacatgaaggctcagatgaattgcttttatttgaaggctttagatggctttgtgatggttcttactgatgatggggatatgatttacataagcgacaacgttaataagtacatgggccttacacaattcgaacttactggccattcagtcttcgatttcactcacccttgcgatcatgaggagatgcgtgaaatgcttacccatagaaatggactggttaagaaggggaaagagcagaatactcaaaggtccttctttttgaggatgaagtgcactttgacatctagggggagaactatgaacatcaaatctgctacttggaaggttctccactgcaccgggcacatccatgtgtatgataccaactccaaccaaccccagtgtggttataaaaaaccccccatgacatgcttggtcctcatttgtgagcctatacctcacccctcaaatatcgaaattccactagattcaaagactttcctctctcggcattctttggatatgaagttttcttactgtgacgaaagaattacagagttgatgggctatgagccagaggaacttcttggaaggtctatttatgagtattatcatgctctagactccgatcatctcacgaaaacccatcacgatatgttcactaaggggcaggtcacaaccggtcaatataggatgctcgctaagaggggtggatacgtgtgggtagagacacaagctacagttatctataataccaagaatagccaaccacaatgtatcgtatgtgtgaattacgtggtatccggaattatacagcatgaccttatattctcacttcaacaaacggaatgcgttttgaaacccgtggaatcgagtgacatgaagatgactcaacttttcaccaaagtagaatccgaagatacttctagcttgttcgataagcttaagaaggagcctgatgcattgaccctgctggctcctgcagccggggatacaatcattagccttgatttcggtagcaacgataccgaaacagacgaccaacaactcgaggaggtgccgttgtacaatgatgtgatgctgccttcgccgaacgagaagcttcagaacattaacctggcaatgtctcctttgcctaccgctgagacaccaaagcctcttagaagtagcgccgatcctgccctgaaccaagaagtagctcttaaacttgaacccaaccccgaatctttagagcttagcttcaccatgccgcagatccaagatcagaccccttctccttctgatggatctactaggcaaagctcgcctgaaccaaattctccatcagaatattgtttttacgttgattcagatatggtgaatgagttcaagctagagcttgttgaaaaactcttcgccgaagataccgaagctaagaacccgttttcaacccaagatacagatcttgacctggaaatgctcgccccttacatacctatggatgacgatttccagctcagaagtttcgatcaactctcaccactcgaaagctcgtctgcttcgccagaatcggcatctcctcagtcaactgttactgtctttcaacaaacacaaattcaagaaccgactgccaacgccactacgacaactgccaccacggatgaattaaagacagttacaaaggaccgcatggaagatattaagatcttgatagctagcccatcgcctactcacattcataaggaaactacctccgcaacttcttccccgtaccgtgatacacaaagtaggacagcatcgcctaatcgtgccggtaaaggagtgatagaacagactgaaaagtcacacccccgctctcccaacgttctctccgttgctttatcgcaacggactaccgtgcctgaagaagaactgaatccgaagatactcgctttgcaaaatgcccagcgaaagcggaaaatggagcatgatggtagcctgttccaagcagttggtattggaactcttctgcagcaacctgacgatcatgcagcaactaccagtctctcgtggaaaagggtaaagggttgcaagtcttctgaacaaaacgggatggaacaaaagacgattattttgatcccgtcggatttggcttgtaggctattaggtcagtcaatggatgaatctggcctgcctcagctcacctcttacgattgcgaagttaacgcacctattcaggggtcacgcaatttgcttcaaggagaagaactcttgagagcacttgatcaggttaat

SEQ ID NO: 118552 - DNA, 2478 bp, Artificial Sequence
  derived and/or modified sequence
atggagggtgctggcggagccaacgacaaaaagaaaatctccagcgagcgacgcaaagaaaaatcacgggatgccgcacgctcacgccggtcaaaggagagtgaggtcttctacgagcttgcgcatcaattaccacttccccataacgtgtccagccacttggataaagcctccgtcatgcggctgaccatttcctacctgcgggttaggaagctgcttgacgctggagaccttgatatcgaggatgacatgaaggcgcagatgaactgcttctacctcaaggccttggacggctttgtaatggtactcaccgatgatggcgacatgatttatatctccgataatgtgaataagtatatgggtctcacccaatttgagctaaccgggcactcagtattcgacttcacgcatccttgcgaccacgaggaaatgagggagatgctgacgcatcggaacggcctggtgaagaaggggaaggagcagaatacacagaggtcatttttcctccggatgaagtgtacactgacttccagaggcaggaccatgaacattaaaagcgcgacctggaaggtgctccactgtaccggacacatccacgtctacgacactaattcaaatcagcctcagtgcgggtacaaaaaacccccaatgacctgtctcgttctgatatgtgagccgatcccccatccctccaatattgagatccccttagattcaaagactttcctgagcaggcacagtttggatatgaaattctcttattgtgacgaacggatcactgagctcatgggctacgagccagaggagttactcgggcggagtatatacgaatactatcacgctctggacagcgaccacctgacaaaaactcatcatgatatgttcactaagggccaggtcacgaccgggcagtacaggatgctggccaagagagggggctacgtttgggttgagacccaagcgacagtgatctacaacactaagaatagccagcctcagtgcattgtttgcgtgaattatgtggtatctgggattatccagcacgatctgatcttctccctgcaacaaacagagtgcgttctgaagcctgtggagagcagtgatatgaaaatgactcagctgtttactaaggtggagagtgaggatacgtcatccctttttgataagctgaaaaaggagccggacgctctgacgctcctcgcaccagccgccggggacacaatcatctcgcttgatttcggaagcaatgatactgagaccgacgatcagcagttggaggaggttcccttgtataacgatgtgatgctgcccagccctaacgagaaactccagaatatcaatctcgccatgagtccacttcctacagccgaaaccccgaagcctttaaggtctagtgcagatccagcgctcaaccaggaggtagccctgaaactcgagcctaatccagaaagcttggagctgagcttcacaatgcctcagatccaagaccagaccccaagcccatccgacggctccacaagacagtctagtccagaaccaaattctccttccgagtattgtttttatgttgactcagatatggttaacgagttcaagttagagctggttgaaaagctgttcgccgaggacaccgaggccaagaaccccttcagcactcaggatacggacttggatctcgagatgctggcgccctatattcccatggatgatgatttccagctgagaagcttcgatcagctttctcccctggaaagctcctctgcgagtccagaatcagcatctccccaaagcacggtgaccgtcttccaacagacccagatccaggagcccacagccaatgccacaacaactactgcaacaacggacgagctcaaaacggtcaccaaggaccggatggaagatatcaagattctgatcgccagccccagtccaacccacattcacaaagagacaacctctgccacctctagcccgtacagggacactcagagcaggacagcctcacctaatagggcagggaaaggcgtcatcgagcagacagagaagtctcatccccgctctcccaatgtcctctcggtggctctctcccagcgcactaccgtgcctgaggaagagctcaatcctaagatcctggctttgcagaacgcacagcgaaagaggaagatggagcacgatggcagtcttttccaggccgtaggtattggcacactcctgcagcagcccgacgatcacgccgccactacctcactcagctggaagcgcgttaaagggtgtaagtccagtgaacaaaacggaatggagcaaaagaccataattcttataccctcagacctggcatgccgtttactgggccagtcaatggatgagagcggcctcccacagctcacctcctacgattgcgaagtgaatgcgccaatccagggatcgaggaatctgctgcagggcgaagaactgctgcgggccctggatcaggtgaat

SEQ ID NO: 118553 - DNA, 2478 bp, Artificial Sequence
  derived and/or modified sequence
atggaaggcgcaggtggagccaacgacaaaaagaagatctcctcggagagacgcaaagaaaagagcagagacgcggcaagaagccgacgatcgaaggaatccgaggtcttttacgagctcgcgcatcagcttcctttgccccataacgtgagctcccatctggataaggcctcggtcatgcgactgaccatttcgtaccttcgtgtcagaaaacttctggatgcgggcgatctggacattgaagatgacatgaaagcccaaatgaattgtttttaccttaaggcgctggatggtttcgtgatggtcctcactgatgacggagacatgatctatatctcagataatgtgaacaaatacatgggattgacgcagtttgaactgaccgggcatagcgtgttcgatttcactcatccatgcgatcatgaggagatgcgggagatgctcacccaccgcaacggactggtgaagaagggaaaggaacagaacacccaacggagcttctttcttaggatgaaatgtactcttacttcaagaggccggaccatgaacattaagtcagcaacctggaaggtgctgcattgcaccggacatatccatgtgtacgatacgaactcgaaccagcctcaatgtggttataagaaacctccaatgacctgcctggtcctgatttgcgaaccaataccccatcctagcaacattgaaatcccccttgatagcaagacttttctttcccggcattcacttgacatgaagttttcctactgtgatgaaagaatcactgaactgatgggctacgaacctgaagaactccttggccggagcatctacgagtactaccatgcacttgattcggaccatcttactaagacgcatcacgacatgtttaccaagggacaggtgacgaccggacaataccgaatgctggcgaagcggggtggctacgtgtgggtggaaacgcaagcaactgtcatatacaataccaagaattcgcaaccacaatgtattgtgtgtgtgaactacgtggtcagcggaatcattcaacacgatctgatattctcgctgcaacaaactgagtgtgtcctgaaacccgtggaatccagcgatatgaagatgacccagctgtttactaaagtcgaatcggaggatacctcctcactgttcgacaaattgaaaaaggaaccagatgccctgactctgctggcgcccgcagcaggggataccatcatttcactggattttggttccaacgataccgaaactgacgatcaacaacttgaagaggtgcccctgtacaacgatgtgatgctcccgagcccaaacgagaaacttcaaaacataaaccttgctatgagccctctgcctaccgccgagactccaaaacccctcagatcatctgcggaccctgcgctgaatcaggaggtcgcacttaagctggaacctaatcctgaatcactggagctctcttttaccatgcctcaaattcaagatcagaccccatcgccgagcgacgggagcaccagacaatcaagccccgagccaaacagcccaagcgaatactgtttttacgtcgattccgacatggtcaatgaattcaaattggagctggtagaaaaacttttcgctgaagataccgaagcaaaaaacccctttagcacgcaagacaccgaccttgacctggaaatgcttgcaccatacatccctatggatgatgattttcagctccgcagcttcgatcaactttcccctcttgaatcatcgtcggcatcacctgagtcggcatcgcctcaaagcactgtgactgtgttccagcaaacccaaattcaagaacccactgcaaatgcaactactactacggcaaccaccgatgagcttaagactgtcactaaggacaggatggaagatatcaagatacttatcgcatccccttcgcctacccatattcacaaggaaacgacttcggcaacttcgtcgccatacagagatacgcagtcaagaaccgcatccccaaaccgcgcaggaaagggtgtgatagaacagactgagaagtcgcatccaaggagcccaaatgtcctttctgtggcactcagccaacgtaccactgtgcctgaagaagagcttaatcccaagattctggcgctgcagaatgcacaaagaaagcggaagatggaacatgatggctccctgtttcaggcggtcggaattggtacgcttcttcagcagcctgatgaccacgccgcaaccacttcgctgtcctggaagagagtgaagggctgtaagtccagcgagcagaatgggatggaacaaaagaccattattctgattccgtccgacctggcatgtcgcctgcttggacaaagcatggatgaatcaggacttccccaactcacttcatacgattgcgaggtgaacgcgccgatacaaggatccagaaatcttttgcaaggcgaagagctgcttagagcacttgaccaggtcaac

SEQ ID NO: 118554 - DNA, 2478 bp, Artificial Sequence
  derived and/or modified sequence
atggaaggcgccggcggtgcgaacgataagaagaagatatcaagtgagcggagaaaggagaaaagcagggatgcagcccggtcgcggcgatctaaagaatcagaggtcttttacgagctcgctcatcaattgcctctgccccataacgtgtcaagccatctggataaagcctctgtaatgcggttgacgatttcatacctgagggttcgtaagttgctcgatgcgggcgatctggacattgaggacgatatgaaagcccaaatgaactgcttctacctgaaggcgctagacgggtttgttatggtcctgacggacgacggggacatgatctacataagcgacaatgtgaataagtacatgggactgacacaatttgagctaacaggacatagcgtgttcgactttacccatccttgtgatcacgaagagatgagggaaatgttgacccaccgtaatggcctggtcaaaaagggtaaggagcagaacacccaaagaagcttttttttgaggatgaagtgtaccctgaccagccgagggcggaccatgaatatcaagtctgccacctggaaggtgttgcactgcacaggacacatacacgtgtacgataccaactcaaaccagcctcaatgtgggtataaaaaacctcccatgacctgcctggtgcttatctgtgaacccatccctcacccttcaaatattgagatcccactggattctaagacctttttgtctcggcactccctggatatgaagttcagctactgcgacgagaggatcactgaactgatgggctacgagcccgaggaactgctggggcgctctatttacgaatactaccatgccctagacagtgatcaccttacaaaaacacaccacgatatgtttacgaaaggacaggtgacgacaggtcagtacaggatgctcgcgaaaaggggaggctacgtctgggtggaaacacaggctacagtgatttacaacacaaaaaactcccagccccagtgcattgtctgtgtcaactatgtggtgtccggaataatccagcatgaccttattttcagcctgcagcaaactgaatgcgtcctgaagccggtggaaagcagcgacatgaagatgacacagcttttcactaaggtggagtccgaggacacttcatcactctttgacaagcttaagaaagaacctgatgctctgaccctgctagcacctgccgccggcgacactataattagcctcgattttggatctaatgacacagaaaccgatgaccaacagctggaagaggtcccgctgtacaacgatgtcatgttgccctctccgaacgaaaaattgcagaatattaatctggccatgtcgcccctacccactgctgagacaccaaagccactgcgaagctcagccgatcctgctctgaaccaggaggtggctctaaaactcgaacctaatcccgagagtctggagctgagctttaccatgcctcaaatccaggaccagacacccagtcctagcgatggttcaactaggcaatctagccccgagccaaactccccctcagagtactgcttctacgtggactcagatatggtaaacgaatttaaacttgagttggtggagaagcttttcgcagaagatacagaagccaagaatccattttccacacaggataccgatttggacctggagatgttggccccttacattccgatggatgatgatttccagctgaggagtttcgatcagctgagtcctcttgagagtagctcagctagtccagagtccgcaagtccacagagcaccgtgactgtgttccagcaaactcagattcaggagcccactgccaacgcaaccactaccaccgcaacaacagatgagctaaaaacggtgacgaaggataggatggaggacataaaaatactgatagcaagcccctctccaacacacattcacaaagaaacaacgtctgcaacttcatcgccttaccgggatactcagtctaggacagcaagtccaaatagggccggcaagggggtgattgagcagactgaaaagtctcatcctcgatctccaaatgttctgagcgtggcactctctcagcgaacaaccgtgcccgaagaggagctgaacccaaaaattctggctctccagaacgctcagcggaaaagaaagatggagcacgacgggagcctattccaagccgtcgggatcggtaccttactgcagcaacctgacgaccacgctgctaccacctctttgagctggaaacgcgtgaaaggatgtaaaagtagtgagcagaatggaatggaacagaagactattatccttataccatccgacctagcctgccgtcttctgggacaatcaatggacgagtctggcttgcctcagctgacaagttatgattgcgaggtcaacgctccaatccaggggagcaggaatctgctccagggcgaggaactgctccgagcactggaccaggtaaac

SEQ ID NO: 118555 - DNA, 2478 bp, Artificial Sequence
  derived and/or modified sequence
atggaaggtgcaggaggagccaatgacaagaagaaaatctcgagcgaaagacgtaaggaaaagtcacgggacgcagcgcgcagcaggcgctcaaaggaatccgaagtgttctacgagctcgcacatcaacttccacttcctcacaacgtgtcgtcgcatcttgataaggcaagcgtgatgaggcttacgatttcgtacctcagagttagaaagctcttggatgcaggagatctggatattgaagatgatatgaaagcacaaatgaattgtttttacctgaaggcactggacggtttcgtgatggtgctcaccgatgatggagatatgatctacatctcggataacgtgaataagtacatgggacttacgcagtttgaacttaccggtcactcagtgtttgattttactcacccttgtgatcatgaagaaatgcgggaaatgctcacccatcgaaacggtctggtgaaaaaaggtaaagaacagaacacccagcgctcttttttcctcagaatgaagtgcactcttacctctcgtggacggactatgaatatcaagtcggcaacctggaaggtgcttcattgtaccggacatatccacgtgtacgataccaattctaaccaacctcagtgtgggtacaagaaacctcccatgacttgtcttgtgctgatttgcgagccaatcccacacccttcaaacattgagatcccactggactctaagacctttttgtccagacattccctggacatgaaattctcttactgcgacgagagaataactgagttgatggggtacgagccagaggagctgcttggaaggtccatttacgaatactatcatgctctcgattcagaccatctgaccaagacccaccatgatatgtttaccaagggacaggtgaccactggacagtacagaatgctggcgaaacgaggagggtacgtgtgggtcgaaactcaagcaacggtgatctacaataccaagaattcgcagcctcagtgcattgtgtgcgtgaactatgtggtttcaggaatcatacagcacgatctgatcttttcgctccagcagactgaatgtgtgctgaagcctgtggaatcgtcagatatgaagatgacgcagctcttcacgaaagtcgagtcggaggatacctcctccctttttgacaaacttaagaaggagcctgatgccctgaccctccttgcaccagctgcaggtgatactatcatatccctggactttggatctaatgatactgaaaccgatgaccaacaactggaagaggtgcctctgtataatgatgtgatgctgccttcgccgaatgaaaaactccagaatatcaaccttgcaatgtcgcccctcccaacggcagaaactccaaagcccctgagatcctcggccgatcctgcgctgaatcaagaggtcgccctgaaactcgaacctaaccctgagtcactggagctcagcttcactatgcctcaaatacaagaccagaccccgtcaccatcggacggcagcacccgacagagctcccctgaaccaaattccccttccgaatactgcttttacgtggattcagacatggtgaacgaattcaagctggaactggtggaaaagctgtttgcggaggataccgaagcaaagaatccattctccactcaggataccgatcttgacctggaaatgctggccccttacatacccatggatgatgattttcagctgcgttcatttgatcaactgtcacctctggagtcgtcctccgcttccccagaatccgcatcgccgcaatcgactgtcacggtctttcagcaaacccagattcaggagcccaccgcgaacgctacgaccaccactgcaactaccgacgaacttaagaccgtgaccaaggatcggatggaagatatcaagatccttattgcctcgccgtccccgacccatatccataaggagacgacctcggcaacctcgagcccgtacagagatacccagtccagaacggcctcaccaaacagggcaggaaagggtgtcatcgagcagaccgaaaagagccatcctagatcgcccaacgtgctttccgtcgccctgagccagcggaccactgtcccagaggaggaacttaacccaaagattttggctctgcaaaacgcacagcgcaaaagaaaaatggagcacgacggaagcctcttccaggctgtcgggatcgggactctcctccaacagcccgatgatcatgccgccaccactagcttgagctggaagcgcgtcaaaggatgtaagtcctcagagcaaaatggtatggagcaaaaaactatcattctgattccttccgatctggcatgtagactcctgggacagtcgatggacgaaagcgggcttcctcagcttacctcatacgactgcgaagtcaacgcgcctattcagggaagccgtaatctccttcagggcgaggaactgcttcgagccctggaccaggtcaac

SEQ ID NO: 118556 - DNA, 2478 bp, Artificial Sequence
  derived and/or modified sequence
atggagggtgccggaggcgctaacgacaagaaaaagatttcaagtgaaagacggaaagagaaatcacgggacgcggcccgcagtagacggagtaaggagtctgaggtgttttatgaattagcccatcagctgccgctgccccataacgtgagttcgcatctggataaggcaagtgtgatgaggcttaccatctcgtacctgagagttagaaaactactggacgcgggggatctggatattgaggatgatatgaaagcacaaatgaattgcttttacttaaaggcactcgatggcttcgttatggtgttaacagacgacggagacatgatatacattagcgataatgtcaataaatacatgggcctgacacaatttgagctgaccgggcatagtgtgtttgatttcacacacccctgcgatcacgaagagatgagagaaatgcttacacacaggaatggcttggttaagaaaggtaaagaacaaaacacgcagcggagcttcttcttgagaatgaagtgtaccctgaccagccgggggcgaacgatgaatatcaaatccgctacctggaaggtcctgcactgcactggacacattcatgtgtatgataccaacagcaaccagccccagtgcggctataaaaagcccccaatgacctgcctggtgctgatatgcgagccaattccgcatccctccaatatcgagatcccgcttgacagtaaaaccttcctttctcgccactcactcgatatgaagttcagttactgcgatgaacggatcaccgagctgatgggctatgagccagaggaacttctgggcaggagcatatacgaatattaccacgcgctcgattccgaccacctgaccaaaactcaccacgatatgtttactaaagggcaggttaccacgggtcagtaccgcatgttagctaagcgcggcggttatgtgtgggtggagacccaggccacagttatttacaacaccaaaaattcccagccccagtgcatcgtgtgcgtgaactacgtggtgagcgggatcattcagcacgatctcatattttccctgcaacagacggagtgcgtcctgaagcctgtggagagcagcgatatgaaaatgacccagttgtttactaaggttgagagtgaagatacttcaagccttttcgacaaattaaagaaggaacccgatgccctgaccctgttggcccccgccgcaggcgacactattataagtctcgattttgggtcaaacgacaccgaaacagatgaccagcagctcgaagaggttcccctgtacaatgatgttatgctcccctcaccaaacgaaaagctgcagaacattaacctagcaatgagccccctgcccacagccgagacacctaaacctctcagatcctctgcagatcctgcactgaatcaggaggtcgctttgaagctggaacccaatcctgagagtctggaactctcattcacaatgccccagattcaggatcagacaccatccccatcagatgggtctactaggcagtcatctcctgagcctaactcccccagcgagtactgcttttatgttgacagcgatatggtgaatgagttcaaactggagctggtggaaaaactgttcgcagaagatacggaagcgaagaacccattctccactcaggataccgacctggatcttgaaatgctggccccctatattccaatggacgacgacttccaactacgaagtttcgaccaattgtctccgcttgaaagctcttctgcttctcccgagagcgctagccctcagtcgaccgtaactgtgttccagcagactcagatccaggagcctactgccaatgctacaaccacaactgctaccaccgatgaactcaaaacagtcaccaaggaccgtatggaggacataaagatcctgatcgcatcacctagtccaactcatatacacaaggagaccacttcagccacttcatccccctatagagatactcagtctcggactgcttcacccaaccgagccggaaagggggtcatcgagcagaccgaaaagtctcacccccgatctccaaacgtcctgtctgtggcccttagccagcgcaccaccgtgccagaagaggagcttaatcctaagattctagccctgcaaaacgcacagcgaaagcgcaaaatggagcacgacgggtcactctttcaagccgttggcatcggtacactcttgcaacaacccgacgatcacgcggcaacaaccagcctctcttggaagcgagtgaaggggtgcaagagctcagaacagaacggcatggagcagaagacgatcatccttattccatcagatctggcgtgtcggctgctcggccagtccatggacgaatccggtttaccacagctaaccagctacgactgtgaggttaatgctcccatccaagggtctcggaacctcctgcagggggaagagctgctacgcgccctcgaccaggtgaat

SEQ ID NO: 118557 - DNA, 2478 bp, Artificial Sequence
  derived and/or modified sequence
atggaaggtgcaggcggtgcaaacgacaagaagaagatatcatccgaacggagaaaggaaaagagccgggacgcagcccgctcgagaagaagcaaggagtcggaagtgttttacgagctggcacatcagctgcctcttccccacaacgtctcgtcccaccttgataaggcatccgtcatgagactcactatttcctaccttagggtgcggaagctgctcgacgccggcgatcttgatatagaggacgacatgaaggcccaaatgaactgcttttacctgaaggcacttgatgggttcgtcatggtccttactgatgatggggatatgatttacattagtgataacgtgaacaagtacatgggactcacccaattcgaactgactggtcattcggtgttcgacttcacccatccttgcgaccatgaagagatgagggaaatgcttactcacaggaatggtctggtgaagaaaggcaaggagcaaaacacgcagagatcattcttcctcagaatgaagtgtaccttgacctcgcggggtcgaaccatgaatatcaagagcgccacctggaaggttctgcactgtaccggccatattcatgtgtacgatactaactcgaaccagccacaatgtggatacaagaagccgcctatgacttgtcttgtgctgatttgtgaaccaatccctcatccctccaacattgagattcctcttgatagcaagactttcttgtctcggcattccttggatatgaagttttcatactgtgacgaacgcattaccgagttgatggggtacgaacccgaagagttgttggggcgaagcatttacgaatactaccacgcactcgactcggatcatctcaccaagactcaccacgacatgtttacgaagggtcaggtcaccactggacagtaccgcatgctggcgaagcggggtggttacgtgtgggtggaaactcaagcaactgtcatttacaacaccaaaaactcgcaaccacagtgtatcgtgtgtgtgaactacgtggtgtcgggaattatccagcacgacctgatcttttcgctccaacagaccgaatgtgtcctgaagcctgtggaaagcagcgatatgaagatgacccagctttttacgaaagtggaatcggaagatacctcctcccttttcgataaactcaaaaaggagccagacgcactgactctgcttgcacctgccgccggtgatactatcatttcgctggacttcggaagcaatgataccgagactgatgaccagcaacttgaggaagtcccgctttacaacgatgtgatgctcccatcacctaatgagaagctgcaaaacattaatctggcaatgtcaccactgccgaccgctgaaactcccaagccactgagaagctcggctgatcctgctctcaaccaagaagtcgcactgaagctcgagcctaatccagaatcacttgaactgtcttttaccatgcctcaaatccaagatcagacgccatctccctcagacggatcaacccgtcagagcagccccgaacctaattcaccttccgaatactgcttctacgtcgactccgatatggtgaacgagtttaaacttgaattggtggagaaactgttcgcggaagataccgaagcaaagaaccccttttcgactcaagacaccgatcttgatctcgagatgcttgcaccctatataccaatggatgatgactttcagctccgctcatttgatcaactctctccgcttgaaagctccagcgcatcacccgaatccgcctcaccacaatccacggtgaccgtgttccagcaaacccagatccaagaacctaccgcaaatgctaccacgactaccgccacgactgacgagctcaaaaccgtgaccaaggatcgtatggaagatatcaagattcttattgcatcaccgagcccaacccatattcacaaggaaactacttccgcaaccagctcgccttacagggacacccagtcgagaacggcttcgccgaaccgggcaggcaagggagtgatagagcagaccgaaaaaagccatccacgttcccctaacgttctttcagtggccctctcacaacggactactgtccccgaggaagaactgaaccctaagattctcgcacttcagaacgcacagcgcaagcggaagatggagcatgatggatcgctttttcaggcagtgggaattgggacgcttctgcaacaaccagatgaccatgcggctactacctccctgtcatggaagcgcgtcaaggggtgtaaatccagcgaacaaaatgggatggaacaaaagactatcattctgattccttcagacctggcatgccggcttctcgggcagagcatggatgaatcaggtctgcctcaactcactagctacgactgtgaagtcaacgcgcctatccaagggtcgcggaaccttcttcagggagaagagctgctgcgggcacttgaccaggtgaat

SEQ ID NO: 118558 - DNA, 2478 bp, Artificial Sequence
  derived and/or modified sequence
atggagggtgctggcggggctaatgacaagaagaaaattagctctgaacgtaggaaagaaaaaagccgggacgccgctagatcgagacgctccaaggaatccgaggtattctatgaattggcacaccaattgcctctcccgcataacgtttcctctcatctggacaaggcctcggttatgcggctgacgatttcttatcttcgcgtgcgcaaattactagatgctggggacctcgacatcgaggatgatatgaaggcacagatgaactgcttttatctgaaggccctggatggctttgttatggtgctgacagatgacggtgatatgatctatatctctgacaacgtgaataagtatatgggtctgacccagtttgaactgaccggacactcagtgttcgacttcacccacccatgtgaccatgaggagatgcgggaaatgttgacacataggaatggattagtaaagaaaggaaaagagcaaaatacacaacgatcctttttccttagaatgaagtgcaccctcacctcccgcggtagaactatgaatattaaatcagccacttggaaggtcctgcactgcaccggtcacatccacgtatacgacactaactccaaccagccacagtgcggttacaaaaagcccccaatgacctgtctcgtgcttatctgtgagcccatccctcaccccagcaatatcgagattcctcttgatagcaagactttcttatccagacattccttagatatgaagttcagttattgcgacgagcggattacagaactgatgggatacgagcccgaggagctcctggggagaagcatttatgaatattaccacgcactggattcagatcacctgacgaagacccatcacgacatgtttacgaaaggccaggtgaccactggccaataccgtatgcttgcgaaaaggggcggatacgtgtgggtcgaaacccaggctaccgtcatttataatacaaaaaacagccagcctcagtgtatcgtgtgtgttaactacgtcgtaagcgggatcatccaacacgatctgatcttttctctccagcaaacagaatgtgtgttaaagccagttgaatcctctgacatgaagatgactcagctgttcacaaaggtagaatcggaggatacaagctcactgttcgataaattgaaaaaagaacctgacgccctcacactcctcgctccagcagctggtgataccattatctctctggattttggcagcaacgatactgagacagacgatcagcagctagaagaggtgccactctataatgatgtcatgctgccctcccctaacgaaaagctccagaatattaatctggccatgagccctctaccaaccgccgagacaccaaagcctctcagatccagtgccgatccagctctaaaccaggaggtggccctgaagttggagccaaatcccgagagtcttgagctatctttcactatgccccaaatacaggaccagacaccctccccttcagatgggagcacccgccaaagctctccagagcctaatagtccaagtgaatactgtttctatgttgactccgatatggtgaacgaatttaaactggaactggtggagaaactcttcgccgaggacaccgaggccaagaatcccttcagtactcaggatactgacctggacttggagatgttggccccgtatattcccatggacgatgacttccagctgagaagcttcgatcagctgagtccactagagtcttctagcgcgtctccagaaagcgcttctccccagtccaccgtgacagtgtttcagcagacacaaatccaggagcctactgccaatgcaactaccaccacggctactacggacgaactaaaaacagtgacaaaggacaggatggaagacataaagatattaatcgcctctccttctcccacacatatccacaaagaaacaacttcggcaacatcaagcccctaccgggatacacagtcgaggacagcaagccctaacagagctggcaaaggcgtgatcgagcagaccgaaaagagtcatcctcggtccccgaacgtcctctctgtggctctgtcacagcgcaccactgttccagaggaagaactcaacccgaagatcctagctctgcagaacgctcagcgaaagcgaaagatggagcacgatggctctctgtttcaggccgtagggatcgggacccttctccagcagccagatgatcacgctgccacgacctctttgagctggaaaagggtaaaaggctgtaagagcagcgaacagaatgggatggagcagaagaccataatacttatcccgtccgacctggcttgccgattgttgggacagtccatggatgagtcaggcttgccgcagctgacatcatacgactgtgaggttaacgcccctatacaaggcagtcggaacctgctgcagggcgaagagttattgcgcgcactcgatcaggtgaat

SEQ ID NO: 118559 - DNA, 2478 bp, Artificial Sequence
  derived and/or modified sequence
atggaaggcgcaggcggtgccaacgacaaaaaaaaaatttcttcggagcgacgcaaggaaaaatctagggacgcagctcgtagtcgacgtagcaaggagtcggaggtcttctacgaacttgcgcaccagctccccctaccacataatgtctcatctcatcttgataaggcttccgtaatgaggttgaccatttcctatctgagagttcgcaaactgctcgacgctggagaccttgacatcgaagatgatatgaaagctcagatgaattgcttctatctcaaggccttggatggcttcgtgatggtgcttacagatgatggcgatatgatttatatttcagataacgtaaacaagtacatggggctgacacaatttgaacttacgggccatagtgtattcgatttcacccatccttgcgaccatgaagaaatgcgcgaaatgttgactcatcggaacggtctagttaaaaaaggtaaggagcaaaacacccaacgctctttcttcctgcgtatgaaatgcacactgactagcagaggccgcacaatgaatattaaatccgctacctggaaggttttgcattgcacgggtcatattcacgtttatgacacaaactccaatcaaccgcaatgtggatacaagaaaccaccaatgacgtgcctcgtcctaatctgtgagccaattccacatccatctaatattgaaatccctttggattccaagacctttcttagtcggcactcactcgacatgaaattcagttactgcgatgaacgtataacggagttgatgggttacgaacctgaggaactcttgggcaggagtatatatgaatactatcacgcgctcgattccgaccatctaacaaagacacaccacgacatgttcactaagggacaagtaaccacaggccagtaccgcatgcttgccaagcgcggtgggtatgtctgggtggagacgcaagccacggttatctataatacgaagaactctcagccccagtgcattgtttgcgtcaactacgttgtctcgggaatcattcaacatgaccttatattctcacttcaacagacggaatgcgtcttaaagccggttgaaagcagcgatatgaaaatgacccagcttttcactaaagtggagagcgaggatacgagcagcttgtttgataagttaaaaaaggagccggacgccctgaccctactcgcgcccgccgcaggtgataccataatcagcttggatttcggatcaaatgatactgaaacagacgatcagcagctggaggaggttcctctttacaacgacgttatgctcccgtcacctaacgaaaagctacaaaatatcaatcttgccatgtcaccactgccgactgctgaaacccctaagccccttcgctcatcggctgaccctgcgctcaatcaagaggtcgccctaaagttggagcccaatcctgagtccctcgagctgtcgttcactatgccgcaaatccaggatcagacccccagcccctccgacgggtcgactcggcagtccagcccggaacccaattccccgtctgagtactgcttttacgtggattcggacatggttaatgagttcaagctcgaacttgtcgagaagctcttcgcggaagacaccgaggcaaagaacccgttcagcacacaagatacggacctggatttggagatgcttgctccttacatacctatggatgatgatttccagctgagatcgttcgaccaactgagcccacttgagagttcttcagcgtcgcccgagtcagcttctccccagtccacggtgacggttttccaacagacgcaaatccaggagcccacggctaatgcgaccactactaccgcgaccaccgacgaactgaagaccgtgactaaagatcgtatggaagatataaagatcctcattgcaagccccagtccaacgcatatccacaaggaaactacatctgccacgagttctccgtatcgggatactcagagccgcacggctagtcctaatcgggcaggtaaaggtgttatcgagcagaccgagaagtcccatcctcggagccctaatgttctctctgtggctctgtcccaacggactaccgtcccagaggaggagctgaatcccaagatacttgcactgcagaacgctcaacgtaaacgcaaaatggaacacgacggatccttattccaggcagtcggtattgggacactgcttcagcaaccggatgaccatgctgccaccaccagcttgtcttggaaacgggtaaaaggctgcaaatcgagtgaacagaacggtatggagcagaaaaccatcattctgatccctagtgaccttgcgtgccgattgctcggccagtctatggatgagagcggtttaccacagttgaccagttatgactgcgaagtcaacgcacctattcagggttcacgaaatctcctccaaggcgaagagttgctcagagctttagatcaggttaat

SEQ ID NO: 118560 - DNA, 2478 bp, Artificial Sequence
  derived and/or modified sequence
atggaaggggcaggcggtgcaaacgacaagaaaaagatttcctcggagagaagaaaagagaagtcgcgggacgcagcaagatcaaggcgctcaaaggagtcggaagtgttttacgaattggcccatcaactgccgctgccacataacgtgtcgtcacacctcgataaagcaagcgtgatgcggttgaccattagctaccttcgggtgagaaaactgctggatgccggagatctggatatcgaagatgacatgaaggcacagatgaactgtttttaccttaaggccctggacggatttgtgatggtgctcaccgatgatggagatatgatctacatctccgacaatgtgaataagtacatgggtttgactcaatttgaactcactggtcattcagtttttgatttcacgcatccttgtgatcacgaggaaatgcgggaaatgcttacccatagaaacggcctggtgaagaaaggaaaggagcagaatacccagaggtcattctttcttcgtatgaagtgtacgctgacttcgagaggtcgcacgatgaacataaagtcggccacctggaaggtgttgcactgcaccgggcatattcatgtctacgacacgaattccaatcagccccaatgcggatacaagaagcctccaatgacttgcctggttctcatctgtgagcccatcccccacccaagcaacatcgagattcctctcgattctaaaactttcttgagtcgccacagcttggatatgaaattctcctactgcgatgagcgaatcacggaactgatgggttatgagccagaagaactccttggaagatccatctacgagtattaccatgccctggacagcgatcatcttaccaaaacccatcacgacatgtttaccaaagggcaagtcactaccggtcaataccgtatgcttgctaagcgcggcggatacgtgtgggtggaaacccaagctactgttatctacaacacgaagaattcgcagcctcaatgcattgtctgcgtcaactatgtggtttcaggcattattcagcatgacctgatcttttcacttcaacagacggaatgtgtgctcaaaccagtcgagtcaagtgatatgaaaatgacccaactttttactaaggtggagtcggaagatacttcctcactgttcgataaacttaagaaagaacccgacgcgttgaccctccttgcaccagccgcgggggataccataatctctctcgactttggaagcaatgacacggaaactgatgatcaacaactcgaagaagtgcccctgtacaacgacgtgatgctgccttcacctaacgaaaagttgcaaaacataaatcttgcaatgtcgccgctgcctacggctgaaactcccaaaccacttagatcgagtgctgaccctgcgcttaaccaagaggtggcacttaaacttgagcctaaccccgagtccttggaactttcgtttacgatgcctcagattcaggatcagaccccctccccatccgatggatccacccgtcagagttcgcctgagcctaactccccaagcgaatactgtttctacgtggatagcgacatggtgaacgagtttaaacttgaacttgtggagaaacttttcgcggaagataccgaagcgaagaacccatttagcactcaagataccgatcttgatctggaaatgctggccccttacattcctatggatgatgattttcagctccggtcgttcgatcagctgagcccacttgaatcatcgtctgcatcccccgaatccgcctcacctcaatcaaccgtgactgtctttcaacagacccaaattcaagaacctaccgccaatgcaactaccaccaccgctactactgacgaactgaaaactgtcactaaggaccggatggaggatatcaagattctgattgcttcgccttcacccacccatattcacaaagagactacgtccgcaacctcctccccttacagagacacccaaagccgcacggcttcgccgaatagagccggtaagggcgtgattgaacaaaccgagaagtcacatcctcggtcaccgaacgtgctgtcggtggcactgtcacagcgcactaccgtgccggaggaggaactgaaccctaagatactcgcactccaaaatgcccagaggaaacgaaagatggagcatgacggaagcctcttccaagcggtggggatagggactttgcttcaacaacccgacgaccacgcagccaccacctcgctctcgtggaagagagtgaagggttgtaagtcgtcggagcagaatggcatggaacagaaaaccattatcctcattccaagcgatttggcgtgtaggctgcttggacagagcatggacgaatcggggctgccccaactcacgtcctacgactgtgaagtgaacgcacctattcaaggctcacgaaacctcctccagggcgaagagctgcttcgggcgctggaccaggttaac

SEQ ID NO: 118561 - DNA, 2478 bp, Artificial Sequence
  derived and/or modified sequence
atggaaggtgcaggaggtgcaaatgataagaagaagatctcgagcgaaagaagaaaagaaaagtcgagagacgcagctagatcgaggcggtcgaaggaatccgaagtgttctacgaactggcccatcaactgccccttccccacaatgtgagcagccatcttgataaagcgtcggtgatgagactgactattagctaccttagagtccgaaagttgcttgacgccggtgatctcgacatagaggacgacatgaaggcacagatgaactgcttttatctgaaggcccttgacggatttgtgatggtgctcactgacgacggcgacatgatttacatttcggacaatgtcaacaaatacatgggcctcactcagtttgagcttaccggacactccgtgtttgatttcactcatccctgcgaccacgaggagatgagggagatgctcacccatcgcaacggactcgtcaagaaggggaaggaacaaaacacccaaaggtccttcttccttcgcatgaagtgtactctcacctcgcgcgggcggaccatgaacattaagagcgcgacttggaaggtgctgcattgtactggtcacattcatgtgtacgacaccaattcgaatcaacctcaatgcggatacaaaaagccaccaatgacttgcctcgtgcttatatgcgaaccaattccacatccatcgaacattgagattccgctcgattccaagacgtttctgtcacggcattcgctcgatatgaagttttcatactgtgatgaaaggattactgaactcatgggctacgagccagaggaattgctgggcagatccatttacgaatactaccacgcattggatagcgatcatcttactaaaacgcatcatgacatgttcaccaagggtcaagtgaccaccggacaatacagaatgctcgcgaagcggggaggatatgtctgggtggaaacccaggcaactgtgatttacaacactaagaattcccagccccaatgtatcgtgtgtgtcaactatgtggtgtcgggcattattcagcatgaccttatcttctcactgcaacagactgaatgtgtgctgaagcctgtcgaatcgagcgacatgaaaatgactcagctttttactaaggtggagagcgaagatacctcaagcctctttgataagctcaagaaggagcctgacgcattgaccctcctcgcccctgcagcgggggataccatcatatcattggattttggaagcaacgatacggaaaccgacgaccagcagctggaagaagtccctctttacaacgatgtcatgctgccgtcgcctaacgaaaaactgcaaaacattaacctcgctatgtcgccactgcccactgcagaaactccgaagcccctgagatcgagcgccgatcctgcccttaaccaggaggtggccctgaagctggagccaaaccctgaatcccttgaactcagctttaccatgccacaaattcaggaccagaccccttcgccctcggatgggtcaacccgacaatcctcccctgaacctaacagcccgtcagaatattgtttttacgtggactctgatatggtgaatgagttcaagttggaactggtcgagaaacttttcgccgaagataccgaagctaagaaccccttctctacccaagataccgatcttgatttggagatgctggcaccttacataccaatggatgatgattttcagttgcggagcttcgatcagctgtcgccactcgagtcatcctcggcttcgcctgagtcggcatccccacaatcgacggttaccgtgtttcaacagactcagatccaggaacctactgcaaacgcaactaccaccaccgcgactacggatgagctcaaaactgtcactaaggatcgcatggaggatatcaaaattcttatcgcctccccttcgccgacgcatatccataaggaaaccacctccgcaacttcgtctccttaccgggatactcaatccaggaccgcatccccgaatcgtgcaggcaagggcgtgattgagcaaactgaaaagagccacccccggagcccaaatgtgctctcggtcgccctttcgcagcggaccactgtcccggaggaagagttgaatcctaagatacttgcattgcaaaatgcacagcgaaaacgcaagatggaacatgatggctcactgtttcaagcagtgggaattggaactctgctccagcaaccggacgaccacgcagcaacgacctcactctcatggaagagagtgaagggatgtaagtcctcagaacaaaatggcatggaacagaaaacgatcattttgattccttcggacctggcctgtcgtctcctgggtcaatcgatggatgaatccgggcttccacagctgacctcgtacgattgtgaggttaatgcccctatccagggaagcagaaacttgcttcagggggaagaacttcttagagccctcgatcaggtgaat

SEQ ID NO: 118562 - DNA, 2478 bp, Artificial Sequence
  derived and/or modified sequence
atggaaggtgccgggggagcgaacgataagaagaagatctcatccgaacgtagaaaggaaaagtcccgcgatgccgcacgctccagaagaagcaaggaatccgaggtgttctatgagctcgcccatcaactcccgcttccacataatgtgtcgtcgcaccttgacaaagcgtcagtgatgagactgactatctcatacttgagggtgcggaagctccttgatgccggagatctggatatcgaggatgatatgaaggcccagatgaactgcttctatcttaaggcactggatggcttcgtgatggtgcttactgacgacggcgatatgatctacatttccgacaacgtcaacaagtacatgggtctgacccagtttgagctgaccggacactccgtctttgattttacccacccttgcgatcatgaagaaatgcgcgaaatgctcactcatcgcaatgggttggtgaagaagggaaaagaacaaaacactcaaagatccttttttctgcgcatgaaatgtactctgacctcaagaggaagaaccatgaacattaagtcggcaacgtggaaggtgctccattgtaccggacacatacatgtgtacgacactaactccaaccagccacaatgcggttacaagaagcctcccatgacctgcctggtgctgatctgcgaacctatcccgcacccatcaaacatcgaaatcccgcttgattcaaagacctttctctcaaggcattctcttgatatgaagttttcctactgtgatgagcgcatcactgaacttatgggttacgagccagaagaacttctgggacgttcaatctacgagtactaccatgcactcgactctgatcaccttactaaaactcatcatgacatgttcactaagggtcaagtcaccaccggccaatacaggatgctcgcaaagcgaggaggttacgtctgggtggagactcaggccactgtcatctacaacaccaaaaacagccaaccccaatgcatcgtgtgcgtgaattatgtggtgagcggaattatccaacacgacttgatctttagcctgcagcagaccgaatgtgtcctcaaaccagtggagtcatccgacatgaagatgactcaactgtttacgaaagtggagtccgaagatacctcgagcctgtttgacaaacttaagaaagagcccgacgcccttacgctccttgctccagcagccggggatacgatcatttcgctggatttcggcagcaatgacaccgaaaccgatgaccagcagttggaggaggtccctctttacaacgatgtcatgcttccctcaccaaacgaaaagctccaaaacattaatctggcgatgtctccactgccaacggccgagacgcctaaaccattgcgatcctcggcagaccccgccctcaatcaagaagttgcgctgaagttggagccaaacccagaatcccttgaactcagcttcaccatgccacagatccaagatcaaaccccaagcccaagcgatgggtctacccggcaatcgtcccccgaaccaaactcgccctcggaatactgtttctacgtcgactccgacatggtgaatgagttcaagctggagctggtcgagaaactttttgcagaagataccgaagccaaaaacccttttagcacgcaggataccgatcttgaccttgaaatgctggctccgtacatacctatggatgatgatttccaattgcggagcttcgatcagctgtcgcccctggaatcgagctccgcaagccccgagtcggcaagcccgcaaagcactgtgaccgtctttcagcaaactcagatccaagagccaaccgcgaatgcgaccacgacgactgcaactactgatgaactgaaaaccgtgactaaggataggatggaggatatcaaaattcttattgcctcccctagcccaactcacatccacaaggaaaccacttccgccacctcatccccgtacagagacacccaaagcagaacggcatcgcccaacagagccggaaagggagtgattgaacagacggagaaaagccatcctcgaagcccaaacgtgctctccgttgcactctcacaacggaccaccgtgccggaagaagaactgaaccctaagatactggcactgcagaatgcccaacggaaaagaaagatggaacatgacggctctctctttcaagccgtgggaattggtaccctgcttcagcaaccagacgatcatgcagcgaccacttcgctttcgtggaagcgcgtcaagggttgcaagtcgtccgagcaaaatggaatggagcaaaagaccataattcttattccttcagatcttgcatgtagactgctcggtcagagcatggatgaatcggggctgcctcaactgaccagctacgattgtgaagtgaacgctcctattcaggggagccggaacctgctgcaaggagaggaactcttgagggcactcgatcaggtgaat

SEQ ID NO: 118563 - DNA, 2478 bp, Artificial Sequence
  derived and/or modified sequence
atggaaggcgccggaggagcaaacgacaaaaagaagatctcatcagaaaggaggaaggagaagtcgcgcgatgcggcccgatcccgccgaagcaaggaaagcgaggtgttttatgagctggcacatcagcttcctctgccacataacgtgtccagccatctcgataaggcctcggtgatgcgattgactatatcgtacctgcgagtgcgaaagctgcttgatgcgggggacctggatattgaggacgatatgaaggcccagatgaattgtttttacctgaaggctctcgatggttttgtgatggtccttaccgatgatggggatatgatttacatttcggataacgtgaataagtacatgggattgacccaatttgaactcacgggccatagcgtgtttgattttactcacccttgtgatcacgaagaaatgcgggagatgcttactcatagaaacggactggtgaagaagggtaaggaacaaaacactcaaagatcgtttttccttcggatgaagtgcaccctgacttcaagaggaaggaccatgaacataaagtcagcaacctggaaggtgctgcactgtacgggacatatccatgtttacgatactaactcaaaccagccccaatgtgggtacaaaaagcctcctatgacttgcctggtgctcatttgtgaacctattccgcacccctcgaacatagaaattcctctcgactcaaagactttcctctcccggcattccctggacatgaagttttcctactgcgacgaacgcataactgagcttatgggatacgagccagaagaactgctggggaggtctatctacgagtactaccatgcgctcgactctgaccatctgaccaagactcatcatgatatgtttaccaagggacaggtcactactggacagtacaggatgctggcaaagcgcggaggatacgtgtgggtggaaacccaagccaccgtgatttacaatacgaagaatagccagccacagtgtattgtgtgcgtgaattacgtggtgtccggtatcattcagcatgatctgatctttagcctgcagcaaaccgaatgtgtcctgaaacccgtcgaatcgtccgacatgaagatgacgcagctgtttactaaagtcgagtccgaagatacttcgtcgctttttgataaacttaagaaggaaccagacgcacttactcttctggcgcctgcagctggtgatacgataatctcccttgattttggatcgaatgataccgaaaccgatgaccagcaactggaagaggtgccactttacaacgatgtgatgctgccatcgcctaacgaaaaactgcagaacattaatcttgcaatgtcgcccctgccaaccgcggaaaccccgaagccacttcgctccagcgcagaccctgcgctgaaccaagaggtcgcactcaagctcgaacctaaccctgagtcgcttgaactttcatttacgatgccacagatccaggatcaaactccgtcgccttccgacggatccactagacaatcgtcgcccgaacccaattcaccaagcgaatactgtttttacgtggattctgatatggtcaacgaattcaagctggagttggtcgaaaaacttttcgccgaagatactgaagccaaaaacccattcagcactcaagacaccgatttggacctggaaatgcttgcaccttacatccctatggatgacgatttccaactccggagctttgatcaactttcgccacttgaatcatcgagcgcatcaccagaatccgcctcgccccagtcgactgtgacggtttttcaacagacccagattcaagaaccaacggcaaacgcaaccaccaccactgcaactactgatgagctgaaaaccgtgaccaaggaccgcatggaagatatcaagattctcatagcctcgccatccccaactcacattcataaggaaacgacttcagcaacctcgtcgccttacagagatactcagtcgaggaccgcatcgcctaaccgggcaggaaagggcgttatagaacagactgagaagtcgcaccccagatcacctaatgtgctttccgtcgccttgtcccagcgcactaccgtgcccgaagaagaattgaacccaaagatcctcgcacttcaaaacgcacaaaggaaaaggaaaatggaacacgatggatcgttgtttcaggcagtcggtatcggaaccctcctgcaacaaccagatgatcatgcggcaactacctcgctgtcatggaaacgggttaaaggttgtaagtcatctgaacagaatggaatggaacaaaagaccataattctgatcccctccgatctggcgtgcagactcctcggacaatccatggatgaatccggcctgccacaacttacttcatacgactgtgaagtcaacgcccctattcagggctcacgaaaccttctccaaggtgaagagctgcttagagccttggaccaggtgaac

SEQ ID NO: 118564 - DNA, 2478 bp, Artificial Sequence
  derived and/or modified sequence
atggagggggcgggtggggcgaatgataaaaaaaagatttcctctgaaagaagaaaggagaaatcccgggacgccgctcggtccaggaggtccaaagagtcagaagtcttttatgaactggcccatcagctccctttgcctcacaatgtcagttcccacttagacaaagcgtcagtgatgcgactaactataagttatctgagagtcagaaagctattggacgctggtgacttggacatcgaggacgatatgaaggcccagatgaattgtttttacctgaaggccttggatggctttgtcatggttcttaccgacgacggcgacatgatctacatctctgataacgttaataagtacatggggctaacccagttcgaactgaccggccattcagtattcgatttcactcacccctgcgaccatgaagaaatgcgggaaatgctgactcataggaatggcttggtcaaaaagggcaaggagcagaacacccagagatcgttcttcctgcgaatgaaatgtaccttgacaagccgcggcaggacaatgaatataaaaagtgcaacgtggaaagtcctgcattgtacagggcatatccacgtttacgatacgaactcgaatcagccccagtgcggatacaaaaaaccccctatgacgtgcctggtcttgatctgcgagccaataccccacccgtccaatatcgaaatcccgcttgattccaaaacctttctttcccgccactccttggatatgaagttctcgtactgtgacgagagaatcacagagctgatgggttacgaacccgaggaactgctcgggcggagcatatacgagtactatcacgccctagactcagaccacttgactaagactcatcatgacatgttcacaaagggccaggtgaccaccggacagtatcgcatgttggcaaaacgtgggggctacgtgtgggtggagactcaggccaccgtgatttacaacacgaagaattcccagccgcagtgcattgtatgcgtgaactacgtggtttctgggattatccaacacgacctgatcttttccctccagcagactgaatgcgtgctgaagcccgtggagtcttcagacatgaaaatgacacaattgtttactaaagtggagagcgaagacacgtcttccctgtttgataaacttaagaaagaaccagatgccctgacgcttctcgctcctgccgctggggacacaattataagcctggactttggttccaatgacactgagaccgatgaccagcagctggaagaggtccccctgtacaatgatgtgatgctgcctagtcctaacgagaaactgcagaacatcaatctggccatgagtccgctgcccaccgcagagactccaaagccccttagaagttccgccgatcctgcactgaatcaggaggtggctctgaagttagaacccaacccggaaagtctagagctctcattcacaatgccccagatacaggaccagacaccctcacccagtgacgggagtacccggcaatcaagtccagagcctaatagcccctcagagtactgtttctacgtggattccgatatggtgaacgagtttaaattagagctggtggaaaagctgtttgctgaggacacagaggcaaaaaatcctttttccacacaggatacggatttggacctggaaatgctggctccatacatccccatggatgatgatttccagttaagaagtttcgatcagctgtcgccgctagagagttcgagcgcgagccccgagtccgcatccccccagagcactgtgaccgtgttccagcagacacagattcaggaaccaaccgccaacgcaaccactacaacggcaaccactgatgaactgaaaaccgtgacgaaggaccgcatggaagacattaagatcctgattgcatctccatcccctacgcacatacacaaagagaccaccagcgcgacctccagtccctatcgcgacacccagtccaggacagcctcgccgaacagagcgggaaagggagtgattgagcaaactgaaaagagccatcctcgaagccccaatgttctgagtgtggcgctgtctcagaggactaccgtccccgaagaggagctgaacccaaaaatcctcgctctgcagaacgcacagcgcaagcggaagatggaacatgatggctcccttttccaggcggtaggcatagggacgctgctgcagcagccggacgatcatgctgctaccacctcacttagttggaagagggtaaaaggttgtaagtctagcgaacagaatggaatggagcaaaagactatcatcctgatccccagcgatctcgcctgccggttgcttggccagagcatggacgaaagcggactccctcagttaacctcatacgattgtgaagttaacgctcccattcagggcagcagaaatctgttacagggggaagagttgcttagggctctcgaccaggttaat

SEQ ID NO: 118565 - DNA, 2478 bp, Artificial Sequence
  derived and/or modified sequence
atggagggagctggaggcgcaaacgataagaaaaagatctcaagcgagcgtagaaaagagaaatccagggatgcagccagatcacgtcgttctaaagagagcgaggtgttttacgaactagctcaccaactgccactgcctcacaatgtcagtagccatctggacaaagcctctgtcatgcgtcttaccatcagttacctcagggtccgtaaactattggatgcaggggatctggatatcgaagatgacatgaaagcccaaatgaactgtttttatctcaaagccctcgatggtttcgtcatggtgctcactgatgatggcgacatgatctatatctccgataacgtgaataaatatatgggactcacccaattcgagctaacaggccattctgtcttcgatttcactcatccctgcgaccacgaggagatgagggagatgcttactcaccggaacggcctggtcaagaaggggaaggaacagaacactcagcgaagtttcttccttagaatgaagtgtacactcaccagtcgcggacgcactatgaacataaagtcagctacctggaaggtcctgcactgcacaggacatatacacgtatatgatacgaactccaatcagcctcagtgtgggtacaaaaaaccacccatgacatgcctggtgctaatctgcgaacccatcccacaccctagcaacatagagatcccactggattcaaagacattcctgtctaggcacagcttggacatgaaattctcttactgcgatgaaagaataacagaactcatggggtatgaaccagaagagctcctcggacgttctatctatgagtactaccatgcgctggactccgaccaccttaccaagacccaccatgacatgtttacgaaaggtcaggttacaacaggacaatatcgaatgctggcgaagcggggaggctacgtgtgggtcgaaacccaggccaccgttatctacaacactaagaattctcagccacagtgtatcgtgtgtgtgaactacgtggtgtctgggatcatccagcacgatctcatattctctttgcagcagactgaatgcgtgctgaagcccgtggagtctagcgatatgaaaatgacccagctcttcactaaggtggaatcagaggatacgagctcactgtttgacaagctgaagaaggagcctgacgccctcaccctgctggcacctgccgccggggatactatcatctcactggacttcggatcaaacgataccgaaaccgatgatcagcagttggaggaggtcccactttacaatgatgtcatgcttcccagtcccaatgaaaagctgcagaatatcaatctggctatgtcacccctccccactgctgagaccccaaaaccactacgttcttcagctgaccccgctcttaaccaggaagtcgccttaaagttggagcccaatccagaatccctagagctaagctttactatgcctcagattcaggatcaaacaccgagcccatcagacggtagtacacgccagtcctctccagagcctaattctccttcagagtactgcttttacgtggatagtgacatggtgaatgaattcaaattggagttggtggagaagctcttcgcagaggacacggaggccaaaaatccgttcagcacacaagacaccgaccttgatcttgaaatgcttgctccctatatcccaatggatgatgattttcagctgcgaagtttcgaccagttatctccattagaaagcagctctgcctctcctgagtctgctagtccgcaatctacagtgaccgtcttccagcaaacacagatacaagaaccaactgcaaatgcgacaacgactaccgccaccactgacgagctgaagacagtgactaaggacaggatggaggatattaaaatcctgatagcttctcctagccctacccatatacacaaagagacaacatccgccacatcttcgccttacagggatacgcagtctcgcactgcatcacccaacagagccggcaaaggagtcattgaacaaaccgagaagagtcacccccgatccccgaatgtactctccgttgccctgagtcagagaaccacagtgcctgaggaggagttaaatcccaagatcttagctctacagaatgcgcagcggaaacgaaagatggagcacgacggatcactgttccaggcggtaggtatcggcacactcctgcagcaacccgacgaccacgcagccactacctccctgtcatggaaacgcgtcaaagggtgtaagtccagcgaacaaaacggtatggaacagaagacgatcatcctgatccccagcgatttggcctgtagactgctgggccagagcatggacgagagtgggctcccccaattaacaagttatgattgcgaggtgaatgcccctattcaaggaagtcgcaacctgctccaaggcgaggagcttttacgagcactggaccaagtgaat

SEQ ID NO: 118566 - DNA, 2478 bp, Artificial Sequence
  derived and/or modified sequence
atggagggagcaggtggagccaatgacaagaaaaagatatcgtccgaaagacgtaaagagaagtcaagggatgcagcccgctcgagacgttccaaagagtcggaagtgttttacgagctggcacatcagcttcctcttcctcacaacgtgagctctcatctggataaggcatcagtcatgcgacttaccatttcgtacctgcgggtgcggaagttgctggacgctggagatctggacattgaggatgatatgaaggcccagatgaactgtttctacctgaaggcacttgatgggtttgtcatggtgctgacggatgacggcgatatgatctacatttcggataacgtgaacaaatacatgggcctcacgcagtttgaacttaccggacattccgtgtttgattttactcatccttgcgatcatgaagaaatgcgggagatgctgacccaccgcaatggtctggtgaagaaagggaaggagcaaaacacccaaagatccttctttctgcgcatgaagtgtactctgacctctcgaggccggactatgaacattaagagcgcaacttggaaggtgttgcattgtaccggtcatatacacgtctatgatacgaactcgaaccagccacaatgtggatacaagaaacctccaatgacctgtctggtgctgatttgcgaaccgattcctcacccttccaacattgaaattcctctcgacagcaaaacctttctttccaggcattccctggacatgaagttttcttactgcgacgagcgtatcactgagctgatgggctacgagccagaagaactcctgggacggtcgatttacgaatactaccacgcccttgattccgaccatctcaccaaaacgcatcatgatatgttcactaagggtcaggtgactactggtcagtaccgtatgcttgcaaaaagagggggctacgtgtgggtcgaaactcaagcaaccgtgatctataacactaagaatagccaacctcaatgcatcgtctgtgtcaactacgtggtgtcggggattatacagcatgatctcattttcagcctccaacagaccgaatgtgtgctcaagcccgtggaaagctcggacatgaagatgacccagctgttcaccaaggtggagagcgaagataccagctcgctgtttgacaaactgaagaaagaacctgacgcccttacgctccttgccccagccgcaggtgataccatcatctctctggattttggatccaacgacaccgaaactgacgatcagcagctcgaggaagtgccgctttacaatgacgtcatgcttccatcgcctaacgaaaaactgcagaacatcaatctggcgatgtcaccactgcctactgcagaaaccccaaagccacttcgctccagcgcggatcctgcactcaaccaagaggtggccctgaaactggaaccaaacccagaatcgcttgaactcagttttaccatgccgcagatccaagatcaaactccctcccccagcgatgggagcacccggcagtcaagccccgagccaaactccccgtcggagtactgcttctacgtggattccgatatggtgaatgagtttaagctcgaactggtcgaaaagctgttcgcagaggacaccgaagcgaagaacccgttttcgactcaggatactgacctcgatctggaaatgctggcaccttacatccctatggacgacgatttccagcttaggtcattcgaccagctttcgccgcttgagtcatcctccgcctccccagaatccgcctcgccccaatccaccgtcactgtttttcagcagacccaaatccaagagcctacggcaaatgcaactacgactactgcaaccaccgatgaattgaaaaccgtcaccaaggatagaatggaggacatcaaaattctgatcgcatcgccttcgcccacgcatattcataaggaaaccacttccgcaacttcgtccccttacagagatacccagtcgagaaccgcatcgccaaatagagcgggcaagggagtgattgagcagaccgaaaaaagccaccctcgttcgcctaacgtcctttcagtggcactttcccagagaactaccgtgcctgaggaggagcttaacccaaagattcttgccctgcaaaatgcacagagaaagcgtaaaatggagcatgacggatcgctctttcaagcagttggtattggtacccttcttcagcaaccagacgatcatgctgcaaccacttcactttcatggaagcgggtgaagggctgtaagtcgagcgagcagaatggaatggaacaaaaaaccattattcttataccttccgatcttgcttgccgactcctgggacagtccatggacgagtcaggccttccacaattgacctcctacgattgtgaagtgaacgcaccaattcagggttccagaaatctgctgcaaggggaagaactgctgagagcactcgaccaagtcaat

SEQ ID NO: 118567 - DNA, 2478 bp, Artificial Sequence
  derived and/or modified sequence
atggaaggggctgggggggcgaatgataagaaaaagataagttctgaacgaaggaaagaaaaatcacgggatgcagccagatccagaagatcaaaagagagtgaagtattttacgagctggctcaccagcttcccctacctcataatgtgtcctcccacttagacaaggcatctgtgatgagacttacaatatcttaccttcgggtgagaaaactattagacgctggagacctggacatagaggacgacatgaaggcccagatgaactgtttctatttaaaggcactggatgggtttgttatggtcctcactgatgacggggatatgatctacatatctgataatgtgaacaaatatatgggactaactcagttcgaactcacggggcattctgtttttgactttactcacccatgtgatcatgaagaaatgcgggaaatgctaactcatcgcaacgggcttgtgaaaaagggaaaagaacagaatactcaaagatcgttttttctgcggatgaaatgtacactgacttctagggggcggactatgaatatcaaatctgccacatggaaagtccttcactgcactgggcatatccacgtctacgatactaactcaaatcagccccagtgtggatataaaaaaccacctatgacttgtctcgtcctaatctgtgaacctatcccccatccatcaaacattgaaataccccttgattccaaaacttttctgtccagacacagtcttgatatgaaattctcctactgcgatgaacggatcactgagctcatggggtatgagccagaagaactattagggaggtctatttatgagtattaccatgccctagactctgatcatcttacaaaaacacatcatgatatgttcacaaaagggcaggtaacaacaggacaatatagaatgcttgctaaacggggaggatatgtgtgggttgaaactcaagcaacagtgatctataatactaagaactcacagccccagtgtattgtatgtgtgaattatgttgtgagtggaatcattcagcatgatttaatatttagtctccagcagactgagtgcgtgttaaaacctgttgaatcttctgatatgaaaatgacacaattgtttacaaaagtggagagtgaagacacaagttccctcttcgataaattaaagaaagagcccgacgcactcacactgctagctcctgccgccggggacactatcatttccctggatttcggaagtaatgatacagaaactgatgatcagcagctcgaagaggtccctctttataacgacgtgatgctgccctctccaaatgaaaaactccagaacatcaatttggcaatgtcacctctgccaacagccgaaacacccaaacccctaagatcaagtgccgatcctgctctgaaccaggaagtagctctcaaattagaaccaaatccagaatcattggaactctcttttacaatgcctcagatacaggaccagacacccagtcctagtgatggatcaacacgccaatcaagtccagaacctaactccccctccgaatattgtttctacgtggattctgatatggtcaacgaatttaaacttgaattagtagaaaaactatttgccgaggatacagaagcaaagaatcctttctctactcaggatacagatcttgatcttgaaatgctggccccctatatccccatggatgatgattttcagctgcggtctttcgatcagctgtctccccttgaatcatcatcagcatcccccgaatctgcaagtccacagtctacagtgactgtatttcagcagacacagatccaggaacccactgccaatgccacaactacaactgcaacaacagatgaactcaaaacagtaactaaagacaggatggaggatatcaagattctaatagcttctccaagtcccacacacatacataaagagactacttctgccactagtagtccctatagggatacacagtcaagaacagcctctccaaacagggctggaaaaggggttatcgaacaaacagagaagtctcatcctcggtccccaaacgttttgtcggtcgcccttagtcagagaacaactgtgcccgaggaggaacttaatcctaagatccttgccctccagaatgcacagcgaaaaagaaaaatggaacatgatggatccctcttccaagctgtggggatcgggacgcttcttcaacagccggatgatcacgcagctacaacaagtctctcctggaaacgagtgaaaggatgtaaatcttctgaacagaatggaatggagcagaaaacgatcatactcatcccttccgatctggcttgtaggctactcgggcagtccatggatgaatctgggttgcctcagctcacatcctatgattgtgaagtgaacgcaccaatccaggggtctcggaatcttctgcagggggaagaactgttacgggctctggaccaggtgaac

SEQ ID NO: 118568 - DNA, 2478 bp, Artificial Sequence
  derived and/or modified sequence
atggaaggcgctggcggggccaacgataaaaagaaaatttcatccgagcgcaggaaagagaaatcaagagatgccgcaagatcaagaaggagcaaagagagtgaggtattttacgagctggcacatcagctgccactgcctcataatgtttcttcccatctggataaagcaagcgtcatgcggctgactatttcatatcttcgagttcgcaagctgctggacgcgggcgaccttgatatcgaggatgacatgaaagctcagatgaactgcttttatctcaaagcgctggatggtttcgtgatggtcttgacagacgatggggacatgatttacataagcgacaacgttaataagtatatgggattgacacagttcgagctgacaggacacagtgttttcgactttacacacccatgtgatcatgaagaaatgcgggaaatgttgacccatagaaatggactggtgaagaaaggaaaggaacagaacacccaacgaagctttttcctccgaatgaaatgtaccctgacgagccgaggaagaacaatgaacataaaaagcgccacatggaaggtgttgcactgtactggacatatacacgtctatgacacaaatagcaaccagccacaatgtggctataagaaaccaccaatgacttgtttggttctaatctgtgaacctattccccacccctcaaacatcgagatccccctcgatagcaaaacattcttgagtcgtcattccttggacatgaagttttcctactgtgatgaaagaataactgagcttatggggtacgagcccgaggagctgcttgggcgaagcatttacgagtactaccacgctttggactccgatcacctcacaaagacacaccatgatatgttcacaaagggtcaggtcacgaccggacagtatcggatgctggcgaagcgcgggggctatgtgtgggtggaaacccaagccacggtgatctataacaccaagaattctcagccccagtgtattgtttgtgtgaattacgtggtaagcggaatcattcagcacgatcttattttctctctccaacagacggagtgcgttctgaaacccgtggagagctctgacatgaagatgactcaactgttcactaaggtggagagtgaggacacatcctccttatttgataagttaaagaaagaacctgatgcactcacactgctggcgcccgcagcaggagataccatcatatctctggattttggctctaacgacactgaaactgacgaccagcagctcgaggaggtgcccttgtataacgacgtcatgctgccttcacccaatgagaagctgcaaaatatcaatttggccatgtctcccctacccactgcagagactccaaaacccctccggagcagcgccgatccagcacttaaccaagaggttgctcttaagctggaacctaaccccgagagtcttgaactcagctttacaatgccacagatccaggaccagactccatccccttccgatgggagcacgcgacagtcctctccggaacccaactctccttccgaatattgcttctacgtcgactctgacatggtgaatgaattcaaactggaattggtggaaaagttattcgccgaggacaccgaagcgaaaaatcctttttcaacgcaggacactgacttggacctagagatgctggcgccctatatccccatggatgatgactttcagcttcgcagctttgatcaactcagccccttggagtcctcctcagcatcgcccgagtcggctagtcctcaatccaccgtgacggtgttccagcaaacccagattcaggagcccaccgctaacgccaccactacgacagctacaactgatgaactcaagactgtcactaaggataggatggaggacattaagattctgattgccagcccctcgccaacccacatccacaaggagacgacatctgccacaagctccccctacagggatacccagtccaggacagcctcccccaatcgagccggaaagggggtgatcgagcagacagagaaatcgcatcccagatcccctaacgttctgtctgttgcactgtcacaaagaacaacagtgcccgaggaagagctgaatcctaaaatcctagcgctccagaacgctcaaaggaagcgaaaaatggagcatgatggcagcctgttccaggccgtcggcatagggaccctgctgcagcagccggatgatcacgctgctacgacatctctttcctggaaacgagtaaaggggtgtaaaagttcagagcaaaatggtatggaacaaaagaccataatcctcattccctccgacctggcatgtaggctcctcggccagtccatggatgagtccgggttaccccagctcacctcttatgattgcgaggttaacgctccaatccaggggtctagaaacctcttacagggcgaggagctcctgagagccctggatcaggtgaac

SEQ ID NO: 118569 - DNA, 2478 bp, Artificial Sequence
  derived and/or modified sequence
atggagggagctggaggtgccaacgacaagaagaagatctccagcgaacggcgaaaagagaagagtcgcgatgccgcccggtcgcgtcgatccaaagagtccgaggtcttttacgaactggcccaccagcttcctctccctcacaacgtgtctagccatctcgataaagctagcgtgatgaggctgacaatttcctacttgcgggtgagaaaactcttagatgccggcgacttggatattgaagacgacatgaaagcccagatgaattgtttttatctgaaggccctggatggcttcgtgatggtgctaacagacgacggagacatgatctatatctcagataacgtgaacaagtatatggggttgacacagtttgagctgaccgggcactctgtctttgactttacccatccctgtgaccacgaagaaatgcgcgaaatgctgacgcatcggaacgggttggtgaaaaaaggcaaggagcaaaacactcaacgttcatttttcctgagaatgaaatgtacattgacttcaagaggtaggacgatgaatataaaatcagcgacgtggaaggtgctccactgcacgggacacatccacgtttacgacaccaatagcaaccagccccagtgcggatacaaaaagccaccaatgacatgtctggtcctgatttgtgaaccaatcccacatcctagtaacatcgagattccattagatagtaagacattcctaagcaggcacagtctcgacatgaagttttcctactgtgatgagcggataaccgagctgatgggctacgagcccgaggagctgctgggtcggtctatctatgagtattatcacgctttggacagcgaccatctgactaaaacccatcacgatatgttcaccaaaggccaggtgaccacaggacagtatcggatgttagccaagcgaggcggctatgtgtgggtggagacccaggccaccgtgatttacaacaccaaaaatagtcagcctcagtgcatcgtctgtgtgaactacgtggtcagtggcatcattcaacacgatctgatcttctcactccagcaaacagaatgtgttctgaagcccgttgaaagctctgacatgaagatgacccagctttttaccaaggtcgagagcgaggacacttccagcttatttgataagcttaaaaaagaacccgatgcgttgacgctcctcgcacccgctgccggggacaccattatttctcttgactttggctccaatgataccgaaactgacgaccagcagctggaagaggttcccctgtacaacgatgtaatgctgcctagccccaatgagaagctgcagaacatcaacttagccatgagtccactgcctaccgctgaaacacctaaaccactgaggtcctctgcagaccccgccttaaaccaggaggtcgcgctgaaacttgaaccgaatcccgagagcctggagctatcctttactatgcctcaaattcaggaccagacgccctcgccttctgacgggagcaccaggcagtccagcccggagccaaatagccctagtgaatactgtttctatgtcgactctgacatggtaaacgagtttaaacttgagctcgtcgagaagctcttcgctgaggatactgaagccaagaaccctttttccactcaggataccgacctggacctggaaatgctggccccctacattccaatggacgacgatttccaactccgctcattcgatcaactatctcccctcgagtcctcctccgcctccccagaaagcgctagcccacagagcaccgttaccgtgttccaacagacacagatccaagagccaaccgcaaatgcgaccaccaccaccgctaccacagacgagctgaaaactgtaacaaaggacagaatggaggacattaaaatacttatcgcgagtccaagcccaacccacattcacaaggaaaccacatccgcgaccagctcgccttaccgtgacactcagtctcgcactgcatcccctaacagagcaggcaaaggcgtgatagaacagactgagaagtctcacccgcgcagtcccaacgtcctaagtgttgctttgtcccagcggaccacggtgcccgaggaggagctgaatccaaagattctggcccttcaaaatgctcagcgcaagaggaaaatggagcacgatggttccctattccaggccgtgggtatcggtactctcctgcaacaaccagacgaccatgcagctacgacctctttgagctggaaaagggttaagggatgcaaaagttccgaacaaaatggtatggagcagaagacaataattttgatccccagcgacctcgcttgcagactgctgggccagagcatggacgaatccggcctcccccaactgacgtcctatgactgcgaggtgaatgcccctattcaaggtagcagaaacctcctgcagggtgaggagctactgcgagcgctggaccaggtgaac

SEQ ID NO: 118570 - DNA, 2478 bp, Artificial Sequence
  derived and/or modified sequence
atggaaggcgctgggggtgctaacgataaaaaaaaaatttcatcagaacgtcgaaaagaaaaatcacgggatgccgctcgatcgcgccgcagcaaggaatccgaggtattctacgagctggcacaccagcttcctcttccgcataacgtgtcttctcatttagacaaagccagtgtgatgagattaactatttcgtaccttagggtgaggaagcttctggatgccggcgatctggatatcgaagatgatatgaaagcacagatgaattgcttctatctgaaggcacttgatggtttcgtgatggtgcttacggatgatggagatatgatttatatctctgataatgtaaataaatatatgggtttaacccaattcgaactcacagggcattcagtatttgattttacacacccgtgcgaccatgaagaaatgcgcgagatgcttactcatcggaacggactcgtgaaaaaggggaaagaacagaacacgcaacgcagtttttttttgagaatgaagtgcacactgacaagcagaggacgtacaatgaatatcaaaagtgcaacatggaaggtgcttcattgtacgggacatattcacgtttacgatactaattcgaatcagccgcagtgtggctataaaaagccgccgatgacgtgccttgtgctcatctgcgaaccgataccccacccgtcaaacattgaaataccgttagactcaaaaacattcctttcgaggcattcgttggatatgaaattcagctactgcgatgagaggatcacagaactgatgggctatgaaccggaagagttacttggacggtcgatttatgaatactatcatgcattagattccgatcatctcacgaaaactcatcatgacatgtttaccaaaggccaggtcacaactggccagtataggatgttggcgaaaagaggtggttatgtgtgggtagaaacacaggctaccgtcatctataatacaaaaaactctcagccacagtgtatagtgtgtgtgaactatgttgtttctggcattatccaacatgatctgatctttagcttgcagcaaaccgaatgtgtgctgaaacctgtggagtcatctgatatgaaaatgacacaattgtttacgaaggtggaatccgaggatacgagttctctttttgacaaactgaaaaaagagcctgatgcattgacgttgttggcaccggcagcgggcgatacaatcatcagccttgactttggcagcaacgacacggagacagatgaccaacaactggaagaggtcccgttatacaatgacgttatgttgccgtccccaaacgagaagctccaaaatataaatctagcaatgagcccgcttcctacggcggagacacctaagccccttagaagttctgcagatccagcgttgaatcaagaagtcgcgctgaagttagagcccaatcctgaaagtctcgagcttagctttaccatgccccagattcaggatcaaacaccgagtccgagtgatgggtcaacccgccagtcgtctccggagcctaactcgcctagcgagtattgcttttatgtcgatagtgacatggttaatgaatttaaactggaactcgtcgaaaaattattcgctgaagatactgaggctaaaaacccgttctcgacacaggatacagatctggatcttgaaatgctggccccgtatattccaatggacgatgacttccagcttcgctctttcgatcaattaagtccattagagtcttccagtgcgagcccggagtccgcatccccgcagtcaaccgttacagtgttccagcaaacgcaaatccaagaaccgacggctaacgccactaccacgacggctacaaccgatgagttaaaaacggtgaccaaagatcgcatggaagatattaagatccttattgctagtccgagtccaacccatattcataaagaaacaacatctgcgacatctagtccgtatcgagatacgcagtcaagaacagcctctccgaacagagcaggtaaaggcgtaatcgaacaaacagaaaagtcacacccacgttcccccaatgttcttagtgttgccttatcccagcggactacagtgccagaggaagaactcaatccgaaaatacttgcgttacaaaatgcgcaacgaaaacggaagatggaacatgatggcagtctgttccaagctgtaggcattggcacgctccttcaacagcctgatgatcatgctgctacgacatctctgtcatggaaaagggttaaaggctgcaagtcatcagaacaaaacggaatggaacagaaaacaatcatcttaattcctagcgacttagcatgtcggttattaggccaatcaatggatgaatctggcttgcctcaattgacgtcctatgactgcgaagttaatgcaccgattcaaggatcacgcaatcttttacaaggagaagaattgttgcgtgcactcgaccaagtgaac

SEQ ID NO: 118571 - DNA, 2478 bp, Artificial Sequence
  derived and/or modified sequence
atggaaggagccggtggtgctaacgacaagaagaagattagcagtgagcggcggaaagaaaaatctcgcgacgccgctcgcagccggcgcagcaaggagagcgaagtcttctacgagttggcacatcagctacccctgccccataatgtgtcatctcatttggacaaggcctcagtgatgagattgactatctcctatttgcgagttcgaaagcttctcgatgcgggagaccttgacattgaagacgatatgaaagcccagatgaactgtttctacttgaaagcattggacggcttcgtcatggtgctgacagacgacggagacatgatatatatttctgataatgttaataagtatatgggactgacacaatttgaactgacagggcattctgtgtttgattttacccacccgtgtgaccacgaggaaatgcgggagatgctaactcataggaatggattagtgaaaaagggcaaggagcagaacacccagaggtctttttttctcagaatgaagtgcacattgacaagcagaggccgcaccatgaatatcaaatcagccacctggaaagtgctccactgcaccggccacatccacgtgtacgacaccaattccaaccagccacaatgcgggtataagaagccccctatgacatgtttagtgctgatctgcgagcccatcccccacccctctaatattgagataccactagatagcaagacctttctgagtcgtcactctctcgatatgaagttctcctactgcgacgaaaggatcactgagctgatgggatatgagcccgaagagctgctcggcaggagcatctacgagtattaccacgcactcgacagcgatcacttgactaagactcaccatgacatgttcactaagggacaggtaacgacgggacaatatcgcatgcttgcaaaacggggaggctacgtgtgggtggagacccaggcaacagttatttataataccaaaaatagccaaccccagtgcatcgtttgcgtcaactatgtggtgtctgggatcatccagcatgacttgatcttcagcctgcagcagacggagtgtgtgctgaaacccgtcgagagctccgacatgaaaatgacccagctcttcactaaggtcgagagcgaggatactagctcactctttgataagcttaagaaggaaccagacgccctgactctactagccccagccgccggggacaccataatttctctcgatttcggctctaacgacacggagaccgacgaccagcagctggaggaagttccgctgtacaacgacgtcatgctaccaagtccaaacgagaaactgcagaatatcaatcttgcaatgtccccccttcccacggcagagactccgaagcctctgaggtcttccgcagacccagctttaaaccaggaagtggccttgaagcttgagcctaacccagagtccctggagctaagcttcactatgcctcagattcaagaccagactccatctccttctgatggttccacccgacaatcaagccccgagccgaactctccctctgagtattgcttctacgtcgattcggacatggtcaatgagtttaagctcgagttggtggagaagctgttcgcagaggacacagaggcaaagaacccattctctacccaggatactgacctcgacctggagatgctggctccctatatccccatggacgatgactttcaactcagaagcttcgatcaactatctcccttggagagctcttcggccagtccagagtctgctagcccgcagtctactgtaacagtctttcagcagacccagattcaggagccaacagcaaacgctaccaccaccaccgccactactgacgagttgaagactgtcactaaagataggatggaagacatcaagattcttattgccagtccgagccctacacacattcataaggagactacttcagctacgtcgtctccctaccgagacacacagtctcgcacagcaagccccaacagagctggaaagggcgttatcgagcagacagagaaatcacaccctcggtctcccaatgttctctccgtggctttgagccagcgtacgactgtgcctgaggaagaactaaatcccaaaattctcgccctgcagaacgcacagaggaagcggaagatggaacacgatgggtctctattccaggccgtggggattggaacactacttcaacaaccagacgatcacgctgctactacatctctcagttggaaaagggtgaagggctgcaaatctagtgaacagaatggcatggagcagaaaaccataatactgataccgagtgatcttgcttgccggctgctcgggcaatctatggatgaaagcggcctgccccaactgaccagctatgattgcgaggtgaatgctcccattcagggcagtcgaaacctcctccaaggagaggagttactccgggccctggaccaggtgaat

SEQ ID NO: 118572 - DNA, 2478 bp, Artificial Sequence
  derived and/or modified sequence
atggagggagcaggtggtgctaacgacaagaagaaaatctcctcggagagacggaaggaaaagagccgggacgccgcaagatcccggcgcagcaaggaaagcgaggtgttttacgagctggcccaccagcttccactgccgcacaatgtgtcatcacacttggacaaagcatcggtgatgcggttgaccatctcctacctccgggtccgcaagctgctggatgccggagatctcgacatcgaagatgacatgaaggctcagatgaattgcttctatcttaaggccctggatggattcgtcatggtgctgaccgatgacggcgatatgatctacatctccgataacgtgaataagtacatgggattgactcagtttgaactcaccgggcacagcgtgttcgatttcacccacccatgcgatcacgaagagatgcgggagatgctgactcatcggaatggtctggtcaagaagggcaaggagcaaaatacccagaggtcattctttctccgcatgaagtgcacgctgacctctcgcggtcggacgatgaacattaagagcgccacttggaaagtcttgcattgcactgggcatatccacgtctacgacaccaacagcaaccagccgcaatgcggatacaagaagcccccgatgacctgcctcgtcctgatctgtgagccaatccctcacccgtcgaacatcgagatccctttggattcaaaaacgttcctgtctcgccacagcctcgatatgaagttcagctactgcgatgaaagaatcaccgagttgatgggatacgagcctgaggaactgctggggcgcagcatctacgagtactaccacgcactcgactcggaccatctgactaaaacccaccacgacatgtttactaagggacaggtgaccaccggacagtaccgcatgctggccaagagaggaggctacgtctgggtcgaaacccaggctaccgtgatctacaacactaaaaactctcagccacaatgcatcgtgtgcgtcaactacgtggtgtcagggatcatccaacacgatctgatcttttcattgcaacagaccgaatgtgtgctcaagccagtggaaagcagcgacatgaagatgacccaactcttcactaaagtggaatcggaggacacctcaagcctgttcgacaaacttaagaaggagccggatgcactgacgctgctggctccggcagctggcgacacgattatcagcctggacttcggttccaacgataccgaaaccgacgaccagcagctcgaggaagtgccgctgtacaatgacgtcatgcttccctcgccgaacgaaaaactgcagaatatcaacctggcgatgtcccctctgccaactgcagagactccgaagccgttgcggtccagcgcagatccagccttgaatcaggaggtggctcttaagctcgagccgaacccggaatcactggagctgtcgttcaccatgccccagatccaggaccagaccccgtcgccgagcgatggatcaacgcggcagagcagccctgaaccgaactcgccttcggaatactgtttttacgtggactcagatatggtgaacgagttcaagttggagctggtggaaaagctctttgcggaagatactgaagctaagaatcccttcagcactcaggataccgatctcgatctggaaatgcttgcgccgtacatcccgatggacgacgatttccagctgaggtccttcgaccaactgtccccgctggagtcctcttccgcgtccccggagtccgccagccctcagagcactgtgacggtgttccaacagacccaaatccaagagccgactgctaacgcaactactactaccgcaaccaccgacgaactgaaaaccgtcactaaggatcgcatggaggacatcaagatcctcatcgcctcaccgtcaccgactcacattcacaaggaaactacttccgcgacctcaagcccgtacagagacacccagtcgcggactgcatcccctaatcgcgccggaaagggagtgatagaacagaccgagaagtcacaccctcggagccctaacgtcctttcagtcgccctgtcccagcgcactactgtgccagaagaggagctgaatcctaaaatcctcgctctccagaatgcccagcggaagagaaagatggagcacgacggttcgctcttccaagcggtgggcatcggcactctgctgcaacaacctgacgaccatgcggcgaccacttcgctgtcgtggaagagagtaaagggatgcaaaagctcggagcagaacggaatggagcaaaagactattatcctgattccgtcggacctggcttgcaggctcctgggacaatcgatggacgaatccggactgccacagctgacctcctacgactgcgaggtgaacgccccgatccagggtagcaggaacctgctgcagggcgaggagctgctgcgggctcttgaccaggtgaac

SEQ ID NO: 118573 - DNA, 2478 bp, Artificial Sequence
  derived and/or modified sequence
atggaaggggcaggcggcgctaacgacaagaaaaaaatctccagtgagagacgcaaggaaaagagccgcgatgctgccagatcccgacggagcaaggagtctgaggtgttctacgaactcgcgcatcagttgcccctgccacataatgtaagtagtcatctggacaaggccagcgtgatgagacttaccatttcatacctgagggtaagaaaattgctggatgcgggggacctggatatcgaagacgacatgaaggctcagatgaactgtttttacctcaaggccctggatggcttcgttatggttttgactgatgatggcgacatgatctacatttcagacaatgtgaataagtatatggggctgacacaatttgagctgaccggccacagcgtattcgactttacacatccatgtgaccacgaggagatgcgagagatgctgacccacaggaacggactggtgaaaaagggcaaggaacaaaacacacaaagaagctttttcctgcgcatgaagtgcactctgacttcccgggggaggacaatgaacataaagagcgccacatggaaagtgttgcactgcaccggccacattcatgtttacgacacaaactctaaccagccccagtgcggatacaagaagccaccgatgacctgccttgttcttatctgtgagccaattcctcatccgtctaacatcgaaataccactggattccaagacgttcctcagccggcattcacttgatatgaaattcagttattgcgatgaaaggatcacggaacttatgggctacgagcccgaagagctgctgggtagaagtatatatgagtactaccatgcccttgatagtgaccatctcactaagacccatcatgacatgttcacgaagggacaggtgactacggggcagtatagaatgctggccaagagaggtggttacgtgtgggttgagactcaagcaacagtgatttacaacaccaaaaacagccaaccacaatgcatcgtctgcgttaactatgtggtgtctggcattatacagcacgacctgattttctcactgcaacagacagaatgcgtgttgaaacctgtggagtcaagtgacatgaaaatgacccagctcttcaccaaggtggagagtgaggatacatcatctctgttcgataaactcaaaaaggagcctgatgccttgactctgctggcacccgccgccggagacacaatcatatccctcgatttcggctctaacgatacagagactgacgatcagcagctggaggaggtgcctctctacaatgacgtgatgctgccgagcccgaacgagaaactccaaaatattaatctcgcaatgtcccctctgcccactgcagaaacacccaaacctctgagatcatctgcggaccctgccctcaatcaggaagttgctctgaagctggaacccaaccctgaatccctggaactttcctttaccatgccccagattcaggatcagaccccctctccctctgatggctctactcgccagagttcacctgaacccaactcccccagtgaatactgtttctacgtagattctgacatggtaaatgagttcaagcttgagctggtggagaagcttttcgcggaagacaccgaggccaagaatccttttagcacccaggacactgatctggacctggagatgctggctccctacattcctatggatgatgacttccaattgaggtctttcgaccagctgagtcctctcgagtccagttcagctagccccgaatctgcctccccacaatcaaccgtcaccgtgttccaacagacccagattcaggagccaacagcaaacgccactactactaccgcaaccacagatgagcttaagacagttaccaaggatcgaatggaggacatcaaaatattgattgccagcccaagtccgacacacatccataaggagacaacttccgctacatcatcaccgtacagagacacccagagtcgcaccgccagtccaaatagggcgggaaagggagtgatcgagcaaacagaaaagagccacccacgatccccaaacgtgctcagcgtcgctctgtcccagcgaaccacagtacccgaagaggagctgaatccaaagatcctggcgctccagaatgctcaaagaaaacgcaagatggaacacgatggttcactgtttcaggcagtagggatcggcaccttgctccaacagcccgacgatcacgccgcaacaacctccctgagctggaagcgggtaaaaggttgtaagtcctcagagcagaacggtatggagcagaagaccataatcttgatcccttctgaccttgcctgtcggctgttggggcagagcatggatgagtcaggtctgccccagctgacttcctacgactgcgaagtcaacgcccctatccagggatctaggaacctgttgcaaggcgaagagctgctccgagcccttgatcaggtgaac

SEQ ID NO: 118574 - DNA, 2478 bp, Artificial Sequence
  derived and/or modified sequence
atggaaggcgctggtggggccaatgataagaagaagatttccagcgagagacggaaggagaaaagcagagacgccgcacggtcgcggagatccaaggagagcgaagtcttttacgaactggctcatcagttgccactcccgcataatgtctcgtcccatcttgacaaagcctcggttatgcggctcaccatcagctacctgcgcgtgcgcaagctgctcgacgctggtgatctggacatcgaagatgatatgaaggcacaaatgaactgcttttacctcaaggcccttgatggtttcgtgatggtgctgaccgacgatggagacatgatctatatctcggacaacgtgaataagtacatgggactgacccagttcgaactcaccggacactcagtctttgacttcactcacccttgcgaccacgaagagatgcgggaaatgcttacgcaccggaatggactcgtgaaaaaggggaaagaacagaacactcaacggagcttttttctccggatgaagtgcactttgacttcaagaggccggaccatgaacattaagagcgcgacctggaaagtgctgcattgtaccggtcacatccatgtgtatgacactaatagcaaccagccacagtgcggatacaagaagccgcctatgacgtgcctggtcctcatttgtgaaccgattccgcacccgagcaatatcgagatacctctggacagcaagaccttcctctcgcgccactcgctcgatatgaagttcagctattgcgacgaacgaatcactgagctgatgggatacgaacccgaggaactgctcggaagatccatctacgagtattaccatgccctggactcagatcacctcactaaaactcatcatgacatgttcaccaagggtcaagtgactacgggacagtacagaatgctcgccaagcggggcggttacgtgtgggtggaaacccaggccactgtcatctacaacactaagaattcccagccgcaatgtatcgtctgcgtcaattacgttgtgagcggaatcatccagcacgatctgattttctccctccagcagactgaatgcgtgctgaagccggtggagtcgtcggacatgaaaatgacccagctgttcactaaagtggagtcggaggacacctcatccctgttcgacaagttgaagaaggaaccggacgcccttactctgctggcccctgccgcgggagacacgatcatttcgctggatttcggcagcaatgacactgaaactgatgaccaacagctcgaagaggttcctttgtacaacgatgtgatgctcccaagcccgaacgaaaaactgcagaacatcaatttggccatgagcccactcccaactgccgagactcctaaaccgctgagatcgagcgccgacccggcgttgaaccaggaagtggcactgaagctggaaccaaatccagaaagcctggagctctcattcaccatgccgcaaattcaagatcagactccttccccgtcggatggatcgactaggcaatcgtccccggaaccgaactccccgtccgaatactgcttttacgtcgactcggacatggtgaacgagttcaaactggagttggtggagaagctgttcgccgaggatactgaagccaaaaatcctttctcaacccaggacaccgacctcgatctggagatgctcgcaccatacatccccatggacgacgacttccaactgagatccttcgaccagctgagcccgcttgaatcgtcctcagctagcccggaatccgctagccctcagagcacggtcactgtctttcaacaaacgcagatccaagaacctaccgcaaatgccactactacgaccgccaccacggatgaactgaaaaccgtgactaaagatcgcatggaggacatcaagattctcatcgcctccccgtccccgacccacatccacaaggaaactacttcggctacttcctctccatacagggatactcagagccgcacggcgtctcctaaccgcgcaggaaagggcgtgatcgaacagaccgaaaagtctcaccctcggtcgccgaatgtcctgtccgtggccctgtcgcagaggactactgtgcctgaagaggagcttaatccgaagatcctggcactccaaaacgcacagcggaagcgtaagatggagcatgatggatcgctgttccaggctgtgggtatcggaaccctgttgcaacaaccagacgatcatgccgcaacgacttcccttagctggaaaagagtgaaaggttgcaagtcgtcagaacaaaatggcatggagcaaaagactatcatcctgatcccatccgatctcgcctgtaggctgctgggacagagtatggacgaaagcggacttccacagctgacttcctacgactgcgaagtgaacgccccaatccagggatcccggaacctgcttcagggcgaagagctgctgagagcactcgaccaagtgaac

SEQ ID NO: 118575 - DNA, 2478 bp, Artificial Sequence
  derived and/or modified sequence
atggaaggcgctggcggggctaacgacaagaaaaagatctctagcgagcggagaaaggaaaagtctcgcgacgctgccaggtcacgccgtagcaaggagagtgaggttttctacgagctcgcccatcagctccctctccctcacaatgtgagcagccacctagacaaggcctcggtgatgcggctcactatttcctatttgcgagtgagaaagctactcgatgcaggcgacctggatatcgaggatgacatgaaggcccagatgaactgcttctacctaaaggctttggatggtttcgttatggttttaaccgatgacggtgatatgatctacatcagtgacaatgtcaacaagtacatgggcctaacccaattcgagcttacgggccacagtgtctttgatttcacccacccatgcgatcacgaggagatgagagaaatgctgacccatcgtaacgggctcgtcaagaagggcaaggagcagaacacccagcgtagtttcttcctacggatgaaatgtaccttgacatctcgcgggcgtaccatgaacatcaagtcggccacctggaaggtgctccactgcactgggcacatccacgtgtacgacaccaactctaaccagccccagtgcggctacaagaagcctcccatgacctgtctcgttttgatctgtgagcccattccccacccttcgaacatcgagattcccctggattcgaagacctttctgagccggcactcgctggatatgaagttctcctactgcgacgagcgtatcaccgagctcatgggttacgagcctgaggagttgctgggccggtctatctatgagtactaccacgctctggacagcgatcacctgacgaagacgcatcacgacatgtttaccaagggacaagtcactaccggccagtaccgcatgttggctaagcgggggggttacgtctgggtagagacccaggctaccgtcatctataacaccaagaattcccaaccgcagtgtattgtttgcgtgaactacgtggtcagcggtatcatccagcacgacctcatcttctcgcttcagcagaccgagtgtgtgctaaagcccgtggagtcgagcgatatgaagatgacacagctctttaccaaggttgagagtgaggacacctcgtcccttttcgacaagctgaagaaggagcccgatgcactcacacttttggccccagccgccggagacaccatcatctcccttgacttcggatccaacgatacagaaacggatgaccagcaactggaggaagtgcccctctacaacgatgtcatgcttccttccccgaacgagaagcttcagaacatcaacctcgccatgtcaccgttgcccaccgccgagaccccaaagcctctgcgtagtagcgctgatcccgccctcaaccaggaggttgccttgaaactcgaacccaaccccgaatctctggaactgtccttcaccatgccacagatccaggaccagactccttcgccgtccgatggatccacgcgtcaatccagccccgagccgaattcgccgtccgagtactgcttctatgtcgactcggatatggtcaacgagtttaagctcgagctggtggagaagttgtttgcagaagacaccgaggccaagaatcccttcagtactcaggataccgatctcgatctggagatgctggccccctacatccctatggacgacgattttcagctgcggtccttcgaccaactgtctcctctggagtctagctccgcatccccggagtctgcgagccctcaaagcacggttaccgtctttcagcagacgcagatccaggagcctaccgccaacgccacgaccaccacagccaccaccgatgagctgaagaccgtcactaaggaccgcatggaggatatcaagatcctgattgcctccccctctcctacccacatccacaaggaaaccacctcggctacgtccagcccgtaccgtgacactcagagcaggaccgccagccctaaccgcgctgggaagggtgtcatcgagcagacagagaagtcccatcctcgctcgcccaacgtcctcagcgtggcgctctcgcagcgaaccaccgtcccagaggaggagctcaaccccaagatcctggccctgcagaacgctcagcgcaagcgtaagatggaacacgacggatcccttttccaggctgttggtatcgggaccctgctccagcagcctgacgaccacgccgccaccacgtccctgagctggaagcgcgtgaagggctgcaagagttcggagcaaaacggcatggaacaaaagaccatcatcctgatcccctcggatctcgcgtgccgcctgcttggacagtcgatggatgagtcggggctgccccagttaacgtcctacgactgcgaagtgaacgcacccatccagggcagcaggaatttgctgcagggtgaagagctgctgagggcactggatcaagtcaac

SEQ ID NO: 118576 - DNA, 2478 bp, Artificial Sequence
  derived and/or modified sequence
atggaaggtgcaggtggtgccaacgacaaaaagaagatttcgtccgaacgccgcaaggaaaagtcccgcgacgcagcgcggtcaagacgatcgaaggaaagcgaagtgttctacgaactggcgcatcagctgcctctgccacataatgtcagctcacaccttgataaggcatccgtgatgcggctgactatctcctatcttcgagtgaggaagctccttgacgccggggatttggacattgaagatgatatgaaagcacagatgaattgtttttacctgaaggcgttggatggttttgtgatggtgcttacggacgacggcgatatgatctacatctcggacaatgtgaataagtacatgggcctgacccaattcgagcttactggtcattcagtctttgactttacccatccatgcgatcacgaggagatgagggaaatgcttacccatagaaatggcctggtcaaaaagggcaaggaacaaaacactcaaaggtcgttctttctgcggatgaaatgtactctgaccagcagaggtcggacgatgaatatcaagtctgcaacgtggaaagtccttcattgtacgggccatattcatgtctatgatactaattcaaaccagccccagtgcgggtacaagaagcctccaatgacttgtttggtgcttatctgtgagcccatcccccatccctcaaacatcgaaatcccacttgattccaagactttcctgagcaggcactccctggatatgaagttctcctactgtgatgaacgaatcaccgagcttatgggatacgaacccgaagaactgctgggaagatcgatttacgaatactaccatgcccttgactcggaccatctcaccaaaacccaccacgatatgtttacgaaaggccaagtgactaccggtcaatatagaatgctggctaaacgtggtggatacgtgtgggtcgaaacccaggcaactgtgatttacaatacgaaaaactcgcaaccccagtgcatcgtgtgtgtaaactacgtggtttctggaataatccaacacgatctgattttctcgttgcaacagacggaatgtgtcctgaagcccgtcgagtcgagcgatatgaaaatgacccagctcttcactaaggtcgagtcggaagatactagctcgctgtttgacaagctgaagaaggagccggacgcacttacgctgttggctcctgcagcaggcgatactattatctcgctggattttggatccaatgatactgagactgacgaccaacaacttgaagaagtgccgctttacaatgacgtgatgctgccttctcccaatgaaaagctgcagaacattaatctcgccatgtcaccattgccaactgcggaaactcccaagccccttcgttcaagtgctgaccctgccctgaaccaggaggtggctcttaaactggagcctaaccctgaatcgttggaactttcgtttactatgccccagattcaagaccaaactcctagcccaagcgatggttccactagacaatcctcaccagaaccaaactcgccgtccgaatactgtttctacgtcgattcagatatggtcaacgagtttaagttggagctggtggaaaagttgttcgccgaggacaccgaagcaaagaaccctttttcgacccaggacaccgacctggacctggagatgctcgcaccatacattcctatggacgatgactttcagttgcgctccttcgatcagctctcgcctctggaaagctctagcgcatccccagagtcagcatcccctcagtcaaccgtgacggtgtttcagcagactcaaattcaagagcccaccgcaaacgctaccacgactaccgcaacgaccgacgaactgaaaactgtgactaaggatcgtatggaggacattaagattttgattgcttcgccatccccaactcacattcataaggaaactaccagcgccaccagctcaccgtacagggatacccagagcagaaccgcatccccaaaccgggccgggaagggtgtgattgagcaaaccgagaaaagccatcctcggtccccgaacgtgctttcggtcgccctttcgcaacgtactaccgtgccagaagaagaactgaacccaaagattttggcgctccaaaatgcacaaaggaaaagaaagatggagcacgatggttccctctttcaagcggtgggtattgggaccctgcttcaacagcctgatgatcatgcggccaccactagcctgagctggaagagagtgaaaggttgtaagagctcagaacagaacggtatggaacaaaagaccatcatacttattccttcggatctcgcatgcagattgcttggtcagtcaatggacgagtcaggacttccccaactgacctcatacgattgtgaggtgaacgctcctattcaaggaagccggaaccttttgcaaggggaggagctgctgcgcgcgctggaccaggtgaac

SEQ ID NO: 118577 - DNA, 2478 bp, Artificial Sequence
  derived and/or modified sequence
atggaaggggcaggcggggctaatgacaagaagaaaatttctagtgaacgtagaaaggagaaaagtagagacgcggcacgcagcagacgaagtaaagaaagtgaggtgttctatgagttagcccaccagctccccctacctcataacgtatcttcacatctcgataaagcgtctgtgatgcggttaactatcagctacttgagagtgcgaaaactactggatgctggtgaccttgatattgaggacgacatgaaggcccaaatgaactgtttctatctgaaagctttggatgggttcgtgatggtgcttactgatgatggcgatatgatctatatctctgataatgtcaataaatatatgggactgacccagtttgagcttactggccactctgtatttgacttcactcacccgtgtgatcatgaggagatgcgtgagatgctaacacaccgtaatggtctggttaaaaaaggcaaagaacagaacacccagcgtagtttctttctgaggatgaaatgtactctcacgtcccggggccgtacgatgaacattaagagcgcaacctggaaggtcctgcactgtacaggtcatatacacgtttacgatactaattctaatcaaccccagtgcggctacaagaagcctcctatgacatgcttggtcctgatttgcgaaccaattccccacccttcaaacatagaaattcctctcgattccaagactttcctcagcagacacagcctggatatgaagtttagttactgcgacgaaagaatcaccgagcttatggggtacgagccggaggagcttctgggtagatctatttatgaatattatcatgctctagactcggaccatctgacaaagactcatcacgatatgttcactaaaggccaggtgacaacaggacaataccgtatgttggctaagagaggagggtacgtgtgggtcgaaactcaggctaccgtgatctataacacaaaaaacagtcagcctcaatgcatcgtctgcgtgaattatgtggtgagtgggatcatacagcatgatctgatcttttctctgcaacagaccgaatgcgtgcttaagccagttgaaagctctgacatgaagatgacacagctctttaccaaggttgagagtgaagacacctcgagcctgttcgataaactcaagaaggagcctgacgcccttacattgttagcccctgctgcgggtgacaccatcatctccctcgactttgggtccaacgacaccgagacggatgaccagcagctcgaagaggtacctttatataacgacgtgatgttgccatccccaaatgagaaattacagaatatcaacctcgccatgagtccactgcctacagcggagacacctaagcctttacgaagctctgccgacccagcattaaatcaggaggtggcactcaaattggaacccaaccccgagagcctggagctatccttcaccatgccccagatccaggatcagaccccatctccctctgatggctccacccggcagtctagcccagaacccaactcaccctcagaatactgcttctatgtcgatagcgacatggtgaacgagtttaagctggagctggtggagaagctattcgcggaagacaccgaggcaaagaaccccttctcgacgcaggacacagacctggatctcgagatgttggctccgtatatccccatggacgatgactttcagcttagaagcttcgatcaactttctccgttggagtcctcctccgccagtccagaatccgcctctcctcagtctaccgtaacagtcttccagcagacccagatccaggagcctactgccaacgccaccacaaccaccgctaccactgatgagctcaaaactgtgaccaaagacaggatggaagatatcaagatcctgatcgcctctccgtctccaacccacatccacaaagagacaaccagcgctacttcaagtccttaccgagatactcagtcaaggaccgcgtctcctaaccgcgctggtaagggggtcatagagcaaacagagaagtcccacccccgctcccctaatgtgctctctgttgccctgtcacaaaggactactgtgccggaagaagagcttaatccaaaaattctggctctgcagaatgctcagaggaagaggaagatggagcacgatgggtcactgtttcaggcagtgggtataggcactttgcttcagcagccggatgaccatgccgcgacaactagtctgtcctggaagcgggtaaagggctgtaagtcatcagaacaaaacgggatggaacagaaaacgattatattgattccttccgacctggcatgcaggttgctgggccaatcaatggatgagtctggcctccctcagctaacgagttatgattgcgaggtcaacgccccgatacaggggtcccggaatttacttcaaggggaagaactgctccgggccttggatcaggtgaac

SEQ ID NO: 118578 - DNA, 2478 bp, Artificial Sequence
  derived and/or modified sequence
atggagggagctggcggagccaacgacaaaaagaagatctcctccgagcggaggaaggagaagtcacgcgacgcagcgagatcaagacgcagtaaggagtcggaagtgttctacgaactggcacatcagctcccgctccctcataatgtctcctcacacctggacaaggcatcagtgatgcggctgacgatcagctacctgcgcgtccggaaactgctggatgccggagatctggacattgaggacgatatgaaggcccaaatgaactgcttctacctcaaggcgcttgacggattcgtcatggtgctcaccgatgatggggacatgatttacatcagcgataacgtcaacaagtacatggggctcacccagttcgagctgactggccactccgtgttcgatttcacgcacccgtgcgatcatgaagagatgcgtgagatgctgacgcaccggaacggactggtgaagaaaggcaaggagcaaaacactcagaggtcgttctttctgagaatgaagtgcaccttgacctcgcggggacggactatgaacataaagtcagcgacttggaaagtgttgcattgcaccggacatatccacgtgtatgacactaactcgaatcaaccgcaatgcggatacaaaaagccgccgatgacctgtttggtgctgatttgcgagcctatcccacatccgagcaatatcgagatcccactggacagcaaaacctttctctcgcggcacagcctggatatgaagttcagctactgcgacgaacggatcaccgaactgatgggctacgagccggaagagctgctgggacgctcgatctacgagtactaccacgcgctggacagcgatcaccttaccaaaacccaccacgatatgtttactaaaggccaagtgactactggtcagtaccggatgctggcgaaacgcggaggatatgtctgggtggaaacccaggcgaccgtgatctacaatactaaaaactcacagcctcaatgcatcgtctgcgtgaattacgtcgtctccggcatcatccagcacgaccttatcttctccttgcagcaaacggaatgtgtcctgaagcctgtcgagtccagcgatatgaagatgacccagctgttcactaaagtggaatccgaggacacctcttcgctctttgacaaactgaaaaaggaaccggatgcccttaccctcctggcccctgccgccggagacacgatcatttccctcgatttcggatccaatgacaccgagactgacgaccaacagctggaggaagtgcccctttacaacgatgtgatgttgccttcgccaaacgagaagctccaaaacatcaacctggccatgtcaccgctgccaaccgccgaaacccccaagccgctgagatcctctgctgacccagccttgaaccaggaggtggcactgaaactggagccgaaccccgaatccctcgagttgagcttcaccatgccacaaattcaggatcaaacgccatccccttcggacggctcgaccagacagtcctcgcccgagcccaattcgccgagcgaatactgtttctacgtggactccgatatggtgaatgagtttaagctggaattggtcgagaaactcttcgcagaggataccgaagcaaagaacccgttctctactcaagacacggatcttgacttggaaatgctggccccatacatcccgatggacgacgatttccagctgagatcgttcgaccagctctcgccactggaatcctcaagcgcatcaccggagagcgcatctccccagtcgactgtcaccgtgttccagcagacccaaattcaggaaccgactgccaacgccacgaccaccaccgcaactaccgatgaacttaagaccgtgaccaaagaccgcatggaggatatcaagattctgatcgcatctccctcacctacccacattcacaaggagactacctcagcgacctcgtcgccctaccgcgatactcagagccggaccgcctcgcctaaccgcgccgggaaaggtgtgatcgaacagactgagaagtcccaccctcgcagcccgaacgtcctctccgtggccctttcgcagcggaccacggtgccggaggaagaactgaacccgaagattctcgcgctgcagaacgcccaaagaaaacgcaagatggaacatgacggatcactgtttcaagccgtcggcatcggcaccctccttcagcagccagatgatcacgcagcaaccacctcgttgagctggaagcgggtgaaaggctgcaagtcatcagagcaaaatggaatggaacaaaagaccattattctgatcccatcggacctggcctgccggctgctcggccaatccatggatgaatccggattgcctcagctgacctcatacgactgcgaggtgaatgctcccatccagggatcgcggaacctccttcagggagaggagctcttgcgagcgctcgaccaagtcaac

SEQ ID NO: 118579 - DNA, 2478 bp, Artificial Sequence
  derived and/or modified sequence
atggagggcgcaggaggcgctaatgataaaaagaagatcagctcggagcgccgcaaagagaagtctcgggatgcagcccgaagcaggagatcaaaagaatcagaggtgttctacgaacttgcgcaccagttaccgttaccccataatgtgtcaagtcatctggataaagcttctgtaatgaggttaaccatttcatatctgcgcgtccgaaagctcttggatgcaggcgatctcgatatcgaagacgacatgaaggcccagatgaattgtttttatcttaaagcgctggacggctttgtgatggttttgaccgacgacggtgacatgatttacatctccgataacgtgaacaagtatatgggcctgactcagtttgaattgaccggtcacagtgtttttgactttacccatccctgtgaccacgaggagatgagggagatgttgactcacagaaacggtctggtgaaaaaaggcaaggagcagaatactcagcgatccttcttcctgagaatgaaatgcactctcaccagccgaggccgcactatgaatatcaagagcgccacttggaaagtgctccactgtaccggccatatacacgtgtacgatacaaacagcaaccaaccccagtgcggctacaagaagcccccgatgacctgtttggtactgatatgtgagcctatacctcatccttctaacatcgagatccctcttgactccaaaacattcctctcccgccactcacttgacatgaagttcagctactgcgacgagcgaatcacggagctcatgggctatgagccggaagagctactgggccggtccatttatgagtactaccacgctttggattcggaccacctgactaaaactcatcatgatatgtttacaaaagggcaggtgactactgggcaatatcgaatgctggctaaaagaggagggtacgtttgggtggaaacccaggccacggttatatataacactaaaaatagccagcctcaatgtattgtgtgcgtgaattacgtggtgagtggcataatacagcacgatttaatcttttcactgcagcagaccgaatgtgtgcttaagcccgtggaatctagcgacatgaaaatgactcagctgtttactaaagtagaatccgaggacaccagctcccttttcgacaagctcaagaaggagccagacgctctgaccctgttggcgcctgcagccggagacaccatcatatccctagacttcgggtcaaacgacactgagacagatgaccagcagctagaagaggtaccactatacaatgacgtaatgctgccctcacccaacgagaaactccaaaacatcaatttggctatgtcacccctgcctaccgccgaaacccccaaaccgctccgaagttccgccgatcccgcccttaatcaagaggtagctctcaaactggagcccaacccagagtcactggaactgagcttcacgatgccccagatccaggatcagaccccatctccatctgatgggtctacacggcagtcatcacccgaaccaaatagcccaagtgaatattgtttttatgtggacagtgacatggtcaatgaatttaaactggaactagtggagaagctcttcgcagaggacactgaggccaaaaatcctttcagtactcaagacactgatctggatcttgagatgctggcgccgtacattcctatggacgatgactttcagttacggagtttcgaccagctcagcccactggaatctagcagcgcgtcgccagaaagcgcaagtccacagtcgacagtcaccgtcttccagcaaacacagatacaggaacccaccgctaatgccactaccacgaccgcaacgaccgacgagctgaagaccgtcaccaaagatcgtatggaagatatcaagatccttatcgcctcccccagccccacgcatatacacaaggaaacgacctccgctacctcctccccctatcgggatactcaatcaagaacggcgagtccaaaccgcgcgggaaaaggtgtgatcgaacagacagagaaaagtcaccctaggtctcctaatgtacttagtgtagcactgtcccagcgcacaaccgtgccagaagaagaattaaatcccaagattctggctttgcaaaacgcccagaggaagaggaagatggaacatgacggctcactattccaggccgtgggcattggtactcttctgcagcagccagacgatcatgcggccacaacctctctgtcttggaagcgcgtgaaagggtgcaagtccagcgagcaaaacggaatggagcagaagacaatcattctgattccttccgacctcgcttgccgactgctgggccaaagtatggacgagtctgggcttcctcaattaacaagttatgactgtgaggtgaacgcccccatccagggatcgcggaatttactgcagggagaggaactcctccgcgccctagatcaggtgaac

SEQ ID NO: 118580 - DNA, 2478 bp, Artificial Sequence
  derived and/or modified sequence
atggagggagctggtggggcaaacgacaagaaaaagatttcaagcgagcgaaggaaggagaaatcgcgcgatgccgcaagatcccgtagatccaaggagtcggaagtgttttatgaactggcccaccagcttcccctgccacacaatgtgtcgagtcacctggataaagcgtccgtaatgagactcacgatttcttatttacgggtgagaaagttgctcgacgcaggcgaccttgacatcgaggacgatatgaaagcgcagatgaactgtttctatctgaaagctctagacggctttgttatggtgctgacagacgatggcgatatgatatatattagcgataatgtgaacaagtacatggggctgactcagttcgaactcacaggacactctgtgtttgacttcacgcacccctgtgaccacgaggaaatgagggagatgttaacccacagaaatggcctggtcaaaaaaggcaaggagcagaatacacagcgcagcttcttcctcagaatgaaatgtacactcacttctcgggggagaactatgaatattaaatctgcaacctggaaagttcttcattgcacaggccacatacacgtatacgacaccaatagcaatcagcctcagtgtggttataagaagccccctatgacatgccttgtgctcatctgcgagcctatcccacacccaagcaatatagaaatccccctggattccaagaccttcttatcacggcactccctggatatgaaattcagttattgcgacgagcggattacagaacttatgggctacgagccagaggagctgctaggtcgaagcatatacgaatactatcacgccctcgactctgaccacctgacaaagacgcaccacgatatgtttacaaagggacaggtcacaacgggacagtaccgaatgctcgcaaagaggggcggttatgtgtgggtggagacacaggcaacagttatctataataccaaaaactcgcaaccacagtgtatcgtgtgcgtgaattacgtagtttctggcattattcagcacgatctgatattctctctgcagcaaactgagtgcgtcctcaagcccgtagagagctcggatatgaaaatgactcagctctttacgaaggttgaatcagaggacacgtccagcttgttcgataagctgaagaaggagcctgatgcactgacactgctcgctcctgcggccggagacaccattatctcgctcgatttcggatccaacgacactgagactgacgatcagcagcttgaggaggtgcctctatacaatgatgtgatgctgccaagcccaaatgaaaaactccaaaacatcaatctggcgatgtcccccctccctaccgcggagacccccaagcccctccgatccagtgcagatccggctctgaaccaggaagttgccctcaagctcgagcccaatccagagtcactggagctgagctttaccatgccacaaattcaggaccagacccccagtccttcagacgggagcacgagacagagctcgcctgaaccaaattccccctccgagtactgcttctatgtcgacagcgacatggtgaatgagtttaaactggagctggtggaaaagctgtttgcagaggacacagaggccaagaatcccttctcaactcaagatactgaccttgacttagagatgctcgccccttacatcccaatggatgacgattttcagctgcggtcattcgatcagttgtcccccctggaatcttcctcggctagcccggagtcagcctccccacagagcaccgtcaccgtgtttcaacaaacccagattcaggaacctacagccaacgccacaacgacaactgctacaactgacgagctgaaaaccgtcacaaaagatcgtatggaagatattaaaattttgatcgcctcccccagtcccacacacattcacaaggaaacaacgtcagctacttcttcaccctaccgcgacacacagtctcgaacagctagcccaaacagagccgggaaaggtgtgattgaacagacggagaaatctcatccgcgaagtcctaacgttttatctgtcgcattaagtcagcgcaccacagtcccagaggaagaactgaacccaaagatcctcgctcttcagaacgctcaaaggaaacgcaagatggaacacgacggctctctgtttcaagctgtcggaattggtaccttgttgcagcaaccagacgatcacgccgctactacctctttgtcctggaagcgagtgaagggctgcaagtctagcgagcagaatggtatggaacaaaagacaattatccttatcccaagcgacttggcctgcaggctcctgggccagtccatggacgaatccggactccctcagctgacaagctacgactgcgaagtgaacgcccccatacagggttcgcgaaatctcctccagggcgaggagttactaagggcactggatcaggtgaat

SEQ ID NO: 118581 - DNA, 2478 bp, Artificial Sequence
  derived and/or modified sequence
atggaaggggccggaggcgcgaatgataagaaaaagatttcgtctgagcgccggaaggaaaagtcaagagacgcagcacgtagccgccgctcgaaggaatctgaagtcttttatgaactcgcgcatcaactcccactgcctcacaatgtgtcgtcccacctcgacaaggcctcagtcatgaggcttaccatatcgtaccttcgggtccgtaaacttctcgacgcaggcgatctcgacattgaagatgatatgaaggcgcaaatgaattgcttttatcttaaagcacttgacggatttgttatggtgttgaccgacgatggagacatgatttacatttctgataacgtgaataagtacatgggactgacgcagtttgagctgaccgggcatagcgtctttgattttacccatccatgcgaccatgaagaaatgcgagagatgcttactcaccgaaacggtctggtgaagaagggaaaagaacaaaatacgcaacggagcttttttcttaggatgaagtgcactcttacctcccgaggtcggaccatgaacataaagtcggctacttggaaggtcctccattgtactggacacatacatgtctacgatacgaatagcaaccagccgcaatgtggatacaaaaagccccctatgacctgtctcgtgctgatttgtgaacctatcccacatccttccaacattgaaatccccctggactccaaaacgttcctgtccagacattcccttgacatgaagttttcgtactgcgacgaaagaataactgagctgatgggttacgaacctgaagaacttcttgggcgttccatctacgagtactaccatgcccttgattccgatcacctcactaagactcatcatgatatgtttaccaagggacaagtgacgaccggtcagtatcgaatgctggcgaaacggggtggttacgtgtgggtggaaactcaagcaactgtgatttacaacaccaagaattcgcagcctcaatgtattgtatgcgtcaattacgtggtgtcgggcataattcagcacgacctgattttcagcctgcaacaaactgaatgtgtgttgaagcccgtggagtcatcggacatgaagatgactcaactgtttaccaaagtcgaatctgaagatacttcatcactctttgataaactcaagaaggagccagatgcacttactctgcttgccccggcggcgggagatactatcatttcactggatttcggtagcaatgatacggaaaccgacgatcagcagcttgaggaggtccctctgtacaacgatgtcatgctgccgtcgccgaacgagaaattgcaaaacatcaacctggccatgtcgccacttccaactgcggaaaccccaaagcctcttaggagctccgccgatcccgccctgaaccaggaggtggcccttaagctcgagcctaacccagaatcgttggagctttcattcactatgcctcaaattcaagaccagaccccttcaccgagcgacggctcgaccagacaaagctcgcccgagcctaactccccaagcgagtattgcttttacgtggattccgatatggtcaacgaattcaagctggagctcgtggaaaaactttttgcagaggacactgaagctaagaacccattctccactcaagataccgatctggaccttgaaatgctggcaccgtacatccctatggatgatgatttccaacttcggagctttgaccagctctcacctcttgagtcatccagtgcttcccctgagtccgcatcgccccagtctactgtgactgtattccaacaaacgcagatccaagaacccaccgctaacgcaactactaccaccgccactaccgatgaactgaaaacggtcaccaaggataggatggaagatatcaaaatactgatcgcaagcccctccccaacccacattcataaggaaactacttcagcaacctcgtcgccatacagagacactcaatcgcgtaccgcttccccaaaccgcgcaggcaagggagtcatcgagcaaacggagaaaagccatccccgctccccaaatgtcctttcggtggctctttcccaacgtaccaccgtgcctgaagaggagctgaacccgaagattcttgcgctgcaaaacgcccagcgaaagagaaagatggaacacgacggatcgcttttccaggccgtaggaatcggcactctgctccagcagccagatgatcacgcggcgaccacctcgctttcatggaagcgtgtgaaaggctgtaagtcctcggaacagaacgggatggaacaaaagactatcatacttattccttcagatctggcatgtcgccttttgggacaaagcatggacgaatccgggttgccacagcttacctcctacgattgtgaagtgaacgcccccattcaagggtccagaaatctgctgcagggagaggaactgcttagggcactggatcaggtgaat

SEQ ID NO: 118582 - DNA, 2478 bp, Artificial Sequence
  derived and/or modified sequence
atggaaggagcaggtggagctaatgataaaaaaaaaatatcaagtgaaagaagaaaagaaaaatctagagatgcagcaagatcacgacgaagtaaagaatctgaagttttttatgagttagctcatcaattaccacttccacataatgtttcgagtcatcttgataaggcatcagttatgcgacttaccatatcatatttaagagtaagaaagttattagatgcaggagatcttgacattgaagatgacatgaaggcacaaatgaactgtttttatttaaaagctttagatggttttgttatggtattaacagatgacggtgatatgatttacattagtgataatgttaataagtatatgggacttacacaattcgaattaaccggacattcagtttttgattttacccatccatgtgatcatgaagaaatgagagaaatgttaacccatagaaatggacttgtcaagaaagggaaagaacaaaatacacaaagaagtttttttcttcgtatgaagtgtacacttacttcaagaggaagaactatgaatatcaaatcagctacatggaaagttttacattgtaccggacacattcatgtctatgatacaaactcaaatcaacctcaatgtggatataagaaaccaccaatgacatgcttagttcttatttgtgaaccaattccacatccttcaaatattgaaattccattagattctaagacctttttaagtcgtcattcattggatatgaaattttcttattgcgatgaaagaattacagaattaatgggatacgaaccagaagagttacttggtagatctatttatgaatactatcatgctcttgattctgatcatcttactaaaacacatcatgatatgtttacaaaaggacaagttactactggacaatatagaatgttggctaaaagaggaggttatgtttgggtagaaactcaagctacagttatttataatacaaaaaattcacaacctcaatgcattgtttgtgtaaattatgttgtttcaggtattattcaacatgatttaattttttctttacaacaaacagaatgtgtccttaaaccagtggaaagtagtgatatgaaaatgacccaattatttacaaaagtagagtcagaagatacttcaagcctttttgataaattaaaaaaagagccagatgctttgactttgcttgcaccagcagcaggtgatactattattagtttagattttggatctaatgatacagaaacagatgaccaacaattagaagaagttccattatataatgatgttatgttaccatcaccaaatgaaaaacttcaaaatattaatttggccatgtcaccattacctactgcagaaactcctaaacctttaagatcttcagcagatccagctttaaatcaagaagttgctttaaaattagaaccaaatccagaatcattagaattatcatttactatgccacaaattcaagatcaaacaccatcaccatcagatggttctactagacaaagttcaccagaaccaaattcaccatcagaatattgtttttatgttgatagtgatatggttaatgaatttaaattagaattagttgaaaagttatttgctgaagatactgaagcaaaaaatccttttagtacacaagatactgatttggatttagaaatgttagcaccttacattcctatggatgatgattttcagttgagatcttttgaccaattatcaccattagaatcttcaagtgcatctccagaatctgcatctcctcaatctactgttactgtatttcagcaaacacaaatccaagaaccaactgcaaatgcaacaaccacaactgctacaacagacgaattaaagacagttacaaaagatagaatggaagatattaaaatccttatcgcaagtccttcaccaactcatattcataaagaaacaacttctgctactagtagtccatatcgtgatacacaaagtcgtacagcttctccaaatagagctggaaaaggagtaattgaacaaaccgaaaaatcacatccaagatcaccaaatgtacttagtgtagctttaagtcaaagaactactgttccagaagaagaattgaatccaaagatattagctcttcaaaatgcacaaagaaaacgtaaaatggaacatgatggttcactttttcaagcagttggtataggtactttattacaacaacctgatgatcatgctgcaacaacttcattatcatggaaaagagtaaagggatgtaaatcaagtgagcaaaatggtatggaacaaaaaacaattattcttataccttctgatttggcttgtcgtttattaggtcaatcaatggatgaatcagggttaccacaacttacttcatatgattgcgaagttaatgctccaatacaaggatctagaaacttattacaaggagaagaacttcttagagcattagatcaagttaac

SEQ ID NO: 118583 - DNA, 2478 bp, Artificial Sequence
  derived and/or modified sequence
atggagggagccggtggtgcaaacgataagaagaaaatctcatccgaaaggcgcaaggaaaagtccagagacgcagcacggtccagaaggtccaaggagtccgaagtgttctacgaactcgcacatcagcttcccctccctcataacgtctcgtcacacctggacaaggcttcggtgatgagactgactatttcgtatcttcgggttagaaaacttttggatgcgggggacctggacatagaagatgatatgaaggcacaaatgaactgcttctaccttaaagccctggacggcttcgtgatggtgctgactgatgatggtgacatgatttacatctcagacaatgtcaataagtacatgggactgacccaatttgaattgaccggtcattccgtgtttgactttactcacccttgtgatcacgaagagatgcgcgaaatgcttacccaccgaaacgggctcgtcaagaagggcaaagaacagaacactcaaagatcgttttttctcagaatgaagtgtaccctgacctcacggggtcgaactatgaacatcaaatccgctacttggaaggtcctgcattgcactggacatattcacgtgtacgatactaattcgaaccaaccacagtgtggatacaaaaaaccgcccatgacctgtctggtgctcatttgtgagccaattcctcatccatctaacattgaaattcctttggatagcaagaccttcctgtcaagacattcactggacatgaaattcagttactgtgatgaaagaatcaccgaactgatgggctacgaacctgaagagctcttgggcagatcgatctacgagtactaccacgcacttgattctgatcatctgaccaaaacccatcacgacatgttcacgaagggacaggtgactaccggccaatacagaatgttggccaagaggggcgggtacgtgtgggtggaaactcaggcaacggtgatttacaatactaagaacagccaacctcagtgtatcgtgtgcgtgaactatgtggtgtcaggcatcattcaacacgatcttatcttcagccttcagcagaccgaatgtgtgcttaaacctgtcgaatcaagtgacatgaagatgacgcaactcttcaccaaagtggagagcgaggacacctcatccctgtttgataaactgaagaaggaacccgatgccctgaccttgcttgcaccagccgctggagacactattatctcgctcgattttggtagtaacgatactgaaaccgatgaccagcagcttgaggaggtgcctctctacaacgacgtgatgcttccatcccccaacgaaaagttgcagaacataaatcttgcaatgagccctttgcctactgcggagactcctaaacctctgaggtcctccgccgacccggcactcaaccaagaagtggctcttaagctcgaaccaaaccccgaatctcttgaactctcgtttaccatgcctcagatacaggatcagacgccgtccccaagcgatggcagcaccagacaatcctcccctgagcccaacagcccttcagaatactgcttctacgtggactcggatatggtgaacgaattcaaactggaactggtggagaagctgttcgccgaagataccgaggcgaaaaacccttttagcactcaagacactgatttggatcttgaaatgctggcgccttacattccaatggatgatgactttcaacttagatcatttgatcagctgtcgccacttgaatcaagctcagcctcgccagaatcagcaagcccccagagcactgtgacggtgtttcaacagacccaaattcaggagccaaccgccaacgccaccaccactactgcaactactgatgagctcaagaccgtcaccaaggatcgcatggaagatatcaagatccttattgcgtctccatcccctactcatattcataaggaaaccactagcgctacgtcgagcccttacagagacacccaatcccggactgcaagccctaaccgcgcgggaaagggggtcattgaacagaccgagaagtcccatccccgatcgccaaacgtgctttccgtcgcactttcgcaacgtaccaccgtccctgaagaagaattgaaccccaagattctcgcacttcagaacgcacaacggaagaggaagatggaacatgatggaagcctcttccaagccgtcgggattggaactcttctgcaacagcctgacgaccatgccgcaactacctccctgagctggaagcgagtcaaaggttgcaaatcttctgagcagaacggaatggaacaaaagacgatcatcctcattccctcggatctcgcgtgtaggcttcttggtcagtcgatggacgaaagcggcttgccacagctcaccagctacgactgtgaagtcaatgcgccgattcaaggttcccggaaccttctgcagggcgaagaactgctcagggcacttgatcaggtgaat

SEQ ID NO: 118584 - DNA, 2478 bp, Artificial Sequence
  derived and/or modified sequence
atggagggcgcaggtggtgctaatgacaaaaaaaagatcagtagcgaacgcagaaaggagaagtcccgcgacgccgccagaagtcgcagatctaaggagtctgaggtgttctacgaactcgcacaccagctccccctgccccacaacgtgagttcccatctcgataaggcctctgtcatgcgtcttaccatctcatatctccgcgtgcgtaagctgctcgatgcaggagatctggacatagaggacgacatgaaagctcagatgaattgcttctacctgaaggcactcgatggcttcgtcatggttctgactgacgacggtgatatgatctacatcagcgacaacgtgaataaatacatgggcctgacccagttcgagctgaccggtcattctgtctttgatttcacccacccctgcgatcacgaggaaatgcgcgaaatgttgacacatcgtaacggcctggttaagaaaggtaaggagcagaacacacagcgctctttctttctcaggatgaaatgtacattgacatccagaggtcgcaccatgaatattaagtccgctacttggaaggttctgcactgcacaggtcacatccacgtgtacgacaccaattcaaaccagcctcagtgcggatataaaaagccccctatgacctgcctcgtgctcatctgcgaacctattccacatccaagtaacatcgagatccctttggactctaagacttttctctctcgtcattccctggacatgaaattctcctactgcgatgagcgtattaccgagttgatgggatatgaacccgaggagctgttgggaaggtccatctatgagtactatcacgcactggattctgatcatctcactaagacacaccatgatatgtttactaagggtcaagtcactaccggccaatataggatgcttgccaagaggggtggctacgtgtgggtggagacccaggccaccgtgatctataacactaagaactcacagcctcagtgtatcgtttgcgtcaattatgtggtttccggtatcatccagcatgatctgatcttctccctgcaacagacagaatgtgtgctgaaacccgtagagtcctctgatatgaagatgacccagctctttacaaaagtcgaatccgaagatacttcaagcctttttgataagctcaagaaagagcctgacgcccttacattgttggctccagcagctggtgacaccatcatcagcctggatttcggctctaatgacaccgaaacagatgaccagcagctcgaggaggtgccattgtacaacgacgttatgctgcccagccccaacgagaagctgcagaatatcaacttggcaatgtccccacttcctacagctgagactcccaagcccttgaggtcctccgccgaccctgcattgaaccaggaagtggctctcaagctcgaacctaatcccgaatcattggagctgagctttaccatgccccaaatccaggaccagaccccctctccaagcgatggatctacccgtcagtctagccctgagcctaactccccctccgagtactgcttctatgtcgacagcgacatggtaaacgagtttaagctggaactcgtcgaaaaactgtttgctgaagataccgaggccaagaatcctttttcaacccaggacacagatctcgacctggagatgcttgccccatacattccaatggacgacgacttccaactcaggtcctttgaccagctgtcccctctggaaagctcatcagcttctcccgagtcagccagtccccaaagcacagtaaccgtgttccagcagacccaaatccaagagcctactgctaatgcaactaccacaaccgccaccactgatgagctgaagacagtcacaaaggatcgtatggaggatataaagatacttatagccagcccctctcctactcacattcataaagaaacaacctccgctacttccagcccttatcgcgacactcagtctagaactgcttccccaaatagggcaggaaagggagttatcgagcagaccgaaaagtcccacccaaggtcccctaacgttctgagcgtcgccttgtcacagagaactactgtccctgaggaagagctgaaccccaagattctcgcactgcaaaacgcccagcgcaagcgtaagatggaacatgatggttcacttttccaggctgtgggtatcggcaccttgctccagcagcctgatgatcatgctgccacaacaagcctgtcctggaagcgcgtcaaaggctgcaagagttcagagcagaacggcatggagcagaagactataatccttatcccctcagatctcgcctgtaggctgctgggtcagtcaatggacgagagtggacttccccagcttacatcttatgactgcgaggtgaatgcccctatccagggtagccgtaatctcctgcagggagaggaacttctccgcgcattggatcaggttaat

SEQ ID NO: 118585 - DNA, 2478 bp, Artificial Sequence
  derived and/or modified sequence
atggagggggccgggggagccaatgacaaaaagaagatatcaagtgagaggaggaaggaaaaaagccgcgatgccgcccgatcccgacggagcaaggagtcagaggtgttttatgaactggcgcatcaactcccgctgccacataatgtgagtagccatttggacaaggccagtgtaatgcgactaacaatcagctacctccgagtgcgtaagctccttgacgctggggatctggacattgaagacgatatgaaggcccagatgaactgcttctatctgaaggctctcgatggttttgtaatggtgctgaccgacgacggggacatgatttatatttccgataacgttaataagtatatgggcctcacgcagtttgaactgaccgggcatagcgtatttgactttacgcatccgtgcgatcacgaggaaatgcgggagatgttaactcataggaatggactcgttaagaaagggaaggagcagaatacccagcgctccttttttctgcgaatgaaatgtactctaacgtcaaggggtaggacgatgaacatcaaaagtgccacgtggaaggtgttgcattgtacaggccacatccatgtgtatgatactaattcaaaccagcctcaatgtggctacaagaaacctccaatgacctgcttggtcctaatttgtgagcccatcccccaccccagcaatatagagatcccactggatagcaagacttttctttcacgccacagcttagacatgaagttttcatactgcgatgagcggattactgagcttatgggttacgagccagaagaactcttaggccgctccatctacgagtattatcacgcattggatagtgatcatttaacaaaaacgcaccatgacatgtttacaaaaggccaggtcaccactggccaatacagaatgctggctaaaagaggggggtacgtttgggttgagacccaagctaccgtaatctataatactaagaatagtcagccccagtgcatcgtgtgtgtgaattatgtggtgtccggaatcattcagcatgatctgatctttagtctgcagcagacagaatgtgtccttaagccggtcgagagttcagacatgaagatgacccagctcttcaccaaggtagagtccgaggatacttcttcgctcttcgataagttgaaaaaggaaccggatgccttaacgctactggcacccgcagctggcgacacaattatcagtttggatttcgggagtaatgatacagagaccgacgatcagcaactggaagaggttcccttatataatgatgtgatgctgccatctccgaacgaaaagttgcaaaacatcaatttggcaatgagtccactccccacggccgagacgccaaagcccttgaggtccagtgcggatcccgccctaaaccaggaagtggcgttgaagctggagccgaacccggagtcattggagctcagctttacaatgccacagatccaagaccagaccccaagccccagcgatggtagtacaaggcagagttcacccgaaccaaacagcccaagcgagtattgcttttatgtggattccgacatggtgaacgagtttaagctagagctggtagagaagttgttcgctgaggacacggaggccaaaaaccccttttctacacaggatacagatctcgatctcgagatgcttgcaccctacatcccaatggacgatgatttccagctgcggtcctttgatcagttaagccctctggaaagctcttccgccagtccagagtcggcatccccgcagtcaacagtgacagtgttccaacagacgcagatccaggaaccgaccgccaacgccacgacaactacggccacgaccgatgaactgaaaacagtgacaaaggaccggatggaagacatcaaaatcctgattgcatcccccagtcccacccacatccataaagagactacttcagcaacgagctcaccttacagagacactcaatctcgaacagcatctcccaacagggcgggcaaaggggtgatcgagcagacagaaaaatcgcaccctcgcagtccaaacgtactttcagtagctctgtcacagagaacaaccgtgccggaggaagagcttaatcccaaaatcctcgccttgcagaacgctcagagaaaacgcaagatggagcacgatggtagcttattccaagctgtgggcatcggaacactgctgcagcagcctgatgaccacgccgccaccacgtccctatcttggaagagggtcaagggctgcaagtccagcgagcagaatggtatggagcagaagaccattatactgatcccctcggatctggcatgcagactgctgggtcagagcatggatgaatctggcctgccacagctgacttcctacgactgtgaagttaacgcccccatccagggcagtaggaacctcctgcagggcgaagagctactgcgcgccctggatcaggtcaat

SEQ ID NO: 118586 - DNA, 2478 bp, Artificial Sequence
  derived and/or modified sequence
atggagggagccggcggtgccaatgacaaaaagaaaattagctctgagcgccgcaaggagaagagccgggacgcagcacgctcccgacgcagcaaagagagcgaggtcttctacgagcttgctcaccagttgccactgccgcacaacgtctctagccatttggataaggcttcagtgatgcgcctgaccatcagctacttgagggtccgcaagcttttggacgctggcgaccttgatatcgaggacgacatgaaggcccagatgaattgtttctacctcaaggccttagatggcttcgtgatggtcctgacagatgatggcgacatgatttacatctctgacaatgtgaacaagtacatgggccttacgcaattcgaacttactgggcattctgtgttcgattttacccatccatgcgaccatgaagagatgcgggagatgcttacgcatcgaaacggtctcgttaagaaaggcaaggaacaaaatacccaacgcagcttcttcctgcgcatgaagtgtacgttgactagccgcggtcgcaccatgaatatcaaatctgcgacgtggaaagtgttacactgtactggtcatattcacgtttatgataccaactccaatcagccgcagtgtgggtataaaaagccgcctatgacttgtctggttctcatctgcgagccaattcctcacccgagcaatatcgagattcctttagactccaagaccttcctgtcccgtcatagccttgacatgaagttcagctactgcgatgagcgcatcactgaactgatgggttatgaaccagaggagctgctcggccggtccatttacgagtactatcacgcattagactcagatcacctcactaagacgcaccatgatatgtttaccaaagggcaggttactaccggtcaatataggatgttggctaaacgcggtggctacgtgtgggttgagacgcaagcgactgttatttacaacactaaaaattcccagcctcaatgcatcgtatgcgtgaattacgtggtttctggcattatccaacacgatttaattttttcactgcaacaaaccgaatgtgttctgaagccggtggagtccagcgacatgaagatgacccagctgttcacgaaagtggagagtgaagacacttcctccctgtttgataaactgaagaaggaaccagatgcactgaccttgctggcgcctgccgcgggtgacaccattatcagcctggactttggttcgaacgatacggaaactgacgaccagcaactggaggaggtcccactgtacaatgatgtgatgttgccatcccctaatgagaaactgcagaacattaacctcgctatgtccccgcttccaaccgcggaaacaccgaaacctctgagatcaagcgcagaccctgcgctcaaccaagaggttgctctgaagctggaacctaacccagagtccttagaactgagcttcaccatgccgcagatccaagatcagacgcctagtccaagcgacggttccacccgccagagcagcccggaaccgaattctccatcggagtactgtttctatgttgactccgatatggtcaacgaatttaaactggagctggttgagaaactgttcgcggaggacactgaggctaagaacccattcagcacccaagatacggatctcgatctcgaaatgctggcgccttacattcctatggacgacgactttcagctgcgtagcttcgaccagctgtctcctttggagagcagcagcgcatctcctgaaagcgcctcgccacaaagcaccgttactgttttccagcagacccagatccaggagcctaccgctaatgcgactaccactacggccactacggatgaactgaagactgtgacaaaagacaggatggaggacattaagatcctgattgcgtcaccgtcaccaactcacatacataaagaaactacttctgctacgagctcaccttaccgggacactcaatcacgcactgccagcccaaatcgcgccggcaaaggagtcattgagcagaccgagaagagccatccacgctctcctaatgtgctgtcggtcgcactcagtcagcgcaccaccgtgccggaagaggagctgaatccgaaaattttggcgctgcagaacgctcaacgcaagcggaagatggaacatgatggttctctgttccaagcagttggaatcggtaccctgctgcaacagcctgatgatcatgccgctactacgagcttaagctggaagcgtgtgaaaggctgtaagtcctcagaacagaacggtatggagcagaagacgattatccttattccaagcgacctggcctgccgtctcctgggccagagcatggatgagtccgggttgccgcagctgacttcttacgactgcgaagttaatgctccaatccaaggcagccgcaatctactgcaaggagaggaattgctgagagcactggatcaggtgaat

SEQ ID NO: 118587 - DNA, 2478 bp, Artificial Sequence
  derived and/or modified sequence
atggagggggcgggtggagccaatgacaaaaagaaaatctctagcgagcgccggaaggaaaaaagtcgggacgctgccaggtccaggcggtccaaagaaagtgaggtgttttacgagttggcccaccagctccctctgcctcacaatgtgtcgtcccatctagacaaggcatcagtaatgagattaaccatttcgtacctgagagtgcggaaattactcgacgcaggcgacctggatatcgaagacgacatgaaagctcagatgaattgcttttatctgaaagcactggatggttttgtgatggtgttaactgacgatggcgatatgatctacatctcggataacgtcaataagtatatgggcttgacgcagttcgaactgaccggccactcagtgtttgactttactcacccgtgtgaccacgaggagatgcgtgaaatgttgacccatcggaatggcctggtgaaaaaaggtaaagagcagaacacacagcgctctttcttcctacgtatgaaatgcaccctgacctcccgaggcagaaccatgaatatcaaaagcgcaacttggaaggtattgcactgcaccggtcacatacatgtgtatgacaccaattcaaatcaaccccagtgcggttataaaaagccacctatgacttgcttagtgctgatctgcgagcctattcctcacccctctaatattgaaatccccctcgattcaaagacttttctctcaaggcacagtctggacatgaaatttagctactgtgacgagaggattaccgaactgatgggatatgagcccgaagagcttctgggaaggtctatatatgagtactatcacgccctagacagcgatcacctgaccaagacccatcacgacatgtttactaagggtcaggtgacaaccggccagtaccgaatgcttgctaaaaggggcggctacgtgtgggtggagacacaggccacagtgatctacaacaccaaaaactcccagccccagtgtatcgtgtgcgtgaattacgtagtgagtgggatcatccagcacgaccttatttttagcctccagcagactgaatgtgtcctcaaacctgtcgagtcttctgacatgaagatgacgcaactgttcacaaaggtcgagagtgaagatacatccagcttgttcgataaactgaagaaagagccagatgcattgactctgctggcacccgccgcaggagataccataatttctctggattttggttcaaacgacacagagactgacgatcaacagctggaggaggtgccactgtataatgacgtgatgttgccttctcctaacgagaaacttcagaatatcaatctcgcaatgagcccactccccactgctgaaactcctaagcctctgcggagcagcgctgaccccgccctcaaccaagaggtggccctgaaactcgaaccaaatccagaatccctcgaactgtcctttaccatgccccaaatccaagaccaaactccctcgccttccgacggcagtacaagacagagctcgcccgagccgaattctccttctgagtactgcttctatgtggactcagatatggtcaacgaattcaagcttgagctggtagagaagctgttcgctgaggacacagaggccaagaatccgttcagtacgcaggacaccgacctggacctcgagatgctggcaccctacatccccatggacgatgacttccaacttagaagcttcgaccagttgtcgcccttggaatcctcgtccgcttctccggagtcagcctcgccacagagcacagtcaccgtgttccaacagacccagatacaagagccaaccgcaaacgctactactaccaccgccactacggacgaattgaagactgtcaccaaagatagaatggaggatattaaaatcctgattgcaagccccagtccaacacatattcataaggagactacgagcgcaacatctagtccatatagggatactcagtctaggaccgcgtcccctaaccgtgctggcaaaggggtgatcgaacagactgaaaagtcgcatcctcgcagtcctaacgtgctctccgtggctctgagccagcgcacaaccgtgccagaggaagaattgaaccctaagattctggctctacagaatgcacagcgaaagagaaagatggaacatgacggctccctatttcaggcagtggggattgggactctcctgcaacagcctgatgatcacgccgctacaacttctctctcttggaaaagagtgaaaggctgcaagtctagcgagcagaatgggatggagcaaaagactatcatcctgattccatccgatctcgcttgcagactccttggacagtcaatggatgagagcggactgccacagctcacatcatatgattgcgaagtgaacgctcccatccagggatcgcggaacctgctgcagggagaggaactgttgagagctcttgaccaagtgaat

SEQ ID NO: 118588 - DNA, 2478 bp, Artificial Sequence
  derived and/or modified sequence
atggaaggtgcgggtggtgcgaatgataaaaaaaaaatatcgtcggaacgtcgaaaagaaaaatcgcgagatgcggcgcgatcgcgtcgttcgaaagaatcggaagtattttatgaactagcgcatcaactaccgctaccgcataatgtatcgtcgcatttagataaagcgtcggttatgcgattaacgatatcgtatctacgtgtacgtaaattattagatgcgggtgatctagatatagaagatgatatgaaagcgcaaatgaattgtttttatctaaaagcgttagatggttttgttatggtattaacggatgatggtgatatgatatatatatcggataatgtaaataaatatatgggtttaacgcaatttgaattaacgggtcattcggtatttgattttacgcatccgtgtgatcatgaagaaatgcgtgaaatgctaacgcatcgtaatggtttagttaaaaaaggtaaagaacaaaatacgcaacgttcgttttttttacgtatgaaatgtacgctaacgtcgcgaggtcgtacgatgaatataaaatcggcgacgtggaaagtactacattgtacgggtcatatacatgtatatgatacgaattcgaatcaaccgcaatgtggttataaaaaaccgccgatgacgtgtttagtattaatatgtgaaccgataccgcatccgtcgaatatagaaataccgttagattcgaaaacgtttctatcgcgtcattcgttagatatgaaattttcgtattgtgatgaacgtataacggaattaatgggttatgaaccggaagaattattaggtcgatcgatatatgaatattatcatgcgctagattcggatcatctaacgaaaacgcatcatgatatgtttacgaaaggtcaagtaacgacgggtcaatatcgaatgttagcgaaacgaggtggttatgtatgggtagaaacgcaagcgacggttatatataatacgaaaaattcgcaaccgcaatgtatagtatgtgttaattatgtagtatcgggtataatacaacatgatttaatattttcgctacaacaaacggaatgtgttctaaaaccggtagaatcgtcggatatgaaaatgacgcaattatttacgaaagtagaatcggaagatacgtcgtcgctatttgataaattaaaaaaagaaccggatgcgttaacgctactagcgccggcggcgggtgatacgataatatcgttagattttggttcgaatgatacggaaacggatgatcaacaactagaagaagtaccgttatataatgatgttatgctaccgtcgccgaatgaaaaattacaaaatataaatctagcgatgtcgccgctaccgacggcggaaacgccgaaaccgttacgttcgtcggcggatccggcgctaaatcaagaagttgcgctaaaattagaaccgaatccggaatcgttagaattatcgtttacgatgccgcaaatacaagatcaaacgccgtcgccgtcggatggttcgacgcgacaatcgtcgccggaaccgaattcgccgtcggaatattgtttttatgtagattcggatatggtaaatgaatttaaactagaactagtagaaaaactatttgcggaagatacggaagcgaaaaatccgttttcgacgcaagatacggatctagatctagaaatgttagcgccgtatataccgatggatgatgattttcaactacgatcgtttgatcaattatcgccgctagaatcgtcgtcggcgtcgccggaatcggcgtcgccgcaatcgacggtaacggtatttcaacaaacgcaaatacaagaaccgacggcgaatgcgacgacgacgacggcgacgacggatgaactaaaaacggtaacgaaagatcgtatggaagatataaaaatattaatagcgtcgccgtcgccgacgcatatacataaagaaacgacgtcggcgacgtcgtcgccgtatcgagatacgcaatcgcgtacggcgtcgccgaatcgagcgggtaaaggtgtaatagaacaaacggaaaaatcgcatccgcgttcgccgaatgtactatcggtagcgttatcgcaacgtacgacggtaccggaagaagaattaaatccgaaaatactagcgttacaaaatgcgcaacgtaaacgtaaaatggaacatgatggttcgctatttcaagcggttggtataggtacgttactacaacaaccggatgatcatgcggcgacgacgtcgctatcgtggaaacgagttaaaggttgtaaatcgtcggaacaaaatggtatggaacaaaaaacgataatactaataccgtcggatttagcgtgtcgtttattaggtcaatcgatggatgaatcgggtctaccgcaactaacgtcgtatgattgtgaagtaaatgcgccgatacaaggttcgcgtaatctattacaaggtgaagaactattacgagcgctagatcaagttaat

SEQ ID NO: 118589 - DNA, 2478 bp, Artificial Sequence
  derived and/or modified sequence
atggagggcgccggcggcgccaacgacaagaagaagatcagcagcgagcgccgcaaggagaagagccgcgacgccgcccgcagccgccgcagcaaggagagcgaggtgttctacgagctggcccaccagctgcccctgccccacaacgtgagcagccacctggacaaggccagcgtgatgcgcctgaccatcagctacctgcgcgtgcgcaagctgctggacgccggcgacctggacatcgaggacgacatgaaggcccagatgaactgcttctacctgaaggccctggacggcttcgtgatggtgctgaccgacgacggcgacatgatctacatcagcgacaacgtgaacaagtacatgggcctgacccagttcgagctgaccggccacagcgtgttcgacttcacccacccctgcgaccacgaggagatgcgcgagatgctgacccaccgcaacggcctggtgaagaagggcaaggagcagaacacccagcgcagcttcttcctgcgcatgaagtgcaccctgaccagccgcggccgcaccatgaacatcaagagcgccacctggaaggtgctgcactgcaccggccacatccacgtgtacgacaccaacagcaaccagccccagtgcggctacaagaagccccccatgacctgcctggtgctgatctgcgagcccatcccccaccccagcaacatcgagatccccctggacagcaagaccttcctgagccgccacagcctggacatgaagttcagctactgcgacgagcgcatcaccgagctgatgggctacgagcccgaggagctgctgggccgcagcatctacgagtactaccacgccctggacagcgaccacctgaccaagacccaccacgacatgttcaccaagggccaggtgaccaccggccagtaccgcatgctggccaagcgcggcggctacgtgtgggtggagacccaggccaccgtgatctacaacaccaagaacagccagccccagtgcatcgtgtgcgtgaactacgtggtgagcggcatcatccagcacgacctgatcttcagcctgcagcagaccgagtgcgtgctgaagcccgtggagagcagcgacatgaagatgacccagctgttcaccaaggtggagagcgaggacaccagcagcctgttcgacaagctgaagaaggagcccgacgccctgaccctgctggcccccgccgccggcgacaccatcatcagcctggacttcggcagcaacgacaccgagaccgacgaccagcagctggaggaggtgcccctgtacaacgacgtgatgctgcccagccccaacgagaagctgcagaacatcaacctggccatgagccccctgcccaccgccgagacccccaagcccctgcgcagcagcgccgaccccgccctgaaccaggaggtggccctgaagctggagcccaaccccgagagcctggagctgagcttcaccatgccccagatccaggaccagacccccagccccagcgacggcagcacccgccagagcagccccgagcccaacagccccagcgagtactgcttctacgtggacagcgacatggtgaacgagttcaagctggagctggtggagaagctgttcgccgaggacaccgaggccaagaaccccttcagcacccaggacaccgacctggacctggagatgctggccccctacatccccatggacgacgacttccagctgcgcagcttcgaccagctgagccccctggagagcagcagcgccagccccgagagcgccagcccccagagcaccgtgaccgtgttccagcagacccagatccaggagcccaccgccaacgccaccaccaccaccgccaccaccgacgagctgaagaccgtgaccaaggaccgcatggaggacatcaagatcctgatcgccagccccagccccacccacatccacaaggagaccaccagcgccaccagcagcccctaccgcgacacccagagccgcaccgccagccccaaccgcgccggcaagggcgtgatcgagcagaccgagaagagccacccccgcagccccaacgtgctgagcgtggccctgagccagcgcaccaccgtgcccgaggaggagctgaaccccaagatcctggccctgcagaacgcccagcgcaagcgcaagatggagcacgacggcagcctgttccaggccgtgggcatcggcaccctgctgcagcagcccgacgaccacgccgccaccaccagcctgagctggaagcgcgtgaagggctgcaagagcagcgagcagaacggcatggagcagaagaccatcatcctgatccccagcgacctggcctgccgcctgctgggccagagcatggacgagagcggcctgccccagctgaccagctacgactgcgaggtgaacgcccccatccagggcagccgcaacctgctgcagggcgaggagctgctgcgcgccctggaccaggtgaac

SEQ ID NO: 118590 - DNA, 2481 bp, Artificial Sequence
  derived and/or modified sequence
atggagggcgccggcggcgccaacgacaagaagaaccgcatcagcagcgagcgccgcaaggagaagagccgcgacgccgcccgcagccgccgcagcaaggagagcgaggtgttctacgagctggcccaccagctgcccctgccccacaacgtgagcagccacctggacaaggccagcgtgatgcgcctgaccatcagctacctgcgcgtgcgcaagctgctggacgccggcgacctggacatcgaggacgacatgaaggcccagatgaactgcttctacctgaaggccctggacggcttcgtgatggtgctgaccgacgacggcgacatgatctacatcagcgacaacgtgaacaagtacatgggcctgacccagttcgagctgaccggccacagcgtgttcgacttcacccacccctgcgaccacgaggagatgcgcgagatgctgacccaccgcaacggcctggtgaagaagggcaaggagcagaacacccagcgcagcttcttcctgcgcatgaagtgcaccctgaccagccgcggccgcaccatgaacatcaagagcgccacctggaaggtgctgcactgcaccggccacatccacgtgtacgacaccaacagcaaccagccccagtgcggctacaagaagccccccatgacctgcctggtgctgatctgcgagcccatcccccaccccagcaacatcgagatccccctggacagcaagaccttcctgagccgccacagcctggacatgaagttcagctactgcgacgagcgcatcaccgagctgatgggctacgagcccgaggagctgctgggccgcagcatctacgagtactaccacgccctggacagcgaccacctgaccaagacccaccacgacatgttcaccaagggccaggtgaccaccggccagtaccgcatgctggccaagcgcggcggctacgtgtgggtggagacccaggccaccgtgatctacaacaccaagaacagccagccccagtgcatcgtgtgcgtgaactacgtggtgagcggcatcatccagcacgacctgatcttcagcctgcagcagaccgagtgcgtgctgaagcccgtggagagcagcgacatgaagatgacccagctgttcaccaaggtggagagcgaggacaccagcagcctgttcgacaagctgaagaaggagcccgacgccctgaccctgctggcccccgccgccggcgacaccatcatcagcctggacttcggcagcaacgacaccgagaccgacgaccagcagctggaggaggtgcccctgtacaacgacgtgatgctgcccagccccaacgagaagctgcagaacatcaacctggccatgagccccctgcccaccgccgagacccccaagcccctgcgcagcagcgccgaccccgccctgaaccaggaggtggccctgaagctggagcccaaccccgagagcctggagctgagcttcaccatgccccagatccaggaccagacccccagccccagcgacggcagcacccgccagagcagccccgagcccaacagccccagcgagtactgcttctacgtggacagcgacatggtgaacgagttcaagctggagctggtggagaagctgttcgccgaggacaccgaggccaagaaccccttcagcacccaggacaccgacctggacctggagatgctggccccctacatccccatggacgacgacttccagctgcgcagcttcgaccagctgagccccctggagagcagcagcgccagccccgagagcgccagcccccagagcaccgtgaccgtgttccagcagacccagatccaggagcccaccgccaacgccaccaccaccaccgccaccaccgacgagctgaagaccgtgaccaaggaccgcatggaggacatcaagatcctgatcgccagccccagccccacccacatccacaaggagaccaccagcgccaccagcagcccctaccgcgacacccagagccgcaccgccagccccaaccgcgccggcaagggcgtgatcgagcagaccgagaagagccacccccgcagccccaacgtgctgagcgtggccctgagccagcgcaccaccgtgcccgaggaggagctgaaccccaagatcctggccctgcagaacgcccagcgcaagcgcaagatggagcacgacggcagcctgttccaggccgtgggcatcggcaccctgctgcagcagcccgacgaccacgccgccaccaccagcctgagctggaagcgcgtgaagggctgcaagagcagcgagcagaacggcatggagcagaagaccatcatcctgatccccagcgacctggcctgccgcctgctgggccagagcatggacgagagcggcctgccccagctgaccagctacgactgcgaggtgaacgcccccatccagggcagccgcaacctgctgcagggcgaggagctgctgcgcgccctggaccaggtgaac

SEQ ID NO: 118591 - DNA, 2301 bp, Artificial Sequence
  derived and/or modified sequence
atgcgcctgaccatcagctacctgcgcgtgcgcaagctgctggacgccggcgacctggacatcgaggacgacatgaaggcccagatgaactgcttctacctgaaggccctggacggcttcgtgatggtgctgaccgacgacggcgacatgatctacatcagcgacaacgtgaacaagtacatgggcctgacccagttcgagctgaccggccacagcgtgttcgacttcacccacccctgcgaccacgaggagatgcgcgagatgctgacccaccgcaacggcctggtgaagaagggcaaggagcagaacacccagcgcagcttcttcctgcgcatgaagtgcaccctgaccagccgcggccgcaccatgaacatcaagagcgccacctggaaggtgctgcactgcaccggccacatccacgtgtacgacaccaacagcaaccagccccagtgcggctacaagaagccccccatgacctgcctggtgctgatctgcgagcccatcccccaccccagcaacatcgagatccccctggacagcaagaccttcctgagccgccacagcctggacatgaagttcagctactgcgacgagcgcatcaccgagctgatgggctacgagcccgaggagctgctgggccgcagcatctacgagtactaccacgccctggacagcgaccacctgaccaagacccaccacgacatgttcaccaagggccaggtgaccaccggccagtaccgcatgctggccaagcgcggcggctacgtgtgggtggagacccaggccaccgtgatctacaacaccaagaacagccagccccagtgcatcgtgtgcgtgaactacgtggtgagcggcatcatccagcacgacctgatcttcagcctgcagcagaccgagtgcgtgctgaagcccgtggagagcagcgacatgaagatgacccagctgttcaccaaggtggagagcgaggacaccagcagcctgttcgacaagctgaagaaggagcccgacgccctgaccctgctggcccccgccgccggcgacaccatcatcagcctggacttcggcagcaacgacaccgagaccgacgaccagcagctggaggaggtgcccctgtacaacgacgtgatgctgcccagccccaacgagaagctgcagaacatcaacctggccatgagccccctgcccaccgccgagacccccaagcccctgcgcagcagcgccgaccccgccctgaaccaggaggtggccctgaagctggagcccaaccccgagagcctggagctgagcttcaccatgccccagatccaggaccagacccccagccccagcgacggcagcacccgccagagcagccccgagcccaacagccccagcgagtactgcttctacgtggacagcgacatggtgaacgagttcaagctggagctggtggagaagctgttcgccgaggacaccgaggccaagaaccccttcagcacccaggacaccgacctggacctggagatgctggccccctacatccccatggacgacgacttccagctgcgcagcttcgaccagctgagccccctggagagcagcagcgccagccccgagagcgccagcccccagagcaccgtgaccgtgttccagcagacccagatccaggagcccaccgccaacgccaccaccaccaccgccaccaccgacgagctgaagaccgtgaccaaggaccgcatggaggacatcaagatcctgatcgccagccccagccccacccacatccacaaggagaccaccagcgccaccagcagcccctaccgcgacacccagagccgcaccgccagccccaaccgcgccggcaagggcgtgatcgagcagaccgagaagagccacccccgcagccccaacgtgctgagcgtggccctgagccagcgcaccaccgtgcccgaggaggagctgaaccccaagatcctggccctgcagaacgcccagcgcaagcgcaagatggagcacgacggcagcctgttccaggccgtgggcatcggcaccctgctgcagcagcccgacgaccacgccgccaccaccagcctgagctggaagcgcgtgaagggctgcaagagcagcgagcagaacggcatggagcagaagaccatcatcctgatccccagcgacctggcctgccgcctgctgggccagagcatggacgagagcggcctgccccagctgaccagctacgactgcgaggtgaacgcccccatccagggcagccgcaacctgctgcagggcgaggagctgctgcgcgccctggaccaggtgaac

SEQ ID NO: 118592 - DNA, 2667 bp, Artificial Sequence
  derived and/or modified sequence
taatacgactcactatagggaaataagagagaaaagaagagtaagaagaaatataagagccaccatggagggcgccggcggcgcgaacgacaagaaaaagataagttctgaacgtcgaaaagaaaagtctcgagatgcagccagatctcggcgaagtaaagaatctgaagttttttatgagcttgctcatcagttgccacttccacataatgtgagttcgcatcttgataaggcctctgtgatgaggcttaccatcagctatttgcgtgtgaggaaacttctggatgctggtgatttggatattgaagatgacatgaaagcacagatgaattgcttttatttgaaagccttggatggttttgttatggttctcacagatgatggtgacatgatttacatttctgataatgtgaacaaatacatgggattaactcagtttgaactaactggacacagtgtgtttgattttactcatccatgtgaccatgaggaaatgagagaaatgcttacacacagaaatggccttgtgaaaaagggtaaagaacaaaacacacagcgaagcttttttctcagaatgaagtgtaccctaactagccgaggaagaactatgaacataaagtctgcaacatggaaggtattgcactgcacaggccacattcacgtatatgataccaacagtaaccaacctcagtgtgggtataagaaaccacctatgacctgcttggtgctgatttgtgaacccattcctcacccatcaaatattgaaattcctttagatagcaagactttcctcagtcgacacagcctggatatgaaattttcttattgtgatgaaagaattaccgaattgatgggatatgagccagaagaacttttaggccgctcaatttatgaatattatcatgctttggactctgatcatctgaccaaaactcatcatgatatgtttactaaaggacaagtcaccacaggacagtacaggatgcttgccaaaagaggtggatatgtctgggttgaaactcaagcaactgtcatatataacaccaagaattctcaaccacagtgcattgtatgtgtgaattacgttgtgagtggtattattcagcacgacttgattttctcccttcaacaaacagaatgtgtccttaaaccggttgaatcttcagatatgaaaatgactcagctattcaccaaagttgaatcagaagatacaagtagcctctttgacaaacttaagaaggaacctgatgctttaactttgctggccccagccgctggagacacaatcatatctttagattttggcagcaacgacacagaaactgatgaccagcaacttgaggaagtaccattatataatgatgtaatgctcccctcacccaacgaaaaattacagaatataaatttggcaatgtctccattacccaccgctgaaacgccaaagccacttcgaagtagtgctgaccctgcactcaatcaagaagttgcattaaaattagaaccaaatccagagtcactggaactttcttttaccatgccccagattcaggatcagacacctagtccttccgatggaagcactagacaaagttcacctgagcctaatagtcccagtgaatattgtttttatgtggatagtgatatggtcaatgaattcaagttggaattggtagaaaaactttttgctgaagacacagaagcaaagaacccattttctactcaggacacagatttagacttggagatgttagctccctatatcccaatggatgatgacttccagttacgttccttcgatcagttgtcaccattagaaagcagttccgcaagccctgaaagcgcaagtcctcaaagcacagttacagtattccagcagactcaaatacaagaacctactgctaatgccaccactaccactgccaccactgatgaattaaaaacagtgacaaaagaccgtatggaagacattaaaatattgattgcatctccatctcctacccacatacataaagaaactactagtgccacatcatcaccatatagagatactcaaagtcggacagcctcaccaaacagagcaggaaaaggagtcatagaacagacagaaaaatctcatccaagaagccctaacgtgttatctgtcgctttgagtcaaagaactacagttcctgaggaagaactaaatccaaagatactagctttgcagaatgctcagagaaagcgaaaaatggaacatgatggttcactttttcaagcagtaggaattggaacattattacagcagccagacgatcatgcagctactacatcactttcttggaaacgtgtaaaaggatgcaaatctagtgaacagaatggaatggagcaaaagacaattattttaataccctctgatttagcatgtagactgctggggcaatcaatggatgaaagtggattaccacagctgaccagttatgattgtgaagttaatgctcctatacaaggcagcagaaacctactgcagggtgaagaattactcagagctttggatcaagttaactgataataggctggagcctcggtggccatgcttcttgccccttgggcctccccccagcccctcctccccttcctgcacccgtacccccgtggtctttgaataaagtctgagtgggcggctctaga

SEQ ID NO: 118593 - protein, 341 aa, Artificial Sequence
  derived and/or modified sequence
MGELMAFLLPLIIVLMVKHSDSRTHSLRYFRLGVSDPIHGVPEFISVGYVDSHPITTYDSVTRQKEPRAPWMAENLAPDHWERYTQLLRGWQQMFKVELKRLQRHYNHSGSHTYQRMIGCELLEDGSTTGFLQYAYDGQDFLIFNKDTLSWLAVDNVAHTIKQAWEANQHELLYQKNWLEEECIAWLKRFLEYGKDTLQRTEPPLVRVNRKETFPGVTALFCKAHGFYPPEIYMTWMKNGEEIVQEIDYGDILPSGDGTYQAWASIELDPQSSNLYSCHVEHCGVHMVLQVPQESETIPLVMKAVSGSIVLVIVLAGVGVLVWRRRPREQNGAIYLPTPDR

SEQ ID NO: 118594 - DNA, 1026 bp, Artificial Sequence
  derived and/or modified sequence
atgggagaactgatggcttttcttttgccccttattatcgtactgatggtgaaacatagcgattcacggacccacagtctgcggtatttccgcctgggggtgtcagacccaattcacggggtccctgaattcatctctgtgggatatgttgactctcaccccatcaccacatacgatagcgtgacccgccagaaggaaccacgagcaccatggatggcagagaatctggcaccagatcattgggaaaggtacacacagctgctgagagggtggcagcagatgttcaaggtggagttgaagcgcttacaacggcactacaaccacagtggatcccatacataccagcggatgatcggctgtgaactcctggaggacgggtcaaccacaggctttctgcagtacgcctatgacggacaggactttctgatcttcaataaggacacactgagttggctggctgtggataatgtggcccacaccatcaaacaggcgtgggaggccaatcaacatgagcttctctatcagaagaactggctggaggaagagtgtattgcctggctaaaaaggtttctggagtatgggaaggacaccctacaacggacggaaccccccctggtgagggtgaacagaaaagagactttccctggtgtaactgccctgttttgcaaagcccacggattttatccaccggaaatttacatgacatggatgaagaacggcgaagagattgtacaggagattgactatggcgacattctccctagcggagatgggacgtaccaggcttgggctagcatcgaactggaccctcaaagctcaaatctttattcgtgtcatgtagagcattgtggcgtgcacatggtgctacaggtaccccaggaaagtgaaaccatcccattagtcatgaaggccgtgtccggatcaatcgttcttgttatcgtcttggccggtgtgggagtactcgtctggcgacgacgcccaagagagcaaaacggagcaatctacctgcccaccccggaccggtag

SEQ ID NO: 118595 - DNA, 1026 bp, Artificial Sequence
  derived and/or modified sequence
atgggagagctgatggccttcctgctgcccctcatcatcgtgctgatggtgaagcacagcgacagcaggacccacagcctgcgctacttccggctgggcgtgtctgaccccatccatggagtgcctgagttcatctctgtgggctacgtggacagccaccccatcaccacctatgacagcgtgacccggcagaaggagccccgggccccctggatggccgagaacctggccccagaccactgggagcgctacacccagctgctgcggggctggcagcagatgttcaaggtggagctgaagaggctgcagaggcactacaaccacagcggcagccacacctaccagaggatgattggctgtgagctgctggaggatggcagcaccaccggcttcctgcagtatgcctatgatggccaggacttcctgatcttcaacaaggacaccctgtcctggctggccgtggacaacgtggcccacaccatcaagcaggcctgggaggccaaccagcacgagctgctgtaccagaagaactggctggaggaggagtgcatcgcctggctgaagcgcttcctggagtatggcaaggacaccctgcagaggacagagccccccctggtgcgggtgaacaggaaggagaccttccctggggtgacagccctcttctgcaaggcccacggcttctacccacctgagatctacatgacctggatgaagaatggagaggagatcgtgcaggagattgattatggagacatcctgcccagcggagatggcacctaccaggcctgggccagcattgagctggacccccagagcagcaacctgtacagctgccacgtggagcactgcggcgtgcacatggtgctgcaggtgccccaggagagcgagaccatccccctggtgatgaaggctgtgtctggcagcatcgtgctggtgattgtgctggccggcgtgggcgtgctggtgtggaggagaagaccccgggagcagaatggagccatctacctgcccaccccagacagatag

SEQ ID NO: 118596 - DNA, 7704 bp, Artificial Sequence
  derived and/or modified sequence
ggactatgggggaactgatggcgttcctgttacctctcatcattgtgttaatggtgaagcacagcgattcccggacgcactctctgagatattttcgcctgggcgtttcggatcccatccatggggtccctgaatttatttcggttgggtacgtggactcgcaccctatcaccacatatgacagtgtcactcggcagaaggagccacgggccccatggatggcagagaacctcgcgcctgatcactgggagaggtacactcagctgctgaggggctggcagcagatgttcaaggtggaactgaagcgcctacagaggcactacaatcactcagggtctcacacttaccagagaatgattggctgtgagctgctggaggatggaagcaccacaggatttctgcagtatgcatatgacgggcaggatttcctgatcttcaataaagacaccctctcctggctggctgtagataatgtggctcacaccatcaagcaggcatgggaggccaatcagcatgagttgctgtatcaaaagaattggctggaagaagaatgtattgcctggctaaagagattcctggagtatgggaaagacaccctacaaagaacagagcccccactggtcagagtaaatcgcaaagaaacttttccaggggttacagctctcttctgcaaagctcatggcttttaccccccagaaatttacatgacatggatgaaaaacggggaagaaattgtccaagaaattgattatggagacattcttcccagtggggatggaacctatcaggcgtgggcatcaattgagcttgatcctcagagcagcaacctttactcctgtcatgtggagcactgcggtgtccacatggttcttcaggtcccccaggaatcagaaactatccctcttgtgatgaaagctgtctctgggtccattgtccttgtcattgtgctggctggagttggtgttctagtctggagaagaaggccccgagagcaaaatggagccatctaccttccaacaccagatcgatgattgcagatccctcttttccagttctccttcctctaggagccatgttatcctctgtcccccatagagtcaagcctagtgcttgaaggtcctgacgacacccacaacatacatgagagtaatgggattgagcatttatggcagcaacagaggagccacaaaatgttctttgttctttggctccaaaaagactgtcagctttcagtctcttttgatggactgttttatcagagttgactttaaatacagcttgtctcatgacacaacgcttccctacattctatttgtcaatgatgatttgcaactagttggagattctcagagcaggaaggaatcttttcaaccagagcaggaactgtcttctgcaatgccttggacttgagcctccagcctccacttgaacaccatgtgaagggaacctcagtacttcataaaatggcctttctcattcatctttcatgggaacatttattgtacaagcgctttgaatatcatgggcaccatgactgtgaccctacaggtaggattggatcactccatgagagtagccggcaggtttctacaatggcctgggaatggactgattatttttatacattttctggcctgagagaaagccaaagtcccctgctgttcacagcaaccctgcctgggagcttggaatcttggtaatctgcccggttggatctatggaggtagtctcaccctttttgtcttttgtgggaaattaagagaaataattatcagacatatcatcacctccagtggaactacagagacctggacccagctgcactattttaatgtaaaaataacagtatggccaggtgcagtggctcacgcctgtaatcccatcactttgagcagccaaggcgggcggatcacgaggtcaggagattaagaccatcctggccaatatggtgaaaccctgtctctactaaaatacaaaaaattagctgggcatggtgttgcgtgcctgtagtcccagctacttgggaggctgagacaggggaattgcttgaacccgggaggcagagattgcagtgagccgagatcacgccactgcactccagcctggcgacagagtgagactctatctcaaaataataataataataataataataataataataataataacagtatatttggtgtcaggagagggctcaattctcatttctgcctttcctgtgctggctcatggtagctgggcatgacttgccttcctacataggttgtcttcatacatatgcactgggaatcaataaaagcccatggtgagaatgaacatccccttaatgttccttactatccccaacccctgaggcctcacctactgccctgccatgtggagctacttgccctggggctgccagtcacacattcctcggtcctacttctctgaccccgtttgactctgcacctgagccctaatgcttacttcagtgacctgaactttgacaagtggcttttgtcctgcacctcaggtttgacctctgctctcccttgaccttgactgtgacatttgacctttggctttaatcattacagcctcagataaaggtaccttcagcccgggcacagtggctcacgcctgtaatcctagcactttgggaggctgaggcaggcggattccctgagctcaggagttcaagaccagcctgggcaacacggtgaaaccctgtctctactaaaatacaaataattagctgggcatggtggcatgtgcctatagtcccagctacttgggaggctaaggcaggagaatcacttgaatctataaggcagaggtggcagtgagccgagatcacaccactgcactccagcctgggcaacggagcaagactctgtctccaaaaaaaaaaagaaagataccctcagtgtgccaggcctctaagagctcacctgccaggcttcctccttgctccactgtcccatgtaattccatatatgaagctaccactgtacatctctcttttccggtgcctgttgagttgcatagaagcacagttgtgtttattttgtttttagggttgccatgggcaatttccgtgccacttttaagcagtgttgcactgtgaagagaatgtaggcaagtttatttctggaatggtttcttcttacaatcagaatagttaggatgtaatatatttttgggtgggcatttaaagtgaaaaggtacatatttacatagacacaggtgataatgtatctatgtaaatgccttttgattctgcaactgcaggatactctcatcaaagacacagataaaaagcctctgtgtttccaaggccttgccctacacctaacacataatatgtccaaatggatgaagaggaggcaaggacaaggatgtgatgacaaaacattctgttatgcacttgtagcatttatgtttcttcctgggggattttataatactaaaagaatcataatataaagagatgattaaaaaaaaaatactgccgggcacggtggctcatgcctgtaatcccagcattttgggaggccgaggtgggcagatcacctgaggtcgggagttcgagaccagcctgaccaacatggagaaaccctgtctctaccaaacatacaaaattagccggggatggtggcgcatgcctataatcccagctactcgggagtctgaggcagaagaaccgcttgaacccgggaggcagaggttgtggtgagccgagatcgcgccatcgcactctagcctgggcaacaagagtgaaactccatctcaaaaaaataaaaataaaataagtaagtaatacctaaaattctgcaaccttcattttactatagatggttgaagattatattacttcttaattgttttagccttgttattgcttcattacttcatggttgttgagtacagatgctcagtaatcataacctatgaaatatttgacaccatgatctaaacattaaaaacaaataactgtgctattgccacagctatgttttggctttgaattttctttactgaatattttggatcaagaacactagatgagaaacctgttcaactctgttcttttttttttttttaactccactgtatttattacctgtttttgttttttttgtttgtttgtttttgatgtgcatatagaccaagatgtggtaaatttaaatggcagatgtttttgatgtggtacatttaagggagagaaagcagtttaaagagcagggtgaaaaatccaacaagactccatcgagagtttctgagctctcccatcaggggccagtcctcctttcctctctcctcttactcccatgatttccaagttgtgatcctttccttatttctgaggaatgacttggtttctcctcttctttttttggcctgagagaagatgtttttgcacttgtagctatgaggaacagattgtccactagggaggccagctgatcattttctgccagagtcacacagagcagtcacaccttattttgaaaaccactgtctggggtctttgtcctcacatatgcaggtctagtgtccccacaaagtgatcagatggatatataaagtggagtgccaatgtattaatttactgtgagaaacacaattgctaagtgggtcagatatctgtctcagctggtcagtacaccttccagcaggaaaatctacataagaacaactaaatcacaatctgtagagtgcttgatgaccccagaattggtgcaaggggacacattcttgcttgttagcacctgctctctggagtttgctattttctcacacacagtgtattagttcacagaatgttctccaaggaggacagggggctttgcccatagccatgtgctgtgggcagcagagctaggaagaagcacaggcatctcccagcccaggtgtttcccacttaactgcattgcccttttcatcttttttttttccccaatagcttcaggacattcagtacattgtgctttttagaggttgatgattccactgcctgagctgccttcacctctctttctttggaaattgccatctttgagcattgtatgtctctgtaacatctctgcatctccttttcactctggcctccctttctccattgtccttctagcttctggttgccccaaaccccacagactgtgtaacaaaacccaaaacctattggtttaaaacaatacccattttattttctttcatagtttctatgggtcaggaatttggatatggcttgggtaagcagttctggcttctcatggagttggaggcaagtggtggctggaacagaaatggggcagccaggggtggtggccaggcatcagctacatctcctccatgtagtctcaggaactctccatgtaatctctctgtgtgggttgggcttcctcacaacatggtggcctcagggcagtcactgcttacatggcagctagcttccctcagagtgagtatcccaagagatcacagtcaaagtgcatagcatttatataatctaatcttggaagtcacaaaatgtcattcttgtgatactctcattggtgaagaagtcataaaatcctgctcaggttcaaaaagagggtgtatagaacccaacactcaataggaagattgtcagagttacattgtaagaagagcatgtagttgggagatatcattgtggccattttgggaaagatgcaacatgtcacaatgtcatgttctccatcgtctccccgttccaccttgtactggtttccaagggtagtcgtttaaaagtaccacaaaaactgggtggcttggaacaacagaaatttattgtttcacagttctggaggccagaagttcaaaatgaagtgttggcagaaacatgctgcctctaaagggactgggaaaggatctgttccaggcttccctcctatcttctggttgttccttgccttctggctgcgtaactctagtcttcatttggtgttctccctgcatgcatggctttgtgtccaaatttccttttttcatgaggccatcagtcatactggattagggacccactctactactgcaggatgacctcaccttcccaaattacatctgcaacaaccctatttccaaagaaggccacattctgaggtactgggggttataacttcaacatgaattttttggaggaaacaattcaactcctaacacatctctacccaacctctgtaggttccctcaatccaccaaaattttttggctccactggattatctagcagttaggaaaccaagatcattaaatgaattcaccgcaactacagtgagactgactaccttagcttacctctgtgaaaggagttaagccaaaggaatctgtggaattttggagagtttgggagcatttgggggcaggaggcaaatgttcttcctttaaatcacaacacttagttctcttccatttataagactcacccctccatcccaacccctgcaccacaggacaaggaagtgttcttggtcttcaactttcatccctgatggtgaaagcagttgctcctgacctatttgcccaccagcttctcctctggagcctgaggcttctgatgcctgcctggctggttctcagtaagaaggtcaagttcaaccagaggggagatgctgatgcctttcagtacttaaatatgagttcagaccctggggcctggacataagatttggggtcccctggatataagatttctgaaaacactcagactgtggagacccctgctgagggagaagccccaaactgtggcttcaggggaatgcaccaaggctctcattgaggccaccttctccaacaagctcccctcctgcttccccatggctggcatggctgaggaaaaaggacactgagcacagcccgtgcatgagcggcttgccatgcaacaggataaaacccataatgccactcagcaagccttggttgtaaatctagtttgattacatttgtaatcaaatgatggccatttgttctgtttctggtttgtgaaccaactgaagacataagcagggcctcagctaacccacaaatagcacatgtgtgcaaactggaaaaatgaacccttcttctgggaggacgccagcccaggccaggtcacccggcttggccagcagaacacagagtagattttggtcccgtttgttccccagtggggtatctatccttgtgcagggcacaagcctacatggtggctctggtcatatcattagaaaatagacagaaatgggctgcacaccagaatgaatgaattgaattgaaagggaggagtgatggtggaaaaaaaaacaagtcaattcatttagactggtagaaccagaaccactgtgtagtacatccaaacggttaaaattccctggaagatgttacataatcctatcatggtgtttatttatggaaatctattttaaaaattttatgtaatactgcacagtctgtttgcatgatgccttgtacgtagtagcaactcagtaaatactttttgaatgaactagtatagtattttaattagctagtcttcatgtactggtacaaaagaacagtgtcatcttacagctgaagtcatagaggggaaatatcccactcaagatcatataacattccaggtactcaggatgaatggtttgaggactggtctgaattcttcaaaggtttcagctgtattaacattctccatctaataaactttatcttgtcattgca

SEQ ID NO: 118597 - DNA, 1026 bp, Artificial Sequence
  derived and/or modified sequence
atgggcgagctgatggccttcctgctgcccctgatcatcgtgctgatggtcaaacacagcgactctcgcacacattctctccgatattttcgcctgggggtctccgatcccatccatggggtgccagaatttatttccgtggggtacgttgatagtcaccctattaccacgtacgatagcgtcacacgtcagaaggagcctagggccccctggatggctgagaatctggcccccgaccactgggagcggtatactcaattgcttcgagggtggcagcagatgttcaaggtggaacttaaaaggctgcaaagacactacaatcattccggctcacatacataccaacggatgataggttgtgaactgctagaagacggcagtacaacgggtttccttcagtatgcatatgacggccaggacttcctgatcttcaacaaggataccctttcctggctggccgtggacaacgtggcccacactatcaaacaggcctgggaggcaaatcagcacgaactgctctatcagaagaactggctggaagaggaatgcatagcctggcttaagaggtttctggagtacgggaaagataccctgcagaggacagaacctcctctggtgcgtgttaatcggaaagagacattccctggggtcaccgcactcttctgtaaagcacatggtttttacccacccgaaatctatatgacttggatgaagaatggagaggagatcgtgcaggaaatcgactatggagatattcttcccagcggggacggcacttaccaggcatgggccagtattgaactcgacccccaaagtagcaatctgtatagctgtcatgtggaacactgcggagttcatatggttctgcaggtgcctcaagagtccgagaccatcccactggttatgaaggctgtcagtggcagtatcgtcttggtgattgtgttagccggtgttggcgtactggtttggcgtagaagaccacgggaacaaaacggcgccatctacctgcccacgcctgatcgctag

SEQ ID NO: 118598 - DNA, 1026 bp, Artificial Sequence
  derived and/or modified sequence
atgggagaactcatggcatttctgttgccattaatcatagtgcttatggtgaagcactccgattcacgcacccactccctacgttactttaggcttggggttagcgatcccatccatggcgtacctgagttcatatctgttggctacgttgactcacaccccattaccacgtatgactccgtaaccaggcaaaaggagccacgggctccttggatggcagaaaacctggctccagatcactgggaacgctacactcaattgttgcgcggatggcaacagatgttcaaagtagagctgaaacgtttgcagaggcattataaccatagtggctctcatacctaccagcgaatgattggatgcgagctccttgaggatggaagcaccaccgggttccttcagtacgcctacgatgggcaggacttcctgatatttaacaaggacaccctttcatggcttgcggtggacaatgtggctcacactataaagcaggcctgggaggctaaccagcatgagttgctgtatcagaagaactggctagaggaagagtgtatcgcatggctaaaacgcttcctggagtacgggaaggatactttgcagcggaccgaacctcctcttgtgcgcgtgaaccgaaaagagacattccctggcgtcaccgctctgttctgcaaagctcacggtttttatccacctgagatctacatgacctggatgaagaatggagaagagattgtacaagagatcgattacggggacatccttcctagcggcgatggcacctaccaggcctgggcatcaattgaattggacccccagtcctctaatttatacagttgccatgttgagcactgcggagtgcacatggtgctccaagtgcctcaggaaagcgagaccatccccctggttatgaaagccgtaagtggcagcatcgtgcttgtcattgtgctggccggagttggagtgctagtctggaggcgcaggcccagggagcaaaatggagctatctacctacctacacccgaccgttag

SEQ ID NO: 118599 - DNA, 1026 bp, Artificial Sequence
  derived and/or modified sequence
atgggcgagctgatggccttcctgctgcccctgatcatcgtgctgatggtgaagcacagcgacagcagaacccacagcctgagatacttcagactgggcgtgagcgaccccatccacggcgtgcccgagttcatcagcgtgggctacgtggacagccaccccatcaccacctacgacagcgtgaccagacagaaggagcccagagccccctggatggccgagaacctggcccccgaccactgggagagatacacccagctgctgagaggctggcagcagatgttcaaggtggagctgaagagactgcagagacactacaaccacagcggcagccacacctaccagagaatgatcggctgcgagctgctggaggacggcagcaccaccggcttcctgcagtacgcctacgacggccaggacttcctgatcttcaacaaggacaccctgagctggctggccgtggacaacgtggcccacaccatcaagcaggcctgggaggccaaccagcacgagctgctgtaccagaagaactggctggaggaggagtgcatcgcctggctgaagagattcctggagtacggcaaggacaccctgcagagaaccgagccccccctggtgagagtgaacagaaaggagaccttccccggcgtgaccgccctgttctgcaaggcccacggcttctacccccccgagatctacatgacctggatgaagaacggcgaggagatcgtgcaggagatcgactacggcgacatcctgcccagcggcgacggcacctaccaggcctgggccagcatcgagctggacccccagagcagcaacctgtacagctgccacgtggagcactgcggcgtgcacatggtgctgcaggtgccccaggagagcgagaccatccccctggtgatgaaggccgtgagcggcagcatcgtgctggtgatcgtgctggccggcgtgggcgtgctggtgtggagaagaagacccagagagcagaacggcgccatctacctgcccacccccgacagatag

SEQ ID NO: 118600 - DNA, 7860 bp, Artificial Sequence
  derived and/or modified sequence
agaatcttctgtaggcctttctcttgccttcttttattcacaactgatgacactgcatatcttcccctgttcttattgggagaaggccttgtgtgtcaccaagaggttctcagaagggacctgtcagtttttggttaaaagaacccggaaagagaaggactatgggggaactgatggcgttcctgttacctctcatcattgtgttaatggtgaagcacagcgattcccggacgcactctctgagatattttcgcctgggcgtttcggatcccatccatggggtccctgaatttatttcggttgggtacgtggactcgcaccctatcaccacatatgacagtgtcactcggcagaaggagccacgggccccatggatggcagagaacctcgcgcctgatcactgggagaggtacactcagctgctgaggggctggcagcagatgttcaaggtggaactgaagcgcctacagaggcactacaatcactcagggtctcacacttaccagagaatgattggctgtgagctgctggaggatggaagcaccacaggatttctgcagtatgcatatgacgggcaggatttcctgatcttcaataaagacaccctctcctggctggctgtagataatgtggctcacaccatcaagcaggcatgggaggccaatcagcatgagttgctgtatcaaaagaattggctggaagaagaatgtattgcctggctaaagagattcctggagtatgggaaagacaccctacaaagaacagagcccccactggtcagagtaaatcgcaaagaaacttttccaggggttacagctctcttctgcaaagctcatggcttttaccccccagaaatttacatgacatggatgaaaaacggggaagaaattgtccaagaaattgattatggagacattcttcccagtggggatggaacctatcaggcgtgggcatcaattgagcttgatcctcagagcagcaacctttactcctgtcatgtggagcactgcggtgtccacatggttcttcaggtcccccaggaatcagaaactatccctcttgtgatgaaagctgtctctgggtccattgtccttgtcattgtgctggctggagttggtgttctagtctggagaagaaggccccgagagcaaaatggagccatctaccttccaacaccagatcgatgattgcagatccctcttttccagttctccttcctctaggagccatgttatcctctgtcccccatagagtcaagcctagtgcttgaaggtcctgacgacacccacaacatacatgagagtaatgggattgagcatttatggcagcaacagaggagccacaaaatgttctttgttctttggctccaaaaagactgtcagctttcagtctcttttgatggactgttttatcagagttgactttaaatacagcttgtctcatgacacaacgcttccctacattctatttgtcaatgatgatttgcaactagttggagattctcagagcaggaaggaatcttttcaaccagagcaggaactgtcttctgcaatgccttggacttgagcctccagcctccacttgaacaccatgtgaagggaacctcagtacttcataaaatggcctttctcattcatctttcatgggaacatttattgtacaagcgctttgaatatcatgggcaccatgactgtgaccctacaggtaggattggatcactccatgagagtagccggcaggtttctacaatggcctgggaatggactgattatttttatacattttctggcctgagagaaagccaaagtcccctgctgttcacagcaaccctgcctgggagcttggaatcttggtaatctgcccggttggatctatggaggtagtctcaccctttttgtcttttgtgggaaattaagagaaataattatcagacatatcatcacctccagtggaactacagagacctggacccagctgcactattttaatgtaaaaataacagtatggccaggtgcagtggctcacgcctgtaatcccatcactttgagcagccaaggcgggcggatcacgaggtcaggagattaagaccatcctggccaatatggtgaaaccctgtctctactaaaatacaaaaaattagctgggcatggtgttgcgtgcctgtagtcccagctacttgggaggctgagacaggggaattgcttgaacccgggaggcagagattgcagtgagccgagatcacgccactgcactccagcctggcgacagagtgagactctatctcaaaataataataataataataataataataataataataataacagtatatttggtgtcaggagagggctcaattctcatttctgcctttcctgtgctggctcatggtagctgggcatgacttgccttcctacataggttgtcttcatacatatgcactgggaatcaataaaagcccatggtgagaatgaacatccccttaatgttccttactatccccaacccctgaggcctcacctactgccctgccatgtggagctacttgccctggggctgccagtcacacattcctcggtcctacttctctgaccccgtttgactctgcacctgagccctaatgcttacttcagtgacctgaactttgacaagtggcttttgtcctgcacctcaggtttgacctctgctctcccttgaccttgactgtgacatttgacctttggctttaatcattacagcctcagataaaggtaccttcagcccgggcacagtggctcacgcctgtaatcctagcactttgggaggctgaggcaggcggattccctgagctcaggagttcaagaccagcctgggcaacacggtgaaaccctgtctctactaaaatacaaataattagctgggcatggtggcatgtgcctatagtcccagctacttgggaggctaaggcaggagaatcacttgaatctataaggcagaggtggcagtgagccgagatcacaccactgcactccagcctgggcaacggagcaagactctgtctccaaaaaaaaaaagaaagataccctcagtgtgccaggcctctaagagctcacctgccaggcttcctccttgctccactgtcccatgtaattccatatatgaagctaccactgtacatctctcttttccggtgcctgttgagttgcatagaagcacagttgtgtttattttgtttttagggttgccatgggcaatttccgtgccacttttaagcagtgttgcactgtgaagagaatgtaggcaagtttatttctggaatggtttcttcttacaatcagaatagttaggatgtaatatatttttgggtgggcatttaaagtgaaaaggtacatatttacatagacacaggtgataatgtatctatgtaaatgccttttgattctgcaactgcaggatactctcatcaaagacacagataaaaagcctctgtgtttccaaggccttgccctacacctaacacataatatgtccaaatggatgaagaggaggcaaggacaaggatgtgatgacaaaacattctgttatgcacttgtagcatttatgtttcttcctgggggattttataatactaaaagaatcataatataaagagatgattaaaaaaaaaatactgccgggcacggtggctcatgcctgtaatcccagcattttgggaggccgaggtgggcagatcacctgaggtcgggagttcgagaccagcctgaccaacatggagaaaccctgtctctaccaaacatacaaaattagccggggatggtggcgcatgcctataatcccagctactcgggagtctgaggcagaagaaccgcttgaacccgggaggcagaggttgtggtgagccgagatcgcgccatcgcactctagcctgggcaacaagagtgaaactccatctcaaaaaaataaaaataaaataagtaagtaatacctaaaattctgcaaccttcattttactatagatggttgaagattatattacttcttaattgttttagccttgttattgcttcattacttcatggttgttgagtacagatgctcagtaatcataacctatgaaatatttgacaccatgatctaaacattaaaaacaaataactgtgctattgccacagctatgttttggctttgaattttctttactgaatattttggatcaagaacactagatgagaaacctgttcaactctgttcttttttttttttttaactccactgtatttattacctgtttttgttttttttgtttgtttgtttttgatgtgcatatagaccaagatgtggtaaatttaaatggcagatgtttttgatgtggtacatttaagggagagaaagcagtttaaagagcagggtgaaaaatccaacaagactccatcgagagtttctgagctctcccatcaggggccagtcctcctttcctctctcctcttactcccatgatttccaagttgtgatcctttccttatttctgaggaatgacttggtttctcctcttctttttttggcctgagagaagatgtttttgcacttgtagctatgaggaacagattgtccactagggaggccagctgatcattttctgccagagtcacacagagcagtcacaccttattttgaaaaccactgtctggggtctttgtcctcacatatgcaggtctagtgtccccacaaagtgatcagatggatatataaagtggagtgccaatgtattaatttactgtgagaaacacaattgctaagtgggtcagatatctgtctcagctggtcagtacaccttccagcaggaaaatctacataagaacaactaaatcacaatctgtagagtgcttgatgaccccagaattggtgcaaggggacacattcttgcttgttagcacctgctctctggagtttgctattttctcacacacagtgtattagttcacagaatgttctccaaggaggacagggggctttgcccatagccatgtgctgtgggcagcagagctaggaagaagcacaggcatctcccagcccaggtgtttcccacttaactgcattgcccttttcatcttttttttttccccaatagcttcaggacattcagtacattgtgctttttagaggttgatgattccactgcctgagctgccttcacctctctttctttggaaattgccatctttgagcattgtatgtctctgtaacatctctgcatctccttttcactctggcctccctttctccattgtccttctagcttctggttgccccaaaccccacagactgtgtaacaaaacccaaaacctattggtttaaaacaatacccattttattttctttcatagtttctatgggtcaggaatttggatatggcttgggtaagcagttctggcttctcatggagttggaggcaagtggtggctggaacagaaatggggcagccaggggtggtggccaggcatcagctacatctcctccatgtagtctcaggaactctccatgtaatctctctgtgtgggttgggcttcctcacaacatggtggcctcagggcagtcactgcttacatggcagctagcttccctcagagtgagtatcccaagagatcacagtcaaagtgcatagcatttatataatctaatcttggaagtcacaaaatgtcattcttgtgatactctcattggtgaagaagtcataaaatcctgctcaggttcaaaaagagggtgtatagaacccaacactcaataggaagattgtcagagttacattgtaagaagagcatgtagttgggagatatcattgtggccattttgggaaagatgcaacatgtcacaatgtcatgttctccatcgtctccccgttccaccttgtactggtttccaagggtagtcgtttaaaagtaccacaaaaactgggtggcttggaacaacagaaatttattgtttcacagttctggaggccagaagttcaaaatgaagtgttggcagaaacatgctgcctctaaagggactgggaaaggatctgttccaggcttccctcctatcttctggttgttccttgccttctggctgcgtaactctagtcttcatttggtgttctccctgcatgcatggctttgtgtccaaatttccttttttcatgaggccatcagtcatactggattagggacccactctactactgcaggatgacctcaccttcccaaattacatctgcaacaaccctatttccaaagaaggccacattctgaggtactgggggttataacttcaacatgaattttttggaggaaacaattcaactcctaacacatctctacccaacctctgtaggttccctcaatccaccaaaattttttggctccactggattatctagcagttaggaaaccaagatcattaaatgaattcaccgcaactacagtgagactgactaccttagcttacctctgtgaaaggagttaagccaaaggaatctgtggaattttggagagtttgggagcatttgggggcaggaggcaaatgttcttcctttaaatcacaacacttagttctcttccatttataagactcacccctccatcccaacccctgcaccacaggacaaggaagtgttcttggtcttcaactttcatccctgatggtgaaagcagttgctcctgacctatttgcccaccagcttctcctctggagcctgaggcttctgatgcctgcctggctggttctcagtaagaaggtcaagttcaaccagaggggagatgctgatgcctttcagtacttaaatatgagttcagaccctggggcctggacataagatttggggtcccctggatataagatttctgaaaacactcagactgtggagacccctgctgagggagaagccccaaactgtggcttcaggggaatgcaccaaggctctcattgaggccaccttctccaacaagctcccctcctgcttccccatggctggcatggctgaggaaaaaggacactgagcacagcccgtgcatgagcggcttgccatgcaacaggataaaacccataatgccactcagcaagccttggttgtaaatctagtttgattacatttgtaatcaaatgatggccatttgttctgtttctggtttgtgaaccaactgaagacataagcagggcctcagctaacccacaaatagcacatgtgtgcaaactggaaaaatgaacccttcttctgggaggacgccagcccaggccaggtcacccggcttggccagcagaacacagagtagattttggtcccgtttgttccccagtggggtatctatccttgtgcagggcacaagcctacatggtggctctggtcatatcattagaaaatagacagaaatgggctgcacaccagaatgaatgaattgaattgaaagggaggagtgatggtggaaaaaaaaacaagtcaattcatttagactggtagaaccagaaccactgtgtagtacatccaaacggttaaaattccctggaagatgttacataatcctatcatggtgtttatttatggaaatctattttaaaaattttatgtaatactgcacagtctgtttgcatgatgccttgtacgtagtagcaactcagtaaatactttttgaatgaactagtatagtattttaattagctagtcttcatgtactggtacaaaagaacagtgtcatcttacagctgaagtcatagaggggaaatatcccactcaagatcatataacattccaggtactcaggatgaatggtttgaggactggtctgaattcttcaaaggtttcagctgtattaacattctccatctaataaactttatcttgtcattgca

SEQ ID NO: 118601 - protein, 589 aa, Artificial Sequence
  derived and/or modified sequence
MSRRLLPRAEKRRRRLEQRQQPDEQRRRSGAMVKMAAAGGGGGGGRYYGGGSEGGRAPKRLKTDNAGDQHGGGGGGGGGAGAAGGGGGGENYDDPHKTPASPVVHIRGLIDGVVEADLVEALQEFGPISYVVVMPKKRQALVEFEDVLGACNAVNYAADNQIYIAGHPAFVNYSTSQKISRPGDSDDSRSVNSVLLFTILNPIYSITTDVLYTICNPCGPVQRIVIFRKNGVQAMVEFDSVQSAQRAKASLNGADIYSGCCTLKIEYAKPTRLNVFKNDQDTWDYTNPNLSGQGDPGSNPNKRQRQPPLLGDHPAEYGGPHGGYHSHYHDEGYGPPPPHYEGRRMGPPVGGHRRGPSRYGPQYGHPPPPPPPPEYGPHADSPVLMVYGLDQSKMNCDRVFNVFCLYGNVEKVKFMKSKPGAAMVEMADGYAVDRAITHLNNNFMFGQKLNVCVSKQPAIMPGQSYGLEDGSCSYKDFSESRNNRFSTPEQAAKNRIQHPSNVLHFFNAPLEVTEENFFEICDELGVKRPSSVKVFSGKSERSSSGLLEWESKSDALETLGFLNHYQMKNPNGPYPYTLKLCFSTAQHAS

SEQ ID NO: 118602 - protein, 456 aa, Artificial Sequence
  derived and/or modified sequence
MPKKRQALVEFEDVLGACNAVNYAADNQIYIAGHPAFVNYSTSQKISRPGDSDDSRSVNSVLLFTILNPIYSITTDVLYTICNPCGPVQRIVIFRKNGVQAMVEFDSVQSAQRAKASLNGADIYSGCCTLKIEYAKPTRLNVFKNDQDTWDYTNPNLSGQGDPGSNPNKRQRQPPLLGDHPAEYGGPHGGYHSHYHDEGYGPPPPHYEGRRMGPPVGGHRRGPSRYGPQYGHPPPPPPPPEYGPHADSPVLMVYGLDQSKMNCDRVFNVFCLYGNVEKVKFMKSKPGAAMVEMADGYAVDRAITHLNNNFMFGQKLNVCVSKQPAIMPGQSYGLEDGSCSYKDFSESRNNRFSTPEQAAKNRIQHPSNVLHFFNAPLEVTEENFFEICDELGVKRPSSVKVFSGKSERSSSGLLEWESKSDALETLGFLNHYQMKNPNGPYPYTLKLCFSTAQHAS

SEQ ID NO: 118603 - DNA, 1770 bp, Artificial Sequence
  derived and/or modified sequence
atgagcagaagactgctgcccagagccgagaagagaagaagaagactggagcagagacagcagcccgacgagcagagaagaagaagcggcgccatggtgaagatggccgccgccggcggcggcggcggcggcggcagatactacggcggcggcagcgagggcggcagagcccccaagagactgaagaccgacaacgccggcgaccagcacggcggcggcggcggcggcggcggcggcgccggcgccgccggcggcggcggcggcggcgagaactacgacgacccccacaagacccccgccagccccgtggtgcacatcagaggcctgatcgacggcgtggtggaggccgacctggtggaggccctgcaggagttcggccccatcagctacgtggtggtgatgcccaagaagagacaggccctggtggagttcgaggacgtgctgggcgcctgcaacgccgtgaactacgccgccgacaaccagatctacatcgccggccaccccgccttcgtgaactacagcaccagccagaagatcagcagacccggcgacagcgacgacagcagaagcgtgaacagcgtgctgctgttcaccatcctgaaccccatctacagcatcaccaccgacgtgctgtacaccatctgcaacccctgcggccccgtgcagagaatcgtgatcttcagaaagaacggcgtgcaggccatggtggagttcgacagcgtgcagagcgcccagagagccaaggccagcctgaacggcgccgacatctacagcggctgctgcaccctgaagatcgagtacgccaagcccaccagactgaacgtgttcaagaacgaccaggacacctgggactacaccaaccccaacctgagcggccagggcgaccccggcagcaaccccaacaagagacagagacagccccccctgctgggcgaccaccccgccgagtacggcggcccccacggcggctaccacagccactaccacgacgagggctacggccccccccccccccactacgagggcagaagaatgggcccccccgtgggcggccacagaagaggccccagcagatacggcccccagtacggccacccccccccccccccccccccccccgagtacggcccccacgccgacagccccgtgctgatggtgtacggcctggaccagagcaagatgaactgcgacagagtgttcaacgtgttctgcctgtacggcaacgtggagaaggtgaagttcatgaagagcaagcccggcgccgccatggtggagatggccgacggctacgccgtggacagagccatcacccacctgaacaacaacttcatgttcggccagaagctgaacgtgtgcgtgagcaagcagcccgccatcatgcccggccagagctacggcctggaggacggcagctgcagctacaaggacttcagcgagagcagaaacaacagattcagcacccccgagcaggccgccaagaacagaatccagcaccccagcaacgtgctgcacttcttcaacgcccccctggaggtgaccgaggagaacttcttcgagatctgcgacgagctgggcgtgaagagacccagcagcgtgaaggtgttcagcggcaagagcgagagaagcagcagcggcctgctggagtgggagagcaagagcgacgccctggagaccctgggcttcctgaaccactaccagatgaagaaccccaacggcccctacccctacaccctgaagctgtgcttcagcaccgcccagcacgccagctag

SEQ ID NO: 118604 - DNA, 1770 bp, Artificial Sequence
  derived and/or modified sequence
atgtcccgccgcctgctccctagagccgagaagcggcgtaggaggctcgagcagcggcagcagccagatgaacagcgccggagatcaggagcaatggtcaaaatggcggccgccggaggtgggggcggtgggggccggtactacgggggcggcagtgaggggggaagggctccaaagagactaaaaaccgacaacgctggagatcagcacggagggggtggcggggggggaggaggcgccggggctgccggtggcggcggagggggggagaattacgatgatccacacaagacccccgcctctcccgtggttcacatcagaggtctgatcgacggcgttgtggaggctgacctggtagaagccctccaggagtttgggcctattagttacgtcgttgtgatgccaaagaagagacaggccctggtcgagttcgaggacgtcttaggagcatgcaacgccgtgaattacgcagcagataatcaaatttacattgctggtcatccagctttcgtcaattactcgaccagtcagaaaatctctagaccaggcgatagcgacgattcaaggagcgtcaacagcgttctgctgttcaccatcctgaatccaatctatagcataactaccgatgtgctctacacaatttgtaatccatgcgggccggtgcagagaattgtcatatttcggaaaaacggagtccaggccatggtagaattcgattctgtccagagtgctcagcgcgccaaggcttcattaaacggagctgatatctactcaggatgctgtacacttaaaatagagtacgcaaagcctactcggctgaatgtatttaaaaacgatcaggatacctgggactatactaatccaaacctttcgggccaaggcgatcctggttcaaatccaaacaagaggcagagacaacccccactcctgggggaccatccagccgagtatggaggccctcacggcgggtaccacagtcactaccacgacgagggttatggccctcccccgccacactacgagggaagacggatgggacctccagtggggggccaccgacgcggcccaagcagatacgggccacaatatggccaccctcccccccctccacctcccccagagtacggaccgcatgcagactcccccgtgctgatggtatacggcctggaccaatcaaaaatgaactgcgacagagtatttaatgtgttctgtttgtatggaaacgtcgagaaggtcaagttcatgaaatcaaaaccgggggcggcaatggtcgaaatggccgacggctatgccgtggatcgcgccattacacatttgaacaataattttatgtttgggcagaaactgaacgtctgtgtgagcaaacagcctgccatcatgcccggacagtcatacgggttagaagacggatcatgtagctacaaggacttctccgagagcagaaataatagattcagtacaccagaacaggctgctaagaacagaatccagcatccctcaaacgtgctgcatttctttaatgctccactagaggtgaccgaagaaaacttctttgaaatatgtgacgaattaggggtcaaaagaccttcttccgtcaaggttttttcaggaaagtctgagcggtcttcttcaggcttactggagtgggagtctaagtctgacgcccttgaaacgttgggatttcttaaccactaccagatgaagaatccaaacgggccatacccctatacacttaagctttgctttagtactgcccagcatgccagttag

SEQ ID NO: 118605 - DNA, 1770 bp, Artificial Sequence
  derived and/or modified sequence
atgagccggcggctgctgcccagggctgagaagagaagaagaaggctggagcagaggcagcagccagatgagcagaggagaagaagtggggccatggtgaagatggctgctgctgggggcggcggcggcggcggccgctactacggcggcggcagcgagggcggccgggcccccaagaggctgaagacagacaatgctggggaccagcacggcggcggcggcggcggcggcggcggggccggggctgctgggggcggcggcggcggggagaactatgatgacccccacaagaccccagccagccctgtggtgcacatccggggcctgattgatggagtggtggaggccgacctggtggaggccctgcaggagtttggccccatctcctatgtggtggtgatgcccaagaagaggcaggccctggtggagtttgaagatgtgctgggcgcctgcaatgctgtgaactatgctgctgacaaccagatctacatcgccggccacccagcctttgtgaactacagcaccagccagaagatcagcaggcctggggacagtgatgacagccgctctgtgaacagcgtgctgctcttcaccatcctgaaccccatctacagcatcaccacagatgtgctgtacaccatctgcaacccctgtggccctgtgcagagaattgtcatcttcaggaagaatggagtgcaggccatggtggagtttgacagcgtgcagagcgcccagagggccaaggccagcctgaatggagctgacatctacagcggctgctgcaccctgaagattgaatatgccaagcccacccggctgaatgtgttcaagaatgaccaggacacctgggactacaccaaccccaacctgagcggccagggcgaccccggcagcaaccccaacaagaggcagaggcagccccccctgctgggggaccacccagcagaatatggaggcccccatggaggctaccacagccactaccatgatgagggctacggccccccaccaccccactatgagggccgcaggatgggcccccctgtgggcggccacagaagaggccccagccgctatggcccccagtatggccaccccccacctcctcctcctcctccagaatatggcccccatgctgacagccctgtgctgatggtgtatggcctggaccagagcaagatgaactgtgacagagtcttcaacgtgttctgcctgtatggaaatgtggagaaggtgaagttcatgaagagcaagccaggagctgccatggtggagatggctgatggctatgctgtggaccgggccatcacccacctgaacaacaacttcatgtttggccagaagctgaatgtgtgtgtgtccaagcagcctgccatcatgcctggccagagctatggcctggaggatggcagctgcagctacaaggacttcagcgagagcaggaacaaccgcttcagcaccccagagcaggccgccaagaaccgcatccagcaccccagcaatgtgctgcacttcttcaatgcccccctggaggtgacagaggagaacttctttgagatctgtgatgagctgggcgtgaagaggcccagctctgtgaaggtgttcagcggcaagtctgagaggagcagcagcggcctgctggagtgggagagcaagagtgatgccctggagaccctgggcttcctgaaccactaccagatgaagaaccccaacggcccctacccctacaccctgaagctgtgcttcagcacagcccagcacgccagctag

SEQ ID NO: 118606 - DNA, 1770 bp, Artificial Sequence
  derived and/or modified sequence
atgagccggcggctgctgccccgggccgagaagcggcggcggcggctggagcagagacagcaaccagacgaacaacggagacggtctggggccatggtcaaaatggccgcagctggggggggtgggggcggaggtagatactacggtggaggatccgagggtggacgcgcacctaagaggctgaaaactgacaatgccggagatcaacacgggggcggggggggtggaggtggtggtgcgggtgcagccgggggtgggggaggcggagagaactatgacgatccgcacaagactcccgccagtccggtggttcacatcagaggtctcattgacggcgtcgtggaggccgatctggtagaagctctgcaggagttcggaccaatatcttacgtagtagtcatgccgaagaagagacaggcactggtcgaattcgaggatgtgcttggagcttgtaatgcggtcaattatgcagccgacaaccagatttacattgcaggacatccagccttcgttaactactctacatcacagaagatttctagacccggggactcagatgattcacggtctgttaattccgtcctgctgttcaccattctcaatcctatctacagcataacaacggacgtgttgtataccatttgcaacccctgtggtccggtgcaacgtatcgtgatcttccgtaaaaatggagtccaagccatggtggaattcgatagtgtgcagtccgcgcagagagcgaaggcctctctgaatggcgccgacatttattctggctgctgcacccttaaaatcgagtacgccaagcccacccgcttaaatgttttcaaaaacgaccaggacacatgggattacacaaaccctaacctcagcggccaaggcgatcccggaagtaacccgaataaacggcagagacagccccccctcctgggagatcaccctgcagaatatggcggccctcacggtgggtaccatagtcattaccacgacgaaggttacgggccgccacctccacactacgagggccgccggatgggtcccccggtcggaggacaccgccgaggcccttcacgctacggaccacaatacggccatccccctccaccaccccctcctcctgagtacggcccccacgctgactcaccagtgttaatggtgtacggattggatcagtccaaaatgaattgcgatagagtctttaacgtgttctgcctttatggcaacgtcgaaaaggtcaagttcatgaagtctaaacctggagctgccatggttgaaatggccgacggctacgctgtcgatcgggccattacccatttgaataacaacttcatgtttggacagaagttaaacgtctgcgtttctaagcagccagcgattatgccaggtcagagttacggactcgaggacggatcttgctcttataaagacttcagcgagagtaggaacaatcgattctctacgcccgagcaggccgcaaaaaacagaatccaacatcccagtaacgtgctgcacttttttaacgcacccttagaagtgacggaggaaaatttcttcgagatatgtgacgagttgggagtcaaacgacctagctctgtgaaggtgtttagcgggaaaagtgagcggagttcctctggcctgctggagtgggaatcaaagtccgacgcccttgaaaccttagggttcctgaatcattaccagatgaagaatcccaacggcccatatccatacactctgaaattgtgttttagcacggcccaacacgcgtcctag

SEQ ID NO: 118607 - DNA, 1770 bp, Artificial Sequence
  derived and/or modified sequence
atgtcacgacgactgctgcccagggctgagaaacgcagacgcaggctggagcaaagacagcagcccgatgaacagcgtcggcgttccggggcaatggttaagatggccgctgcaggaggcggaggcggagggggtaggtattacggtggaggcagcgaaggtggcagagcgcctaaaagactcaaaaccgataacgctggcgatcagcacggaggcggaggcggaggcggtgggggagcgggagccgctggaggtggaggcggaggcgaaaactacgatgaccctcataagacacccgcaagcccggtggtgcatatccggggattgattgatggcgtcgtggaggccgacctcgtggaagcactccaggagttcgggccaatcagctacgtagtggtgatgccaaagaaaagacaggccttggtcgaattcgaagatgtgctcggagcctgcaacgccgtaaactacgccgctgataatcagatctatatagccggacatccagccttcgtcaattattcaacctcacagaagatatccagacctggagactctgacgactctaggtcagtgaacagcgtgctcctgttcactatcctgaatccaatctactcaatcactacagacgtcctgtatacgatctgcaatccgtgcggcccagtgcagcgcatcgtgatctttcggaagaacggtgtccaggctatggtagagttcgactctgtgcagtctgcgcagcgagccaaagcctctctaaatggggcagatatctactccgggtgttgtacattaaaaatcgaatatgccaagcccaccaggctgaatgtctttaaaaatgaccaagacacctgggattatactaatcctaatctctccgggcaaggggacccaggctcaaaccctaacaagagacagcgccaacctcctctcttgggagatcaccctgcagaatacggaggtcctcacggtggctatcacagccactatcatgacgaaggctacgggcctccaccaccccactatgagggacggcgtatgggcccacccgtgggaggacaccgtcggggaccatcgcggtacgggccacagtatgggcacccccctcctccacctcctccgccagagtacgggccacatgccgactctcccgttttaatggtgtacggcctggatcaaagtaaaatgaactgtgatcgggtgtttaacgtgttttgtttgtacggcaacgtggaaaaagttaaattcatgaaatcaaagcccggagcagctatggtcgagatggccgacggatacgccgtggatcgagccatcacccacctgaataacaatttcatgttcggacagaaactcaacgtctgtgtgtccaaacagcctgcgatcatgcctgggcagagttacggattggaggacgggagttgctcatacaaagatttcagcgagagcagaaacaataggttctccactcccgagcaggccgcaaagaaccgcatccaacacccgtccaacgtgctgcattttttcaacgctcctctggaagttacagaagagaacttcttcgagatctgcgatgaactgggggtgaaacgccctagctccgtgaaggttttcagcggaaaaagcgaacgatccagcagtggccttctcgagtgggaaagcaagtccgacgccttagagactctggggtttttgaatcactatcagatgaagaaccccaatggaccttacccttacaccttgaagctttgtttttccacagcccagcacgcttcctag

SEQ ID NO: 118608 - DNA, 2114 bp, Artificial Sequence
  derived and/or modified sequence
tctgcgccgccatgtcgcggaggctgctgccccgggcggagaagcggcgtcggcggctggagcagaggcagcagccggacgagcagcggaggcggtcgggagcgatggtgaagatggcggcggcgggcggcggaggcggcggtggccgctactacggcggcggcagtgagggcggccgggcccctaagcggctcaagactgacaacgccggcgaccagcacggaggcggcggcggtggcggtggaggagccggggcggcgggcggcggcggcggtggggagaactacgatgacccgcacaaaacccctgcctccccagttgtccacatcaggggcctgattgacggtgtggtggaagcagaccttgtggaggccttgcaggagtttggacccatcagctatgtggtggtaatgcctaaaaagagacaagcactggtggagtttgaagatgtgttgggggcttgcaacgcagtgaactacgcagccgacaaccaaatatacattgctggtcacccagcttttgtcaactactctaccagccagaagatctcccgccctggggactcggatgactcccggagcgtgaacagtgtgcttctctttaccatcctgaaccccatttattcgatcaccacggatgttctttacactatctgtaatccttgtggccctgtccagagaattgtcattttcaggaagaatggagttcaggcgatggtggaatttgactcagttcaaagtgcccagcgggccaaggcctctctcaatggggctgatatctattctggctgttgcactctgaagatcgaatacgcaaagcctacacgcttgaatgtgttcaagaatgatcaggatacttgggactacacaaaccccaatctcagtggacaaggtgaccctggcagcaaccccaacaaacgccagaggcagccccctctcctgggagatcaccccgcagaatatggagggccccacggtgggtaccacagccattaccatgatgagggctacgggccccccccacctcactacgaagggagaaggatgggtccaccagtggggggtcaccgtcggggcccaagtcgctacggcccccagtatgggcaccccccaccccctcccccaccacccgagtatggccctcacgccgacagccctgtgctcatggtctatggcttggatcaatctaagatgaactgtgaccgagtcttcaatgtcttctgcttatatggcaatgtggagaaggtgaaattcatgaaaagcaagccgggggccgccatggtggagatggctgatggctacgctgtagaccgggccattacccacctcaacaacaacttcatgtttgggcagaagctgaatgtctgtgtctccaagcagccagccatcatgcctggtcagtcatacgggttggaagacgggtcttgcagttacaaagacttcagtgaatcccggaacaatcggttctccaccccagagcaggcagccaagaaccgcatccagcaccccagcaacgtgctgcacttcttcaacgccccgctggaggtgaccgaggagaacttctttgagatctgcgatgagctgggagtgaagcggccatcttctgtgaaagtattctcaggcaaaagtgagcgcagctcctctggactgctggagtgggaatccaagagcgatgccctggagactctgggcttcctgaaccattaccagatgaaaaacccaaatggtccatacccttacactctgaagttgtgtttctccactgctcagcacgcctcctaattaggtgcctaggaagagtcccatctgagcaggaagacatttctctttcctttatgccattttttgtttttgttatttgcaaaagatcttgtattccttttttttttttttttttttttttttaaatgctaggtttgtagaggcttacttaaccttaatggaaacgctggaaatctgcagggggagggagaggggaactgttatctcccaagattaaccttcacttttaaaaaattattgtacatgtgatttttttttttcctgttcatacatttgtgctgcccatgtactcttggcacatttcaataaaattgtttggaaaataaacacagc

SEQ ID NO: 118609 - protein, 371 aa, Artificial Sequence
  derived and/or modified sequence
MAAAEAANCIMENFVATLANGMSLQPPLEEVSCGQAESSEKPNAEDMTSKDYYFDSYAHFGIHEEMLKDEVRTLTYRNSMFHNRHLFKDKVVLDVGSGTGILCMFAAKAGARKVIGIECSSISDYAVKIVKANKLDHVVTIIKGKVEEVELPVEKVDIIISEWMGYCLFYESMLNTVLYARDKWLAPDGLIFPDRATLYVTAIEDRQYKDYKIHWWENVYGFDMSCIKDVAIKEPLVDVVDPKQLVTNACLIKEVDIYTVKVEDLTFTSPFCLQVKRNDYVHALVAYFNIEFTRCHKRTGFSTSPESPYTHWKQTVFYMEDYLTVKTGEEIFGTIGMRPNAKNNRDLDFTIDLDFKGQLCELSCSTDYRMR

SEQ ID NO: 118610 - protein, 160 aa, Artificial Sequence
  derived and/or modified sequence
MTSKDYYFDSYAHFGIHEEMLKDEVRTLTYRNSMFHNRHLFKDKVVLDVGSGTGILCMFAAKAGARKVIGIECSSISDYAVKIVKANKLDHVVTIIKGKVEEVELPVEKVDIIISEWMGYCLFYESMLNTVLYARDKWLAPDGLIFPDRATLYVTAIEDR

SEQ ID NO: 118611 - protein, 205 aa, Artificial Sequence
  derived and/or modified sequence
MTSKDYYFDSYAHFGIHEEMLKDEVRTLTYRNSMFHNRHLFKDKVVLDVGSGTGILCMFAAKAGARKVIGIECSSISDYAVKIVKANKLDHVVTIIKGKVEEVELPVEKVDIIISEWMGYCLFYESMLNTVLYARDKWLAPDGLIFPDRATLYVTAIEDRQYKDYKIHWWENVYGFDMSCIKDVAIKEPLVDVVDPKQLVTNACL

SEQ ID NO: 118612 - DNA, 1116 bp, Artificial Sequence
  derived and/or modified sequence
atggcggcagcagaggcagctaactgtataatggagaacttcgtagccaccctggccaacgggatgtcgctccagcctccactggaggaagtatcatgtgggcaggctgagtcttccgaaaagcccaatgccgaggacatgacgtcaaaggactactatttcgacagctatgcacacttcggcatccatgaggagatgttgaaggacgaagttcgaactctgacataccgcaatagtatgttccacaatcgccacctattcaaagacaaggtcgttcttgacgtggggtccggcacaggaatactgtgcatgtttgcagcaaaggctggtgccaggaaagtgatcggcattgaatgttcatccatctctgattacgccgtgaaaattgtgaaagccaataaacttgaccatgtggtaacaattatcaagggaaaggtagaagaagtcgaattacctgtggagaaggtagacattattatttcagaatggatgggttactgtcttttttacgagtccatgttaaacactgtgttatacgctcgcgacaagtggctggcgcccgacggactgatctttcctgatcgggcaaccctatatgtgacggccattgaggacaggcagtataaggattataagatccattggtgggagaacgtgtatgggttcgatatgtcttgtattaaggacgtggcaattaaagagcccttggtcgatgtcgtagatccaaaacagctggtgactaacgcttgcctaataaaagaagtggacatctatacggtaaaggtagaagatctcactttcacctcgcccttttgtttgcaggtgaaaaggaacgactacgttcatgcattagtagcctatttcaatatagaatttaccagatgccacaagcgtacaggatttagcacttcaccagagtcaccctatacccactggaaacagaccgtcttttatatggaggactatctgaccgtgaaaacgggagaggagatcttcggaacaattggtatgcgcccaaatgccaagaacaatagagacctggattttaccatcgacctcgacttcaagggccagctttgcgagctaagctgctccacagactaccgtatgcggtag

SEQ ID NO: 118613 - DNA, 1116 bp, Artificial Sequence
  derived and/or modified sequence
atggctgctgctgaggccgccaactgcatcatggagaactttgtggccaccctggccaacggcatgagcctgcagccccccctggaggaggtgtcctgtggccaggccgagagcagcgagaagcccaatgctgaggacatgaccagcaaggactactactttgacagctatgcccacttcggcatccacgaggagatgctgaaggatgaggtgaggaccctgacctacagaaattccatgttccacaacagacacctgttcaaggacaaggtggtgctggatgtgggcagcggcaccggcatcctgtgcatgtttgctgccaaggccggggccaggaaggtgattggaattgagtgcagcagcatcagtgactatgctgtgaagatcgtgaaggccaacaagctggaccacgtggtgaccatcatcaagggcaaggtggaggaggtggagctgcctgtggagaaggtggacatcatcatcagcgagtggatgggctactgcctcttctatgagagcatgctgaacacagtgctgtatgcccgggacaagtggctggccccagatggcctcatcttcccagaccgggccaccctgtatgtgacagccatcgaggaccggcagtacaaggactacaagatccactggtgggagaatgtgtatggctttgacatgagctgcatcaaggatgtggccatcaaggagcccctggtggatgtggtggaccccaagcagctggtgaccaatgcctgcctgatcaaggaggtggacatctacacagtgaaggtggaggacctgaccttcaccagccccttctgcctgcaggtgaagagaaatgactatgtgcacgccctggtggcctacttcaacatcgagttcacccgctgccacaagaggacaggcttcagcaccagccctgagagcccctacacccactggaagcagacagtgttctacatggaggactacctgactgtgaagacaggagaggagatcttcggcaccatcggcatgaggcccaatgccaagaacaacagagacctggacttcaccatcgacctggacttcaagggccagctgtgtgagctgagctgcagcacagactacaggatgaggtag

SEQ ID NO: 118614 - DNA, 1116 bp, Artificial Sequence
  derived and/or modified sequence
atggccgccgccgaggccgccaactgcatcatggagaacttcgtggctaccctcgctaatgggatgtcactacaaccgccacttgaggaggtttcttgcggccaggctgagagcagcgagaagccaaatgctgaggacatgacctccaaagattattactttgacagctacgctcactttggaattcacgaggagatgttgaaggatgaggtccgaaccctgacctaccggaactccatgtttcacaatcggcatctattcaaggataaggtggtcctggatgtgggctccggcacgggcatattgtgtatgtttgctgcaaaggcaggagccagaaaggtcatagggatagagtgctcgtctatcagtgattacgcagtgaaaatcgtaaaggccaataagctcgatcacgtggttactattattaaaggtaaagtggaagaagtggagctgcctgtagaaaaggttgacatcatcatatctgagtggatgggttactgccttttttatgaatccatgctgaacacagtgttatatgcccgcgataagtggctcgcgcctgatggcctaatttttccggaccgggctacgctatatgttactgccatagaggatagacagtataaggactacaagatccactggtgggagaacgtttacggatttgatatgagctgcatcaaggatgtggccatcaaagagccactggtcgatgttgtggatcccaaacagttagtcactaacgcatgcctcataaaggaggtggacatctacactgtgaaggtcgaagatctgactttcacaagtccattctgcctgcaggtcaaaagaaacgactacgtgcacgccctcgtggcttattttaacattgagttcactcgctgtcacaagagaactggctttagcacttcaccagagtccccatacacccattggaaacagaccgtcttttatatggaagactatttgacagtcaagaccggggaagagattttcggcaccattggcatgcggccgaacgctaagaataatcgcgatctggactttacaattgatctggacttcaaggggcaattatgtgagctgagctgttcaacggactataggatgcgttag

SEQ ID NO: 118615 - DNA, 1116 bp, Artificial Sequence
  derived and/or modified sequence
atggctgcagcagaggccgctaactgtataatggaaaacttcgtcgctaccctcgccaatggcatgtccctgcagcccccactcgaagaagtcagctgcggtcaagcagagagttccgagaaaccaaatgccgaagacatgacgtcaaaggactactatttcgatagctacgcccactttggcatccatgaggaaatgctgaaagacgaagtaaggaccttgacatatagaaacagcatgttccacaaccgccacctttttaaagacaaggtggtgttggacgtggggagtggcactggcatcttgtgtatgtttgcagccaaagccggtgccaggaaggttattggcatcgagtgctcaagcatctcagactatgctgtgaaaattgttaaggccaacaagctggaccatgtggtgactatcataaaggggaaagtggaggaagtcgagctccccgtagagaaagtggacattattatctccgaatggatgggctactgcctgttttatgagagcatgctcaatacagttctctatgccagagataagtggcttgcacccgatgggctgatctttccagatcgggcaactctgtacgtgactgccattgaagaccggcagtacaaagactataagattcattggtgggaaaatgtctatggcttcgatatgtcatgcattaaagacgtggccattaaagaacccttggtggatgtggttgatcccaagcagctcgtgaccaacgcctgcctcataaaggaggttgatatctatacagtgaaagtggaagacctcacatttacctcccccttctgtttacaagtcaagcgtaatgactatgttcacgccttagttgcttacttcaatatcgaatttacaaggtgccataagagaaccggcttcagcacatcacccgaaagcccatacacccactggaaacagaccgtcttttatatggaggattatctgacagtcaaaaccggggaggaaatctttggcacaatcggcatgcgccctaatgctaagaataacagagatctcgatttcaccatcgatctcgacttcaagggtcagttgtgtgaattatcatgctcaacagactacagaatgaggtag

SEQ ID NO: 118616 - DNA, 1327 bp, Artificial Sequence
  derived and/or modified sequence
cgggtgaagatggcggcagccgaggccgcgaactgcatcatggagaattttgtagccaccttggctaatgggatgagcctccagccgcctcttgaagaagtgtcctgtggccaggcggaaagcagtgagaagcccaacgctgaggacatgacatccaaagattactactttgactcctacgcacactttggcatccacgaggagatgctgaaggacgaggtgcgcaccctcacttaccgcaactccatgtttcataaccggcacctcttcaaggacaaggtggtgctggacgtcggctcgggcaccggcatcctctgcatgtttgctgccaaggccggggcccgcaaggtcatcgggatcgagtgttccagtatctctgattatgcggtgaagatcgtcaaagccaacaagttagaccacgtggtgaccatcatcaaggggaaggtggaggaggtggagctcccagtggagaaggtggacatcatcatcagcgagtggatgggctactgcctcttctacgagtccatgctcaacaccgtgctctatgcccgggacaagtggctggcgcccgatggcctcatcttcccagaccgggccacgctgtatgtgacggccatcgaggaccggcagtacaaagactacaagatccactggtgggagaacgtgtatggcttcgacatgtcttgcatcaaagatgtggccattaaggagcccctagtggatgtcgtggaccccaaacagctggtcaccaacgcctgcctcataaaggaggtggacatctataccgtcaaggtggaagacctgaccttcacctccccgttctgcctgcaagtgaagcggaatgactacgtgcacgccctggtggcctacttcaacatcgagttcacacgctgccacaagaggaccggcttctccaccagccccgagtccccgtacacgcactggaagcagacggtgttctacatggaggactacctgaccgtgaagacgggcgaggagatcttcggcaccatcggcatgcggcccaacgccaagaacaaccgggacctggacttcaccatcgacctggacttcaagggccagctgtgcgagctgtcctgctccaccgactaccggatgcgctgaggcccggctctcccgccctgcacgagcccaggggctgagcgttcctaggcggtttcggggctcccccttcctctccctccctcccgcagaagggggttttaggggcctgggctggggggatggggagggcacatcgtgactgtgtttttcataacttatgtttttatatggttgcatttacgccaataaatcctcagctggg

SEQ ID NO: 118617 - DNA, 1116 bp, Artificial Sequence
  derived and/or modified sequence
atggccgccgccgaggccgccaactgcatcatggagaacttcgtggccaccctggccaacggcatgagcctgcagccccccctggaggaggtgagctgcggccaggccgagagcagcgagaagcccaacgccgaggacatgaccagcaaggactactacttcgacagctacgcccacttcggcatccacgaggagatgctgaaggacgaggtgagaaccctgacctacagaaacagcatgttccacaacagacacctgttcaaggacaaggtggtgctggacgtgggcagcggcaccggcatcctgtgcatgttcgccgccaaggccggcgccagaaaggtgatcggcatcgagtgcagcagcatcagcgactacgccgtgaagatcgtgaaggccaacaagctggaccacgtggtgaccatcatcaagggcaaggtggaggaggtggagctgcccgtggagaaggtggacatcatcatcagcgagtggatgggctactgcctgttctacgagagcatgctgaacaccgtgctgtacgccagagacaagtggctggcccccgacggcctgatcttccccgacagagccaccctgtacgtgaccgccatcgaggacagacagtacaaggactacaagatccactggtgggagaacgtgtacggcttcgacatgagctgcatcaaggacgtggccatcaaggagcccctggtggacgtggtggaccccaagcagctggtgaccaacgcctgcctgatcaaggaggtggacatctacaccgtgaaggtggaggacctgaccttcaccagccccttctgcctgcaggtgaagagaaacgactacgtgcacgccctggtggcctacttcaacatcgagttcaccagatgccacaagagaaccggcttcagcaccagccccgagagcccctacacccactggaagcagaccgtgttctacatggaggactacctgaccgtgaagaccggcgaggagatcttcggcaccatcggcatgagacccaacgccaagaacaacagagacctggacttcaccatcgacctggacttcaagggccagctgtgcgagctgagctgcagcaccgactacagaatgagatag

SEQ ID NO: 118618 - protein, 76 aa, Artificial Sequence
  derived and/or modified sequence
MAETDPKTVQDLTSVVQTLLQQMQDKFQTMSDQIIGRIDDMSSRIDDLEKNIADLMTQAGVEELESENKIPATQKS

SEQ ID NO: 118619 - DNA, 231 bp, Artificial Sequence
  derived and/or modified sequence
atggcagagaccgatcccaagacagtccaggacctcacctcagtggtgcaaacgctgttacagcagatgcaagacaagtttcagacgatgtccgatcagatcatcggtcggatagatgacatgagctccagaatcgatgacctcgaaaagaacattgccgatttgatgacccaagcgggggtggaagaattggagagtgagaataagattcccgcaactcaaaaaagctag

SEQ ID NO: 118620 - DNA, 231 bp, Artificial Sequence
  derived and/or modified sequence
atggccgagacagaccccaagacagtgcaggacctgacctctgtggtgcagaccctgctgcagcagatgcaggacaagttccagaccatgtctgaccagatcatcggcagaattgatgacatgagcagcagaattgatgacctggagaagaacattgctgacctgatgacccaggccggcgtggaggagctggagagcgagaacaagatcccagccacccagaagagctag

SEQ ID NO: 118621 - DNA, 231 bp, Artificial Sequence
  derived and/or modified sequence
atggccgagaccgaccccaagaccgtgcaggacctgaccagcgtggtccagaccctgcttcagcagatgcaagacaaatttcaaaccatgtccgatcagattattggacggattgatgacatgtctagtcggattgatgatcttgaaaagaacattgctgatctgatgacacaggccggcgtggaggaacttgaatcagagaataagataccagccactcagaaaagctag

SEQ ID NO: 118622 - DNA, 231 bp, Artificial Sequence
  derived and/or modified sequence
atggccgagactgatcccaagacagtgcaagacttgacttcagtagtgcagacgctgctccagcaaatgcaggataagttccagaccatgagcgaccagataattggccgaatcgacgatatgagctcacggattgacgatctggaaaaaaacatagctgacctgatgacccaggctggcgttgaagaactggaatccgaaaacaaaatacctgctactcaaaaatcttag

SEQ ID NO: 118623 - DNA, 231 bp, Artificial Sequence
  derived and/or modified sequence
atggccgagaccgaccccaagaccgtgcaggacctgaccagcgtggtgcagaccctgctgcagcagatgcaggacaagttccagaccatgagcgaccagatcatcggcagaatcgacgacatgagcagcagaatcgacgacctggagaagaacatcgccgacctgatgacccaggccggcgtggaggagctggagagcgagaacaagatccccgccacccagaagagctag

SEQ ID NO: 118624 - DNA, 1891 bp, Artificial Sequence
  derived and/or modified sequence
cgagaagcagcggcccggggcgactgagcggacaaacggaagtgtaggttacggtctgagacatcaccgccaagctgggcatcggggagatggccgagactgaccccaagaccgtgcaggacctcacctcggtggtgcagacactcctgcagcagatgcaagataaatttcagaccatgtctgaccagatcattgggagaattgatgatatgagtagtcgcattgatgatctggaaaagaatatcgcggacctcatgacacaggctggggtggaagaactggaaagtgaaaacaagatacctgccacgcaaaagagttgaaggttgctaataatttatactggaatctggcatttttccaagccaagagaagatcgaatggctttttgcagctaactactatgtgtagacaggttttatattataaagtatgcattcttatcacctagtatatagttagtttgtagagtgatttccccccagtttcttgaacatggtatcttcacatcttggaccttggtcagttgtgctattcattattaaacactaaaactttggcggttcttgcataacattgtcagattttttagtgtatttctgtgaagtcattttttttcttgtcattccttttgtagtagttgctgtttggataaaagttgatgtgtgattttttattaaacaaatagtaaacccttcaattatagttagtcttggtgaagtaagatgtttgtagactttagagttctttaattcttggcacaacgtgactgttgagctaacaccaaatagtgtgttggcaatacttttcaaatggctgaaaacacctaaaaattgttcattcagaaatatctgtcactgctctgttgccaaaactcagaatagaacttagacgtatgtctgagtccctgagatcacatgctaaagtcgatgaaaagtaaccactgccactgtcttgtgtcagaacttttacagtacagaaaataacagaatagccttctgtaatgaggcgtttgttagagttttgcatgagattctaatacttcagtaggaccctacctacgtggttcatctacaatggttaccataaaaaatctggcaggattttaaaactcaatcagtctttcctttgagctagtgacttgaaaagaaagagagaaggaaaagagaccatattaagtccatgccagttgcttggctagaatatgatcaacgacttgtagtagactcaagtttttaaaaaacactattttacttaaactgtttcttatctaaattcttgcagagtgtcaatgttatcattgattatagaagacagggataatacctttatctctggccactcaaaaatgcagtgccaggagtgctaaacctagaggccaatactgatgacctggaaggtgatccatatgattgtcaccacaaagtgcttttacacaaaaacttgaaaatttgaaaaacatgatttttttaagtttctcatctcaccagtcttggtgtttatattgcaaatctatcaaagtaagaaataatttgtgctgtatacaaattacatggggaacataaaggagtgagatccttctgtgataaaatgaattcaccactctggttacccaactacagaacctcctttgatcaggccagtaggttgtgatgcaggctggagcccccgaatgccccacacacactgcagcattgaccagaccatccgaaacctgcgtccctggtgatgttctcaagcctcggaagtggcaaatggaaatgatatggccggttgcggttgtaggagagttgtgacttaggcaggagtcgacctcctcaagtaatggaacgatttcaaaggcaggctgccctgaccaaaaatatctgccatgaataaaggtgcctgaaatcct

SEQ ID NO: 118625 - protein, 462 aa, Artificial Sequence
  derived and/or modified sequence
MQEAPAALPTEPGPSPVPAFLGKLWALVGDPGTDHLIRWSPSGTSFLVSDQSRFAKEVLPQYFKHSNMASFVRQLNMYGFRKVVSIEQGGLLRPERDHVEFQHPSFVRGREQLLERVRRKVPALRGDDGRWRPEDLGRLLGEVQALRGVQESTEARLRELRQQNEILWREVVTLRQSHGQQHRVIGKLIQCLFGPLQAGPSNAGGKRKLSLMLDEGSSCPTPAKFNTCPLPGALLQDPYFIQSPSTYSLSQRQIWALALTGPGAPSSLTSQKTLHPLRGPGFLPPVMAGAPPPLPVAVVQAILEGKGSFSPEGPRNAQQPEPGDPREIPDRGPLGLESGDRSPESLLPPMLLQPPQESVEPAGPLDVLGPSLQGREWTLMDLDMELSLMQPLVPERGEPELAVKGLNSPSPGKDPTLGAPLLLDVQAALGGPALGLPGALTIYSTPESRTASYLGPEASPSP

SEQ ID NO: 118626 - protein, 416 aa, Artificial Sequence
  derived and/or modified sequence
MQEAPAALPTEPGPSPVPAFLGKLWALVGDPGTDHLIRWSPSGTSFLVSDQSRFAKEVLPQYFKHSNMASFVRQLNMYGFRKVVSIEQGGLLRPERDHVEFQHPSFVRGREQLLERVRRKVPALRGDDGRWRPEDLGRLLGEVQALRGVQESTEARLRELRQQNEILWREVVTLRQSHGQQHRVIGKLIQCLFGPLQAGPSNAGGKRKLSLMLDEGSSCPTPAKFNTCPLPGALLQDPYFIQSPLPETNLGLSPHRARGPIISDIPEDSPSPEGTRLSPSSDGRRGPLGLESGDRSPESLLPPMLLQPPQESVEPAGPLDVLGPSLQGREWTLMDLDMELSLMQPLVPERGEPELAVKGLNSPSPGKDPTLGAPLLLDVQAALGGPALGLPGALTIYSTPESRTASYLGPEASPSP

SEQ ID NO: 118627 - DNA, 2532 bp, Artificial Sequence
  derived and/or modified sequence
agatgcacgcgcgtccccgctgcccaacgaagcctgggtcgcgttgcgccgccgccaccctgggctggcagtggagctggagctggagcccgcgctgcccgctgagagcgtgacgcgcgtcctgcagccagccgtccccgtggctgcgctgcgcctcaacctctcaggcgacaccgtaggcccagtgcgcttcgcagcacaccactacgccgcaaccctgtgcgcgctcgaggtgcgcgcagccgcttcggccgagctgaacgccgcgctggaggagctggcggcgcgctgcgcggccctgcgcgaggtgcattgtttctgcgtggtgagccactcggtgctggacgccttccgcgcgcactgcccgcgcctgcgcacctataccctcaagctcacgcgcgagccgcatccctggaggcctacgctcgtggcgtgattgggcgacttctctcccccgtccccgtggacacgccccacccgctcggtcctggacacactgcccccctctcttgcctccacccctctgcggactctgcagctccgcggccccggcgcagggagagggagggcacgggcgcgggccgggcctcaagggacttgcccagcccacaccaggtcgcgcaccggcgatttctcctgtagaacaaagaaggaaatagagggaccgagaggggtgggactcgaacccaagtctcccactcatctcaccccaccccaccccactccaccccaccccacccctccactccactccactccacacatcccatccagccagccttttctgcctgctggtgcctcggccgctgtccgagccccgccccgcgggcttgcacgtggcccccgcctgacccggcgccccggggcggagtagggcggagcgggcggcaaacgcagcactttccgcggctttgacgagcccgcagcggccgggcccgagcgcagagccgggccgagactgcaccatgcaggaagcgccagctgcgctgcccacggagccaggccccagccccgtgcctgccttcctcggcaagctatgggcgctggtgggggacccaggcacagaccacctgatccgctggagcccgagcgggaccagtttcctcgtaagcgaccagagccgtttcgccaaggaagtgctgccccagtatttcaagcatagcaacatggcgagcttcgtgcgccaactcaacatgtacggttttcggaaggtggtgagcatcgagcagggcggcctgcttaggccggagcgcgaccacgtcgagttccagcacccgagcttcgtgcgcggccgcgagcagctactggagcgcgtgcggcgcaaggtgcccgcgctgcgcggcgacgacggccgctggcgcccggaggacctgggtcgactactgggcgaggtgcaggctttgcggggagtgcaggagagcaccgaggcgcggctgcgggagctcaggcagcagaacgagatcttgtggcgggaggtggtgacacttcggcagagccacggtcagcagcaccgggtcattggcaagctgatccagtgtctctttgggccacttcaggcggggccgagcaatgcaggaggcaagagaaagctgtccctgatgctggatgaggggagctcatgcccaacacctgccaagttcaacacctgccctctacctggtgcccttctgcaggacccctacttcatccagtcgccttctacttacagcctctcccagagacaaatttgggccttagccctcacagggccaggggccccatcatctctgacatcccagaagactctccatcccctgaggggaccaggctttctccctccagtgatggcaggagcccccccgccactgcctgtggctgtggtgcaggccatcctggaagggaaagggagcttcagccccgaggggcccaggaatgcccaacagcctgaaccaggggatcccagggagatacctgacagggggcctctgggcctggaaagcggggacaggagcccagagagtctgctgcctccgatgctgcttcagccccctcaagaaagtgtggaacctgcagggcctctagatgtgctgggccccagtctccaagggcgagaatggaccctgatggacttggacatggagctgtccttgatgcagcccttggttccagagcggggtgagcctgagctggcggtcaaggggttaaattctccaagcccagggaaggaccccacgctcggggccccactcctgctggatgtccaggcggccttgggaggcccagccctgggcctgcctggggctttaaccatttatagcactcctgagagccggactgcctcctacttgggcccggaagccagtccctccccctaagaccccgcgcctctgaaggggcttggaaccagtccgccgctgcacatccttcttggcttcctggcgccccctatcgggggtgagcgaagcccccactactaaatggcctctctccactaccccgactatccctgcacataaactccgttttttttttttcaaaaaaaaaaaaaaaaaa

SEQ ID NO: 118628 - DNA, 1389 bp, Artificial Sequence
  derived and/or modified sequence
atgcaagaagcccctgcagccctgccaaccgagcctggcccgtctcctgtgcccgcgttcctaggaaaactgtgggctctggtgggagatccaggcactgatcacctcatcagatggtcaccgagtggaacctcctttctggtatccgatcaatcgcgatttgccaaagaagtgctgccacagtattttaaacatagcaatatggcttcctttgtgaggcaactcaatatgtacggctttagaaaggtagtttccatcgagcagggcggccttctgcgccctgagagggatcatgtcgagttccagcatcccagctttgttaggggtcgggagcagctgctcgagagggttcgccgcaaggtgcccgcccttcgcggcgatgacggtcggtggcgccccgaggacttggggcgcctactgggcgaggtccaggctttacgaggagttcaagagtccactgaggccaggctgcgcgagctgagacagcagaatgagatcctctggagggaagtagttacattgaggcagagccatgggcaacagcaccgcgttatagggaagttgattcagtgtctgtttggtccacttcaggcaggacccagcaatgctggcggaaagcgcaaactgagcctaatgctcgatgaaggatctagctgcccaacacctgccaaattcaacacatgtcccctgcctggggccctactgcaggacccatactttatccagagcccgtcgacgtactcactgtcccagcgccaaatctgggccttggctctgactggacctggcgccccttcttcactaacctcccagaagacgttgcaccctttaaggggccctggtttcctgccacccgtgatggccggggcaccccctcccctgccagtggctgtggtccaggcaattcttgaggggaagggatctttcagcccagagggtccgcgaaacgcccagcagcccgaacccggcgatccccgggaaatccccgatagagggcctcttggcttagaaagtggcgacaggtcgcctgagagtctgctgcctcccatgcttttgcagcccccacaagagtcagttgagccagcaggcccactagacgtgttgggccctagcctccaaggccgggaatggacccttatggacctcgacatggagttatctctgatgcagcccctcgttcccgagcgtggcgagccagaactggcagtgaagggattaaacagcccaagccctggcaaggacccgactctcggcgccccactgttacttgacgtacaagctgccctgggagggccggcactgggtctccccggtgcccttacgatttattccacgccagagagtcgcacagcctcttatctcggcccggaggccagtccatctccatag

SEQ ID NO: 118629 - DNA, 1251 bp, Artificial Sequence
  derived and/or modified sequence
atgcaggaagcacctgccgctctgccgactgagcccggtccgagtcccgtgcctgcctttttgggtaaactgtgggctttagttggcgacccaggtacagaccacctcataaggtggagtccctccggaacctccttcctggtttccgaccagagccggtttgccaaggaggtattgccgcagtactttaagcacagcaatatggcctcattcgtgaggcagttgaatatgtatggtttccggaaggtcgtgagtatcgaacaaggcgggctgctccgaccagaaagggaccatgtggagtttcagcacccaagtttcgtgagaggccgagagcagctccttgagcgagtgcgccgcaaggtccctgccctgcgtggagacgatggccgctggagacccgaagacctaggccgcctgctgggggaagtgcaggcccttaggggagtgcaggaaagcaccgaggctcggcttcgggaactgcgacagcagaacgaaatcctgtggcgggaagtcgtgaccttgcgccagtcacacggacagcagcatcgagttatcggcaagcttatccagtgtctattcggccccctccaggccggtccttctaacgccgggggtaaacggaaactgagtctgatgttagatgagggttcctcctgcccaacacctgcaaagtttaatacctgtcctctccctggggccctcctgcaggacccctattttatacaaagccctttgcccgaaacgaaccttggactgtccccgcatcgggccagaggccccatcatctccgacattccggaagattcaccgagtccggaagggacaaggctcagtcctagctcagacggacggcgtggtccgcttggcctggagagtggagatcggagccccgagtctcttttgccgccaatgttgctgcagccacctcaggagagcgtggagccagcaggccctttagacgtgcttggaccaagcctgcagggaagggagtggaccttgatggatctggatatggagttgagcttgatgcaaccattagtgccagaacgtggtgagccagaactggcagtgaaggggctgaatagcccatcacctggcaaagacccgacattgggcgctcctctactgctggatgtgcaggcggcattgggcgggcctgccctggggctgccaggcgccttgaccatttacagcacacccgagagccggacagcaagttacctaggtccagaggcaagccccagcccatag

SEQ ID NO: 118630 - DNA, 2514 bp, Artificial Sequence
  derived and/or modified sequence
agatgcacgcgcgtccccgctgcccaacgaagcctgggtcgcgttgcgccgccgccaccctgggctggcagtggagctggagctggagcccgcgctgcccgctgagagcgtgacgcgcgtcctgcagccagccgtccccgtggctgcgctgcgcctcaacctctcaggcgacaccgtaggcccagtgcgcttcgcagcacaccactacgccgcaaccctgtgcgcgctcgaggtgcgcgcagccgcttcggccgagctgaacgccgcgctggaggagctggcggcgcgctgcgcggccctgcgcgaggtgcattgtttctgcgtggtgagccactcggtgctggacgccttccgcgcgcactgcccgcgcctgcgcacctataccctcaagctcacgcgcgagccgcatccctggaggcctacgctcgtggcgtgattgggcgacttctctcccccgtccccgtggacacgccccacccgctcggtcctggacacactgcccccctctcttgcctccacccctctgcggactctgcagctccgcggccccggcgcagggagagggagggcacgggcgcgggccgggcctcaagggacttgcccagcccacaccaggtcgcgcaccggcgatttctcctgtagaacaaagaaggaaatagagggaccgagaggggtgggactcgaacccaagtctcccactcatctcaccccaccccaccccactccaccccaccccacccctccactccactccactccacacatcccatccagccagccttttctgcctgctggtgcctcggccgctgtccgagccccgccccgcgggcttgcacgtggcccccgcctgacccggcgccccggggcggagtagggcggagcgggcggcaaacgcagcactttccgcggctttgacgagcccgcagcggccgggcccgagcgcagagccgggccgagactgcaccatgcaggaagcgccagctgcgctgcccacggagccaggccccagccccgtgcctgccttcctcggcaagctatgggcgctggtgggggacccaggcacagaccacctgatccgctggagcccgagcgggaccagtttcctcgtaagcgaccagagccgtttcgccaaggaagtgctgccccagtatttcaagcatagcaacatggcgagcttcgtgcgccaactcaacatgtacggttttcggaaggtggtgagcatcgagcagggcggcctgcttaggccggagcgcgaccacgtcgagttccagcacccgagcttcgtgcgcggccgcgagcagctactggagcgcgtgcggcgcaaggtgcccgcgctgcgcggcgacgacggccgctggcgcccggaggacctgggtcgactactgggcgaggtgcaggctttgcggggagtgcaggagagcaccgaggcgcggctgcgggagctcaggcagcagaacgagatcttgtggcgggaggtggtgacacttcggcagagccacggtcagcagcaccgggtcattggcaagctgatccagtgtctctttgggccacttcaggcggggccgagcaatgcaggaggcaagagaaagctgtccctgatgctggatgaggggagctcatgcccaacacctgccaagttcaacacctgccctctacctggtgcccttctgcaggacccctacttcatccagtcgccttctacttacagcctctcccagagacaaatttgggccttagccctcacagggccaggggccccatcatctctgacatcccagaagactctccatcccctgaggggaccaggctttctccctccagtgatggcaggagcccccccgccactgcctgtggctgtggtgcaggccatcctggaagggaaagggagcttcagccccgaggggcccaggaatgcccaacagcctgaaccaggggatcccagggagatacctgacagggggcctctgggcctggaaagcggggacaggagcccagagagtctgctgcctccgatgctgcttcagccccctcaagaaagtgtggaacctgcagggcctctagatgtgctgggccccagtctccaagggcgagaatggaccctgatggacttggacatggagctgtccttgatgcagcccttggttccagagcggggtgagcctgagctggcggtcaaggggttaaattctccaagcccagggaaggaccccacgctcggggccccactcctgctggatgtccaggcggccttgggaggcccagccctgggcctgcctggggctttaaccatttatagcactcctgagagccggactgcctcctacttgggcccggaagccagtccctccccctaagaccccgcgcctctgaaggggcttggaaccagtccgccgctgcacatccttcttggcttcctggcgccccctatcgggggtgagcgaagcccccactactaaatggcctctctccactaccccgactatccctgcacataaactccgttttttttttttc

SEQ ID NO: 118631 - DNA, 1249 bp, Artificial Sequence
  derived and/or modified sequence
atgcaggaagcgccagctgcgctgcccacggagccaggccccagccccgtgcctgccttcctcggcaagctatgggcgctggtgggggacccaggcacagaccacctgatccgctggagcccgagcgggaccagtttcctcgtaagcgaccagagccgtttcgccaaggaagtgctgccccagtatttcaagcatagcaacatggcgagcttcgtgcgccaactcaacatgtacggttttcggaaggtggtgagcatcgagcagggcggcctgcttaggccggagcgcgaccacgtcgagttccagcacccgagcttcgtgcgcggccgcgagcagctactggagcgcgtgcggcgcaaggtgcccgcgctgcgcggcgacgacggccgctggcgcccggaggacctgggtcgactactgggcgaggtgcaggctttgcggggagtgcaggagagcaccgaggcgcggctgcgggagctcaggcagcagaacgagatcttgtggcgggaggtggtgacacttcggcagagccacggtcagcagcaccgggtcattggcaagctgatccagtgtctctttgggccacttcaggcggggccgagcaatgcaggaggcaagagaaagctgtccctgatgctggatgaggggagctcatgcccaacacctgccaagttcaacacctgccctctacctggtgcccttctgcaggacccctacttcatccagtcgcctctcccagagacaaatttgggccttagccctcacagggccaggggccccatcatctctgacatcccagaagactctccatcccctgaggggaccaggctttctccctccagtgatggcaggagggggcctctgggcctggaaagcggggacaggagcccagagagtctgctgcctccgatgctgcttcagccccctcaagaaagtgtggaacctgcagggcctctagatgtgctgggccccagtctccaagggcgagaatggaccctgatggacttggacatggagctgtccttgatgcagcccttggttccagagcggggtgagcctgagctggcggtcaaggggttaaattctccaagcccagggaaggaccccacgctcggggccccactcctgctggatgtccaggcggccttgggaggcccagccctgggcctgcctggggctttaaccatttatagcactcctgagagccggactgcctcctacttgggcccggaagccagtccctccccct

SEQ ID NO: 118632 - DNA, 1389 bp, Artificial Sequence
  derived and/or modified sequence
atgcaggaggccccagctgccctgcccacagagcccggccccagccctgtgcctgccttcctgggcaagctgtgggccctggtgggggaccctggaacagaccacctgatccgctggagccccagcggcaccagcttcctggtgtctgaccagagcagatttgccaaggaggtgctgccccagtacttcaagcacagcaacatggccagctttgtgcggcagctgaacatgtatggcttcaggaaggtggtgtccattgagcagggcggcctgctgcggcctgagcgggaccacgtggagttccagcaccccagctttgtgcggggccgggagcagctgctggagcgggtgcggaggaaggtgcctgccctgcggggagatgatggccgctggaggcctgaggacctgggccgcctgctgggggaggtgcaggccctgcggggcgtgcaggagagcacagaggcccggctgcgggagctgcggcagcagaatgagatcctgtggagggaggtggtgaccctgcggcagagccacggccagcagcaccgggtgattggcaagctgatccagtgcctgtttggccccctgcaggccggccccagcaatgccggcggcaagaggaagctgagcctgatgctggatgagggcagcagctgccccaccccagccaagttcaacacctgccccctgcccggggccctgctgcaggacccctacttcatccagagccccagcacctacagcctgagccagaggcagatctgggccctggccctgaccggccctggggcccccagcagcctgaccagccagaagaccctgcaccccctgcggggccctggcttcctgccccctgtgatggccggggcccccccacccctgcctgtggccgtggtgcaggccatcctggagggcaagggcagcttcagccctgagggccccagaaatgcccagcagcctgagcccggggacccccgggagatcccagaccggggccccctgggcctggagagcggggacaggagccctgagagcctgctgccccccatgctgctgcagcccccccaggagagcgtggagcccgccggccccctggatgtgctgggccccagcctgcagggccgggagtggaccctgatggacctggacatggagctgagcctgatgcagcccctggtgcctgagcggggggagcctgagctggccgtgaagggcctgaacagccccagccctgggaaggaccccaccctgggcgcccccctgctgctggatgtgcaggccgccctgggcggccctgccctgggcctgcccggggccctgaccatctacagcaccccagagagcaggacagccagctacctgggccctgaggccagccccagcccctag

SEQ ID NO: 118633 - DNA, 1251 bp, Artificial Sequence
  derived and/or modified sequence
atgcaggaggccccagctgccctgcccacagagcccggccccagccctgtgcctgccttcctgggcaagctgtgggccctggtgggggaccctggaacagaccacctgatccgctggagccccagcggcaccagcttcctggtgtctgaccagagcagatttgccaaggaggtgctgccccagtacttcaagcacagcaacatggccagctttgtgcggcagctgaacatgtatggcttcaggaaggtggtgtccattgagcagggcggcctgctgcggcctgagcgggaccacgtggagttccagcaccccagctttgtgcggggccgggagcagctgctggagcgggtgcggaggaaggtgcctgccctgcggggagatgatggccgctggaggcctgaggacctgggccgcctgctgggggaggtgcaggccctgcggggcgtgcaggagagcacagaggcccggctgcgggagctgcggcagcagaatgagatcctgtggagggaggtggtgaccctgcggcagagccacggccagcagcaccgggtgattggcaagctgatccagtgcctgtttggccccctgcaggccggccccagcaatgccggcggcaagaggaagctgagcctgatgctggatgagggcagcagctgccccaccccagccaagttcaacacctgccccctgcccggggccctgctgcaggacccctacttcatccagagccccctgcctgagaccaacctgggcctgagcccccaccgggcccggggccccatcatcagtgacatccctgaggacagccccagccctgagggcacccggctgagccccagcagtgatggccggcggggccccctgggcctggagagcggggacaggagccctgagagcctgctgccccccatgctgctgcagcccccccaggagagcgtggagcccgccggccccctggatgtgctgggccccagcctgcagggccgggagtggaccctgatggacctggacatggagctgagcctgatgcagcccctggtgcctgagcggggggagcctgagctggccgtgaagggcctgaacagccccagccctgggaaggaccccaccctgggcgcccccctgctgctggatgtgcaggccgccctgggcggccctgccctgggcctgcccggggccctgaccatctacagcaccccagagagcaggacagccagctacctgggccctgaggccagccccagcccctag

SEQ ID NO: 118634 - DNA, 1389 bp, Artificial Sequence
  derived and/or modified sequence
atgcaggaggcccccgccgccctgcccaccgagcccggccccagccccgtgcccgcctttctcgggaagctttgggcactggtcggggatcccgggactgaccatttgatacgctggtcacctagcgggacaagcttcctggtctctgaccagtctcggttcgctaaggaggttcttccacagtacttcaagcacagcaatatggcttcattcgttcggcagctgaacatgtacgggttcaggaaggtggtgtctatcgagcaggggggccttcttcgccctgaacgagatcacgtggagtttcagcacccgagtttcgtgagaggacgggaacagttgttggagcgggtccggcggaaggtgcccgctcttcgaggagacgacggaaggtggcggccggaggacctgggtaggctgctgggagaggttcaggcattacgcggggtccaggagagcaccgaggccaggctgcgcgaactgagacagcagaacgagattctctggcgagaagtggtcacgcttagacaaagccacgggcagcagcatcgggtcataggaaaactgattcagtgtcttttcggtcccctgcaagctggccccagcaatgccgggggcaagaggaaactctcactgatgctggacgagggttcatcctgtccgacgcccgcgaaattcaatacttgtccgcttcctggcgccttgctgcaggacccctacttcatacagtctcccagcacatatagcttatcgcaacgccagatctgggccttggcacttacgggacccggtgccccgtcctctttgacatcccagaaaaccctacaccctctacggggtccagggttcttaccacctgtcatggccggagctcccccaccccttcccgttgcagtcgtccaggctatcttagagggcaagggaagtttttcacctgaggggcctcggaacgcccagcagcccgaacctggagatccacgagaaattccagatcggggtccattaggcctagagagcggggacagatcccctgaatcattgctcccccctatgctgctccaaccgccacaggagtccgtagaacccgccggtcccctcgatgttctgggtccctctctgcagggaagggagtggaccctgatggatttggacatggagctttctttgatgcaacccttagttcccgagcgaggcgaaccggagttagccgtcaagggcttgaacagcccctctcccggaaaagaccctacattgggtgcccctttactgctggacgtgcaagcagctctgggcggcccggcactgggcctgcccggcgccctgaccatatattcaactcctgaatctcgtaccgcttcctacttagggccagaggcttcgccttcaccttag

SEQ ID NO: 118635 - DNA, 1251 bp, Artificial Sequence
  derived and/or modified sequence
atgcaggaggcccccgccgccctgcccaccgagcccggccccagcccagttccagcattcttaggaaagctctgggccctggtgggcgaccctggaacggatcatctgatccgatggagcccttccgggacttctttccttgtgagtgatcagtcccgattcgctaaggaggttctgcctcagtacttcaagcattctaatatggcctcattcgtgcgacagctgaatatgtacggctttcgtaaggtggtgagcattgaacagggcggacttctgaggcccgaacgggatcatgtggagtttcagcacccaagcttcgtgcgtgggagggaacagttactggaacgcgttcgccgtaaggtgcccgccttgcggggggacgatggccggtggaggcccgaagatctgggccgcctgctgggagaggttcaggccctgcggggcgtccaggaatcaacagaagcacgactcagagagctccggcagcagaatgagatcctgtggcgagaagttgtcactctccgccaaagccacggccagcagcacagagtgatagggaaattgatccaatgtctatttggccctctccaagctgggcctagcaacgccggaggaaaaagaaaattatcattgatgttggacgaaggatccagctgccccacccccgctaagtttaacacttgtcctcttcccggggccctgcttcaagatccatatttcatacagtcccctcttcccgaaaccaacctgggactgtccccccaccgggcccgagggcctatcatttctgatataccagaggactcccccagtccggaaggaactcgcctgtccccatcatccgatggcagacgcggaccacttggattggagtcgggggacaggtccccggagagcttgctgcctccaatgctgctgcagccaccacaagagtcagtggagccggcaggacctctggacgtgctggggcctagtctccagggaagggaatggacattgatggacttggatatggagttgtccctgatgcagccattggtcccagaaaggggcgagcccgaactggccgtgaaaggactaaatagtccaagccccggcaaagaccctacgctcggagcccctctgctcctggatgtgcaggcagcgttgggaggcccggccctgggtttgcccggcgctctcacaatttactccactccagagagtcgcacagccagctacctgggaccagaggccagcccatctccatag

SEQ ID NO: 118636 - DNA, 1389 bp, Artificial Sequence
  derived and/or modified sequence
atgcaggaggcccctgcagctctcccgaccgaacccggaccatcccctgtgcctgctttcctcggcaaactatgggccctggtgggagacccagggaccgaccacctcatccggtggagcccctctggtaccagctttctggtgtctgaccaatctaggttcgcaaaggaagtacttccccagtacttcaaacactccaacatggccagcttcgtgagacagttgaacatgtacggattcaggaaagtggtttcaatagagcagggaggccttctgcgccctgaaagagatcatgtagaatttcaacatccgtcgtttgtacgcggacgcgaacagctgctggagagagttagacggaaggtccctgctctgagaggtgatgacggacgctggcgccctgaggatctcggacgcctcctgggagaggttcaggcgttgcggggagtccaggaaagtaccgaagccaggctgagagaactgcgtcaacagaatgaaatcctgtggagagaggttgttacattgcgtcaatcccacggtcaacagcaccgagttatcggcaagttaattcaatgtctctttggaccccttcaggccggtccctccaatgcaggcggaaagagaaagctatctcttatgctagacgagggttcgagttgccccaccccagctaaatttaacacgtgtccgctgcctggggctctgttgcaagatccttattttattcagtcaccttctacctattctctgtcccagaggcaaatttgggctttagcccttacgggccctggggcacccagtagtctcacaagccagaaaaccctccaccccttacggggacccggatttctgccacctgtaatggctggggctcccccaccgttgcctgtcgctgttgttcaggcgatcctggaggggaagggcagcttctcccctgaaggcccaagaaacgcgcagcagccagaacctggcgatcccagagagatcccagataggggcccattaggcctggagagtggggacagatctccagagagcctgctgccacctatgttactgcagccaccgcaggagtcagtggaacccgctggtccgctcgacgtcctgggaccttcattacagggccgtgaatggactctaatggatctggacatggagcttagtctgatgcagcccctggtacctgaacggggagagccggaactggctgttaagggcctgaattcaccctcaccaggtaaagatccaacccttggggcacctctgcttcttgacgttcaagctgctctgggcggaccagcactcggcctgcccggtgcgctgactatctattctaccccagaaagcagaacagccagctacctgggacccgaggccagtcctagcccttag

SEQ ID NO: 118637 - DNA, 1251 bp, Artificial Sequence
  derived and/or modified sequence
atgcaggaggctcctgctgctttaccaacggagcccggaccaagtcccgtgcccgcttttctcggcaagttatgggctctggtgggcgacccaggtaccgaccacctaatccggtggagcccatccgggacatcctttctggtttccgaccaatcgcggttcgctaaggaggtgctgccccagtatttcaagcattcaaatatggcgtcctttgtccgccagctgaatatgtatggatttagaaaagtagtgtccatcgagcagggcggactgttaagaccagagcgcgaccacgtggaattccagcacccttcctttgtccgaggacgggagcagctcctggaacgtgtgcgaagaaaggtgcctgccctccgcggagacgacggcagatggagacccgaagacctcggacgcctgctgggtgaggtgcaagcgctgcgcggtgtccaggagtctacggaggcaagactgagggaattgcggcagcagaatgagatcctctggcgcgaagtggtcactctgaggcagtcccatggccagcagcatagggtgataggcaagctcattcaatgtctcttcggacccttacaggcaggacctagtaacgcaggcggaaaaaggaagctgtctctaatgctggatgaaggatcttcctgtcctacccctgctaagtttaacacctgtccacttccaggtgcccttctccaggatccatattttattcagtccccactgcccgagaccaatctaggccttagtccacacagggcccgaggaccaatcattagcgatattcctgaggatagtcccagtcctgagggcactcgcctgagcccgtcatccgacgggaggcggggacccctcgggctggagagcggggacagaagcccggaatccctgctcccccctatgctgctgcaacccccacaggaatcagttgaacccgctggccctttggacgtcctgggacccagccttcaaggtcgggaatggacattgatggaccttgacatggaactttccctgatgcagccgctcgtcccagaacggggagagcccgaactggccgtgaaggggctcaacagcccttctcccggtaaagatccaactttaggtgctcctctgctgttagacgttcaagctgctcttggagggcctgctctgggcctgcctggggcactgaccatatattccaccccagagtctaggaccgcgagctatctgggacccgaagctagtcctagtccttag

SEQ ID NO: 118638 - DNA, 1389 bp, Artificial Sequence
  derived and/or modified sequence
atgcaggaggcccccgccgccctgcccaccgagcccggccccagccccgtgcccgccttcctgggcaagctgtgggccctggtgggcgaccccggcaccgaccacctgatcagatggagccccagcggcaccagcttcctggtgagcgaccagagcagattcgccaaggaggtgctgccccagtacttcaagcacagcaacatggccagcttcgtgagacagctgaacatgtacggcttcagaaaggtggtgagcatcgagcagggcggcctgctgagacccgagagagaccacgtggagttccagcaccccagcttcgtgagaggcagagagcagctgctggagagagtgagaagaaaggtgcccgccctgagaggcgacgacggcagatggagacccgaggacctgggcagactgctgggcgaggtgcaggccctgagaggcgtgcaggagagcaccgaggccagactgagagagctgagacagcagaacgagatcctgtggagagaggtggtgaccctgagacagagccacggccagcagcacagagtgatcggcaagctgatccagtgcctgttcggccccctgcaggccggccccagcaacgccggcggcaagagaaagctgagcctgatgctggacgagggcagcagctgccccacccccgccaagttcaacacctgccccctgcccggcgccctgctgcaggacccctacttcatccagagccccagcacctacagcctgagccagagacagatctgggccctggccctgaccggccccggcgcccccagcagcctgaccagccagaagaccctgcaccccctgagaggccccggcttcctgccccccgtgatggccggcgcccccccccccctgcccgtggccgtggtgcaggccatcctggagggcaagggcagcttcagccccgagggccccagaaacgcccagcagcccgagcccggcgaccccagagagatccccgacagaggccccctgggcctggagagcggcgacagaagccccgagagcctgctgccccccatgctgctgcagcccccccaggagagcgtggagcccgccggccccctggacgtgctgggccccagcctgcagggcagagagtggaccctgatggacctggacatggagctgagcctgatgcagcccctggtgcccgagagaggcgagcccgagctggccgtgaagggcctgaacagccccagccccggcaaggaccccaccctgggcgcccccctgctgctggacgtgcaggccgccctgggcggccccgccctgggcctgcccggcgccctgaccatctacagcacccccgagagcagaaccgccagctacctgggccccgaggccagccccagcccctag

SEQ ID NO: 118639 - DNA, 1251 bp, Artificial Sequence
  derived and/or modified sequence
atgcaggaggcccccgccgccctgcccaccgagcccggccccagccccgtgcccgccttcctgggcaagctgtgggccctggtgggcgaccccggcaccgaccacctgatcagatggagccccagcggcaccagcttcctggtgagcgaccagagcagattcgccaaggaggtgctgccccagtacttcaagcacagcaacatggccagcttcgtgagacagctgaacatgtacggcttcagaaaggtggtgagcatcgagcagggcggcctgctgagacccgagagagaccacgtggagttccagcaccccagcttcgtgagaggcagagagcagctgctggagagagtgagaagaaaggtgcccgccctgagaggcgacgacggcagatggagacccgaggacctgggcagactgctgggcgaggtgcaggccctgagaggcgtgcaggagagcaccgaggccagactgagagagctgagacagcagaacgagatcctgtggagagaggtggtgaccctgagacagagccacggccagcagcacagagtgatcggcaagctgatccagtgcctgttcggccccctgcaggccggccccagcaacgccggcggcaagagaaagctgagcctgatgctggacgagggcagcagctgccccacccccgccaagttcaacacctgccccctgcccggcgccctgctgcaggacccctacttcatccagagccccctgcccgagaccaacctgggcctgagcccccacagagccagaggccccatcatcagcgacatccccgaggacagccccagccccgagggcaccagactgagccccagcagcgacggcagaagaggccccctgggcctggagagcggcgacagaagccccgagagcctgctgccccccatgctgctgcagcccccccaggagagcgtggagcccgccggccccctggacgtgctgggccccagcctgcagggcagagagtggaccctgatggacctggacatggagctgagcctgatgcagcccctggtgcccgagagaggcgagcccgagctggccgtgaagggcctgaacagccccagccccggcaaggaccccaccctgggcgcccccctgctgctggacgtgcaggccgccctgggcggccccgccctgggcctgcccggcgccctgaccatctacagcacccccgagagcagaaccgccagctacctgggccccgaggccagccccagcccctag

SEQ ID NO: 118640 - protein, 397 aa, Artificial Sequence
  derived and/or modified sequence
MVKETTYYDVLGVKPNATQEELKKAYRKLALKYHPDKNPNEGEKFKQISQAYEVLSDAKKRELYDKGGEQAIKEGGAGGGFGSPMDIFDMFFGGGGRMQRERRGKNVVHQLSVTLEDLYNGATRKLALQKNVICDKCEGRGGKKGAVECCPNCRGTGMQIRIHQIGPGMVQQIQSVCMECQGHGERISPKDRCKSCNGRKIVREKKILEVHIDKGMKDGQKITFHGEGDQEPGLEPGDIIIVLDQKDHAVFTRRGEDLFMCMDIQLVEALCGFQKPISTLDNRTIVITSHPGQIVKHGDIKCVLNEGMPIYRRPYEKGRLIIEFKVNFPENGFLSPDKLSLLEKLLPERKEVEETDEMDQVELVDFDPNQERRRHYNGEAYEDDEHHPRGGVQCQTS

SEQ ID NO: 118641 - protein, 257 aa, Artificial Sequence
  derived and/or modified sequence
MQIRIHQIGPGMVQQIQSVCMECQGHGERISPKDRCKSCNGRKIVREKKILEVHIDKGMKDGQKITFHGEGDQEPGLEPGDIIIVLDQKDHAVFTRRGEDLFMCMDIQLVEALCGFQKPISTLDNRTIVITSHPGQIVKHGDIKCVLNEGMPIYRRPYEKGRLIIEFKVNFPENGFLSPDKLSLLEKLLPERKEVEETDEMDQVELVDFDPNQERRRHYNGEAYEDDEHHPRGGVQCQTSNGPVNNTHCWHLMCSSE

SEQ ID NO: 118642 - protein, 240 aa, Artificial Sequence
  derived and/or modified sequence
MQIRIHQIGPGMVQQIQSVCMECQGHGERISPKDRCKSCNGRKIVREKKILEVHIDKGMKDGQKITFHGEGDQEPGLEPGDIIIVLDQKDHAVFTRRGEDLFMCMDIQLVEALCGFQKPISTLDNRTIVITSHPGQIVKHGDIKCVLNEGMPIYRRPYEKGRLIIEFKVNFPENGFLSPDKLSLLEKLLPERKEVEETDEMDQVELVDFDPNQERRRHYNGEAYEDDEHHPRGGVQCQTS

SEQ ID NO: 118643 - DNA, 1194 bp, Artificial Sequence
  derived and/or modified sequence
atggtgaaggagaccacctactacgacgtgctgggcgtgaagcccaacgccacccaggaggagctgaagaaggcctacagaaagctggccctgaagtaccaccccgacaagaaccccaacgagggcgagaagttcaagcagatcagccaggcctacgaggtgctgagcgacgccaagaagagagagctgtacgacaagggcggcgagcaggccatcaaggagggcggcgccggcggcggcttcggcagccccatggacatcttcgacatgttcttcggcggcggcggcagaatgcagagagagagaagaggcaagaacgtggtgcaccagctgagcgtgaccctggaggacctgtacaacggcgccaccagaaagctggccctgcagaagaacgtgatctgcgacaagtgcgagggcagaggcggcaagaagggcgccgtggagtgctgccccaactgcagaggcaccggcatgcagatcagaatccaccagatcggccccggcatggtgcagcagatccagagcgtgtgcatggagtgccagggccacggcgagagaatcagccccaaggacagatgcaagagctgcaacggcagaaagatcgtgagagagaagaagatcctggaggtgcacatcgacaagggcatgaaggacggccagaagatcaccttccacggcgagggcgaccaggagcccggcctggagcccggcgacatcatcatcgtgctggaccagaaggaccacgccgtgttcaccagaagaggcgaggacctgttcatgtgcatggacatccagctggtggaggccctgtgcggcttccagaagcccatcagcaccctggacaacagaaccatcgtgatcaccagccaccccggccagatcgtgaagcacggcgacatcaagtgcgtgctgaacgagggcatgcccatctacagaagaccctacgagaagggcagactgatcatcgagttcaaggtgaacttccccgagaacggcttcctgagccccgacaagctgagcctgctggagaagctgctgcccgagagaaaggaggtggaggagaccgacgagatggaccaggtggagctggtggacttcgaccccaaccaggagagaagaagacactacaacggcgaggcctacgaggacgacgagcaccaccccagaggcggcgtgcagtgccagaccagctag

SEQ ID NO: 118644 - DNA, 1194 bp, Artificial Sequence
  derived and/or modified sequence
atggtcaaagagaccacatactacgacgtgctgggagttaaacctaacgccacccaggaagagctaaagaaggcctatcgaaagttggccttgaagtaccatcctgataaaaaccctaatgaaggagagaagtttaaacagatctctcaggcttacgaggtcctctctgatgccaagaagcgggaattatacgacaagggcggggaacaagccataaaggagggcggggctgggggaggctttggtagcccgatggatatcttcgacatgtttttcggcggcggcgggaggatgcagagagagcgacgcggaaagaatgttgtgcatcagctctcagtgacgctggaggacctgtataacggcgccacacgcaagctggctctgcagaagaacgtgatttgtgataagtgtgaaggaagggggggcaaaaaaggggcggtggagtgttgccccaattgcaggggcaccggcatgcaaatcaggattcatcaaattggcccaggaatggttcagcaaattcagagcgtgtgcatggagtgccagggacacggcgaaaggatctcacccaaagataggtgtaaaagctgcaatggaaggaagattgtgcgggagaaaaaaattttggaggtgcacatcgacaagggcatgaaggacggccagaagatcacctttcatggcgaaggcgaccaggagccgggtctcgagcccggcgatattatcatagttttggatcagaaggatcatgccgtttttacacgtaggggagaggatctcttcatgtgcatggacatccagcttgtcgaggccctgtgtggattccagaaacccatttcgaccctggataacaggacgatcgtgatcacatcgcaccctggacaaatcgtgaagcatggcgatatcaaatgcgttctgaacgagggcatgccaatctatcggcggccgtacgagaagggacgtctcatcattgagtttaaggttaatttccctgagaacggtttcctatctcctgacaaactgtccctgcttgagaagcttctacctgagcgcaaggaagtggaggaaaccgatgaaatggatcaggtcgaactagtagacttcgacccaaaccaggaacgccgaaggcattacaacggggaggcctatgaggatgacgaacatcacccgagggggggcgtccaatgtcagacatcctag

SEQ ID NO: 118645 - DNA, 2381 bp, Artificial Sequence
  derived and/or modified sequence
ggacttccggcgggtgacgcgcccgggttcggctacaaaagaggacggctgcggcgcgccgggcggaactttccagaacgctcggtgagaggcggaggagcggtaactaccccggctgcgcacagctcggcgctccttcccgctccctcacacaccggcctcagcccgcaccggcagtagaagatggtgaaagaaacaacttactacgatgttttgggggtcaaacccaatgctactcaggaagaattgaaaaaggcttataggaaactggctttgaagtaccatcctgataagaacccaaatgaaggagagaagtttaaacagatttctcaagcttacgaagttctctctgatgcaaagaaaagggaattatatgacaaaggaggagaacaggcaattaaagagggtggagcaggtggcggttttggctcccccatggacatctttgatatgttttttggaggaggaggaaggatgcagagagaaaggagaggtaaaaatgttgtacatcagctctcagtaaccctagaagacttatataatggtgcaacaagaaaactggctctgcaaaagaatgtgatttgtgacaaatgtgaaggtagaggaggtaagaaaggagcagtagagtgctgtcccaattgccgaggtactggaatgcaaataagaattcatcagataggacctggaatggttcagcaaattcagtctgtgtgcatggagtgccagggccatggggagcggatcagtcctaaagatagatgtaaaagctgcaacggaaggaagatagttcgagagaagaaaattttagaagttcatattgacaaaggcatgaaagatggccagaagataacattccatggtgaaggagaccaagaaccaggactggagccaggcgatattatcattgtgttagatcagaaggaccatgctgtttttactcgacgaggagaagaccttttcatgtgtatggacatacagctcgttgaagcactgtgtggcttccagaagccaatatctactcttgacaaccgaaccatcgtcatcacctctcatccaggtcagattgtcaagcatggagatatcaagtgtgtactaaatgaaggcatgccaatttatcgtagaccatatgaaaagggtcgcctaatcatcgaatttaaggtaaactttcctgagaatggctttctctctcctgataaactgtctttgctggaaaaactcctacccgagaggaaggaagtggaagagactgatgagatggaccaagtagaactggtggactttgatccaaatcaggaaagacggcgccactacaatggagaagcatatgaggatgatgaacatcatcccagaggtggtgttcagtgtcagacctcttaatgggccagtgaataacactcactgctggcatttaatgtgcagtagtgaatgagtgaaggactgtaatcataatatgctcactacttgctcttgtttttgttttaataaactatagtagtgttttaaaaagttaaatgaagaataaacgcaaatataaaagctctgattttgccctgtatgtatgatgacttcagtgtgcaagatgaagtttaatacctgtaaaaactacaaagaagttcccctagcatttctaggccaaaccttgtaattgacttcagctatgtacgtggacaagcttagactgaaatgctaggtatatgtattggcttcagtgtatgacccttcattgttaagctatgaaagtaaaactctgtatttaactggcaatgaggaaaaaaaaattttgtagagaagtgttggtctgtatagttctttatattaagtgggattcattgtaatgcctctgcatttattctgttgcctcagctgttacttgaagatggcgtaatatataatttatcctgtggtatcagtgataaaaatgatacctttctgtaggaggggtttatcataatatgctgcttcttgaaggcttgcacttccagaattgtgtttccttctgctgtgccattcatatatatatacatatatatatataatcttgaccagtcctggtcatttgctcccctccttgtctgtggaccatgataagcccaagtagtgacttcagagctgggtaacagaaattaaagtgaaaagacctttacgtggagaatttgcatgcgtaatataggaaggtgttctttaggtatgttacaggattactttaaaccatttgactttcgctccaaagttatgttggtagtatagcaaattatgatgaatagctttaattgtatgtttaaaagtctcatatgttcacatgcttaaatctgggtatcagaatttaagcaattcttgaaatgtattgtctccttaatatactaattacaaagcatctccaa

SEQ ID NO: 118646 - DNA, 1537 bp, Artificial Sequence
  derived and/or modified sequence
ggacttccggcgggtgacgcgcccgggttcggctacaaaagaggacggctgcggcgcgccgggcggaactttccagaacgctcggtgagaggcggaggagcggtaactaccccggctgcgcacagctcggcgctccttcccgctccctcacacaccggcctcagcccgcaccggcagtagaagatggtgaaagaaacaacttactacgatgttttgggggtcaaacccaatgctactcaggaagaattgaaaaaggcttataggaaactggctttgaagtaccatcctgataagaacccaaatgaaggagagaagtttaaacagatttctcaagcttacgaagttctctctgatgcaaagaaaagggaattatatgacaaaggaggagaacaggcaattaaagagggtggagcaggtggcggttttggctcccccatggacatctttgatatgttttttggaggaggaggaaggatgcagagagaaaggagaggtaaaaatgttgtacatcagctctcagtaaccctagaagacttatataatggtgcaacaagaaaactggctctgcaaaagaatgtgatttgtgacaaatgtgaaggtagaggaggtaagaaaggagcagtagagtgctgtcccaattgccgaggtactggaatgcaaataagaattcatcagataggacctggaatggttcagcaaattcagtctgtgtgcatggagtgccagggccatggggagcggatcagtcctaaagatagatgtaaaagctgcaacggaaggaagatagttcgagagaagaaaattttagaagttcatattgacaaaggcatgaaagatggccagaagataacattccatggtgaaggagaccaagaaccaggactggagccaggcgatattatcattgtgttagatcagaaggaccatgctgtttttactcgacgaggagaagaccttttcatgtgtatggacatacagctcgttgaagcactgtgtggcttccagaagccaatatctactcttgacaaccgaaccatcgtcatcacctctcatccaggtcagattgtcaagcatggagatatcaagtgtgtactaaatgaaggcatgccaatttatcgtagaccatatgaaaagggtcgcctaatcatcgaatttaaggtaaactttcctgagaatggctttctctctcctgataaactgtctttgctggaaaaactcctacccgagaggaaggaagtggaagagactgatgagatggaccaagtagaactggtggactttgatccaaatcaggaaagacggcgccactacaatggagaagcatatgaggatgatgaacatcatcccagaggtggtgttcagtgtcagacctctaatgggccagtgaataacactcactgctggcatttaatgtgcagtagtgaatgagtgaaggactgtaatcataatatgctcactacttgctcttgtttttgttttaataaactatagtagtgttttaaaaagttaaatgaagaataaacgcaaatataaaagc

SEQ ID NO: 118647 - DNA, 1454 bp, Artificial Sequence
  derived and/or modified sequence
ggaactttccagaacgctcggtgagaggcggaggagcggtaactaccccggctgcgcacagctcggcgctccttcccgctccctcacacaccggcctcagcccgcaccggcagtagaagatggtgaaagaaacaacttactacgatgttttgggggtcaaacccaatgctactcaggaagaattgaaaaaggcttataggaaactggctttgaagtaccatcctgataagaacccaaatgaaggagagaaggtaaaaatgttgtacatcagctctcagtaaccctagaagacttatataatggtgcaacaagaaaactggctctgcaaaagaatgtgatttgtgacaaatgtgaaggtagaggaggtaagaaaggagcagtagagtgctgtcccaattgccgaggtactggaatgcaaataagaattcatcagataggacctggaatggttcagcaaattcagtctgtgtgcatggagtgccagggccatggggagcggatcagtcctaaagatagatgtaaaagctgcaacggaaggaagatagttcgagagaagaaaattttagaagttcatattgacaaaggcatgaaagatggccagaagataacattccatggtgaaggagaccaagaaccaggactggagccaggcgatattatcattgtgttagatcagaaggaccatgctgtttttactcgacgaggagaagaccttttcatgtgtatggacatacagctcgttgaagcactgtgtggcttccagaagccaatatctactcttgacaaccgaaccatcgtcatcacctctcatccaggtcagattgtcaagcatggagatatcaagtgtgtactaaatgaaggcatgccaatttatcgtagaccatatgaaaagggtcgcctaatcatcgaatttaaggtaaactttcctgagaatggctttctctctcctgataaactgtctttgctggaaaaactcctacccgagaggaaggaagtggaagagactgatgagatggaccaagtagaactggtggactttgatccaaatcaggaaagacggcgccactacaatggagaagcatatgaggatgatgaacatcatcccagaggtggtgttcagtgtcagacctcttaatgggccagtgaataacactcactgctggcatttaatgtgcagtagtgaatgagtgaaggactgtaatcataatatgctcactacttgctcttgtttttgttttaataaactatagtagtgttttaaaaagttaaatgaagaataaacgcaaatataaaagctctgattttgccctgtatgtatgatgacttcagtgtgcaagatgaagtttaatacctgtaaaaactacaaagaagttcccctagcatttctaggccaaaccttgtaattgacttcagctatgtacgtggacaagcttagactgaaatgctaggtatat

SEQ ID NO: 118648 - DNA, 1194 bp, Artificial Sequence
  derived and/or modified sequence
atggtgaaggagaccacctactatgatgtgctgggcgtgaagcccaatgccacccaggaggagctgaagaaggcctacaggaagctggccctgaagtaccacccagacaagaaccccaatgaaggagagaagttcaagcagatcagccaggcctatgaggtgctgagtgatgccaagaagcgggagctgtatgacaagggcggggagcaggccatcaaggagggcggggccggcggcggcttcggcagccccatggacatctttgacatgttcttcggcggcggcggccgcatgcagcgggagcggcggggcaagaatgtggtgcaccagctgtctgtgaccctggaggacctgtacaacggggccaccaggaagctggccctgcagaagaatgtcatctgtgacaagtgtgagggccggggcggcaagaagggagctgtggagtgctgccccaactgccggggcaccggcatgcagatccgcatccaccagatcggccctggcatggtgcagcagatccagagcgtgtgcatggagtgccagggccatggagagcgcatcagccccaaggaccgctgcaagagctgcaatggaaggaagatcgtgcgggagaagaagatcctggaggtgcacatcgacaagggcatgaaggatggccagaagatcaccttccatggagagggggaccaggagcccggcctggagcccggggacatcatcatcgtgctggaccagaaggaccatgctgtgttcaccaggagaggagaggacctcttcatgtgcatggacatccagctggtggaggccctgtgtggcttccagaagcccatcagcaccctggacaacagaaccatcgtcatcaccagccaccctggccagatcgtgaagcatggagacatcaagtgtgtgctgaatgaaggcatgcccatctaccgccggccctatgagaagggccgcctcatcatcgagttcaaggtgaacttcccagaaaatggcttcctgagcccagacaagctgagcctgctggagaagctgctgcctgagaggaaggaggtggaggagacagatgagatggaccaggtggagctggtggactttgaccccaaccaggagaggagaagacactacaatggagaggcctatgaagatgatgagcaccacccccggggcggcgtgcagtgccagaccagctag

SEQ ID NO: 118649 - DNA, 1194 bp, Artificial Sequence
  derived and/or modified sequence
atggtgaaggagaccacctactacgacgtgctgggcgtgaagcccaacgcaacccaggaggaactgaaaaaggcctacagaaagttggcgttgaaataccaccccgataaaaaccccaatgagggcgagaaatttaagcagattagccaggcctatgaagtcttgagtgatgccaaaaagagggaattatacgacaaaggcggcgaacaggctattaaggaaggtggtgcaggaggcgggttcgggtcaccgatggatatttttgatatgttcttcggcggaggcggcagaatgcagagggaaaggcgaggtaagaatgtggttcatcagctctccgtcaccctcgaggatctgtacaacggggctactaggaagttggctttgcaaaagaatgtcatctgcgacaagtgcgaaggccgcgggggaaagaaaggcgccgtggagtgttgcccgaattgtaggggtacaggcatgcaaatccgtattcatcaaattggccccggaatggtccaacagatccagtcagtttgcatggagtgtcaggggcacggggagcggattagtcccaaggatcgatgcaaatcttgcaacggccgcaaaatcgtcagggagaagaagatccttgaggtccatatcgataaagggatgaaggatggccagaaaattacttttcacggcgaaggagaccaggagccaggtctggaaccaggcgatattattatcgtattagatcagaaagaccacgccgtgtttacacgccgcggagaagatttgttcatgtgcatggatatccaactagtcgaagcattgtgtggatttcagaagcccatatccacactggataaccgtactatagttattactagtcatcccgggcaaatcgtgaaacatggagacatcaagtgcgtactgaatgaggggatgcctatttatcgccgaccttacgagaagggccggttaattatcgaatttaaagtgaacttcccggagaatgggttcctatcgccagacaagctgtccctgctcgaaaagttgctaccggaaagaaaggaggttgaagaaaccgacgagatggatcaggtcgagctagtggattttgatcccaaccaggaaaggaggaggcattataacggcgaggcctatgaagatgatgaacatcaccccaggggaggagtccagtgccaaaccagctag

SEQ ID NO: 118650 - DNA, 1194 bp, Artificial Sequence
  derived and/or modified sequence
atggtaaaagagacaacctattacgatgtcctgggggtcaagccgaacgctacccaggaagagctgaagaaggcttatcgaaaactggctcttaagtatcaccccgacaagaaccccaacgagggtgagaagttcaagcagatttcccaggcgtacgaagtgctgagcgatgcaaaaaagagggaactgtatgacaaggggggagagcaggcaatcaaagagggaggagcagggggaggttttggctctccaatggacatattcgatatgttttttggcggaggtggcagaatgcagagagagcgaagggggaagaacgttgtgcaccagctgtctgtgaccctggaggacttgtataacggcgctacccggaagcttgcactgcagaaaaatgtcatctgtgataaatgcgaaggcagaggtggaaaaaaaggcgctgtcgagtgttgcccaaactgccggggaactggcatgcaaatccgtatccatcagattggccctggaatggtgcagcagattcagtccgtatgtatggaatgccagggccacggcgagcgcatctctcctaaggaccgatgcaagagctgcaatggcagaaaaatcgttagagagaaaaaaatcctcgaggttcacatcgataaggggatgaaggacggccagaagattaccttccatggagagggggatcaggaaccaggactggaaccgggagacatcattatcgtcttagaccaaaaggaccacgccgtatttacccgcaggggcgaggatctttttatgtgtatggatatccaactagtcgaggcactttgcggttttcagaagccaatatccaccttagataaccgaacaattgtgatcacgagtcacccaggtcagattgttaagcacggagacatcaaatgtgtgcttaatgagggtatgcccatttacaggcggccttacgaaaaggggcgactaataatcgagtttaaggtcaacttccctgagaacggctttctttctcctgacaagttgtccttactcgagaaactcctgccagaaagaaaagaagtcgaagaaaccgacgaaatggaccaggtagagctagtggacttcgaccctaaccaggaacggagacgccactacaacggcgaagcgtacgaggacgacgagcaccatcccagaggtggtgtgcagtgtcagacttcttag

SEQ ID NO: 118651 - protein, 205 aa, Artificial Sequence
  derived and/or modified sequence
MTERRVPFSLLRGPSWDPFRDWYPHSRLFDQAFGLPRLPEEWSQWLGGSSWPGYVRPLPPAAIESPAVAAPAYSRALSRQLSSGVSEIRHTADRWRVSLDVNHFAPDELTVKTKDGVVEITGKHEERQDEHGYISRCFTRKYTLPPGVDPTQVSSSLSPEGTLTVEAPMPKLATQSNEITIPVTFESRAQLGGPEAAKSDETAAK

SEQ ID NO: 118652 - protein, 170 aa, Artificial Sequence
  derived and/or modified sequence
MTERRVPFSLLRGPSWPGYVRPLPPAAIESPAVAAPAYSRALSRQLSSGVSEIRHTADRWRVSLDVNHFAPDELTVKTKDGVVEITGKHEERQDEHGYISRCFTRKYTLPPGVDPTQVSSSLSPEGTLTVEAPMPKLATQSNEITIPVTFESRAQLGGPEAAKSDETAAK

SEQ ID NO: 118653 - DNA, 618 bp, Artificial Sequence
  derived and/or modified sequence
atgaccgagagaagagtgcccttcagcctgctgagaggccccagctgggaccccttcagagactggtacccccacagcagactgttcgaccaggccttcggcctgcccagactgcccgaggagtggagccagtggctgggcggcagcagctggcccggctacgtgagacccctgccccccgccgccatcgagagccccgccgtggccgcccccgcctacagcagagccctgagcagacagctgagcagcggcgtgagcgagatcagacacaccgccgacagatggagagtgagcctggacgtgaaccacttcgcccccgacgagctgaccgtgaagaccaaggacggcgtggtggagatcaccggcaagcacgaggagagacaggacgagcacggctacatcagcagatgcttcaccagaaagtacaccctgccccccggcgtggaccccacccaggtgagcagcagcctgagccccgagggcaccctgaccgtggaggcccccatgcccaagctggccacccagagcaacgagatcaccatccccgtgaccttcgagagcagagcccagctgggcggccccgaggccgccaagagcgacgagaccgccgccaagtag

SEQ ID NO: 118654 - DNA, 513 bp, Artificial Sequence
  derived and/or modified sequence
atgaccgagagaagagtgcccttcagcctgctgagaggccccagctggcccggctacgtgagacccctgccccccgccgccatcgagagccccgccgtggccgcccccgcctacagcagagccctgagcagacagctgagcagcggcgtgagcgagatcagacacaccgccgacagatggagagtgagcctggacgtgaaccacttcgcccccgacgagctgaccgtgaagaccaaggacggcgtggtggagatcaccggcaagcacgaggagagacaggacgagcacggctacatcagcagatgcttcaccagaaagtacaccctgccccccggcgtggaccccacccaggtgagcagcagcctgagccccgagggcaccctgaccgtggaggcccccatgcccaagctggccacccagagcaacgagatcaccatccccgtgaccttcgagagcagagcccagctgggcggccccgaggccgccaagagcgacgagaccgccgccaagtag

SEQ ID NO: 118655 - DNA, 618 bp, Artificial Sequence
  derived and/or modified sequence
atgaccgaaaggagggtgcctttctctctgttaaggggcccaagctgggatccattcagagattggtaccctcactcccggctcttcgatcaggctttcgggctgcctcgcctgccagaggaatggtctcagtggctcggcggctcttcatggcccggatacgtgcgacctctgcctccagccgcaattgagtctcctgctgtagcggcacctgcttatagtagggcccttagccgacaactctcatcaggtgtgtcagaaatcagacataccgccgatcgctggagagtgtctctcgacgttaatcatttcgcacccgatgagctaaccgttaaaactaaagacggtgtcgtggaaattacaggtaaacatgaagaacgccaggatgagcacgggtatatcagccgttgcttcacacgaaagtatactctccctcctggggtcgaccctacacaggtgtctagctccctgtcacccgagggtacactaacagttgaagcgcctatgcctaagctagctactcagtctaatgagattaccatcccggtgacatttgagtcacgggctcagctaggcggacctgaagccgccaagtccgacgaaacagctgcaaagtag

SEQ ID NO: 118656 - DNA, 513 bp, Artificial Sequence
  derived and/or modified sequence
atgacagaacgtcgcgtgcctttcagtttgcttcgtgggcctagttggcctggttacgtgcgacccctgccacctgctgccatcgagtcacccgcagtggccgccccagcttattcccgcgccctctctagacagttaagcagcggcgtgtccgagataaggcacacggcagatcgatggagagtctctcttgacgtgaaccacttcgcaccagatgagctcactgtgaagacaaaggatggtgtggtggagataacgggcaaacacgaggaaagacaggacgagcacggatatatcagtaggtgttttacccggaagtataccttaccccccggtgtagaccctacacaagtgtcttcatcgctgtcacccgaagggacgcttacggtggaggccccaatgccaaaactggcgacgcagtcaaacgaaataaccatacccgttacatttgagagccgggcacagctgggtggccctgaagcagccaagtcagacgaaactgcagctaagtag

SEQ ID NO: 118657 - DNA, 909 bp, Artificial Sequence
  derived and/or modified sequence
gctgggggaggagtgcatggggaggggcggccctcaaacgggtcattgccattaatagagacctcaaacaccgcctgctaaaaatacccgactggaggagcataaaagcgcagccgagcccagcgccccgcacttttctgagcagacgtccagagcagagtcagccagcatgaccgagcgccgcgtccccttctcgctcctgcggggccccagctgggaccccttccgcgactggtacccgcatagccgcctcttcgaccaggccttcgggctgccccggctgccggaggagtggtcgcagtggttaggcggcagcagctggccaggctacgtgcgccccctgccccccgccgccatcgagagccccgcagtggccgcgcccgcctacagccgcgcgctcagccggcaactcagcagcggggtctcggagatccggcacactgcggaccgctggcgcgtgtccctggatgtcaaccacttcgccccggacgagctgacggtcaagaccaaggatggcgtggtggagatcaccggcaagcacgaggagcggcaggacgagcatggctacatctcccggtgcttcacgcggaaatacacgctgccccccggtgtggaccccacccaagtttcctcctccctgtcccctgagggcacactgaccgtggaggcccccatgcccaagctagccacgcagtccaacgagatcaccatcccagtcaccttcgagtcgcgggcccagcttgggggcccagaagctgcaaaatccgatgagactgccgccaagtaaagccttagcccggatgcccacccctgctgccgccactggctgtgcctcccccgccacctgtgtgttcttttgatacatttatcttctgtttttctcaaataaagttcaaagcaaccacctgt

SEQ ID NO: 118658 - DNA, 672 bp, Artificial Sequence
  derived and/or modified sequence
gcacttttctgagcagacgtccagagcagagtcagccagcatgaccgagcgccgcgtccccttctcgctcctgcggggccccagctggccaggctacgtgcgccccctgccccccgccgccatcgagagccccgcagtggccgcgcccgcctacagccgcgcgctcagccggcaactcagcagcggggtctcggagatccggcacactgcggaccgctggcgcgtgtccctggatgtcaaccacttcgccccggacgagctgacggtcaagaccaaggatggcgtggtggagatcaccggcaagcacgaggagcggcaggacgagcatggctacatctcccggtgcttcacgcggaaatacacgctgccccccggtgtggaccccacccaagtttcctcctccctgtcccctgagggcacactgaccgtggaggcccccatgcccaagctagccacgcagtccaacgagatcaccatcccagtcaccttcgagtcgcgggcccagcttgggggcccagaagctgcaaaatccgatgagactgccgccaagtaaagccttagcccggatgcccacccctgctgccgccactggctgtgcctcccccgccacctgtgtgttcttttgatacatttatcttctgtttttctcaaataaagttcaaagcaaccacc

SEQ ID NO: 118659 - DNA, 618 bp, Artificial Sequence
  derived and/or modified sequence
atgacagagcggcgggtgcccttcagcctgctgcggggccccagctgggaccccttccgggactggtacccccacagccggctgtttgaccaggccttcggcctgccccggctgcctgaggagtggagccagtggctgggcggcagctcctggccaggctacgtgcggcccctgcccccagctgccatcgagagccctgctgtggccgccccagcctacagccgggccctgagccggcagctgagcagtggagtgtctgagatccgccacacagctgaccgctggagggtgtccctggatgtgaaccactttgccccagatgagctgactgtgaagaccaaggatggagtggtggagatcaccgggaagcatgaggagcggcaggatgaacatggctacatcagccgctgcttcaccaggaagtacaccctgcccccaggagtggaccccacccaggtgagcagcagcctgagccctgagggcaccctgactgtggaggcccccatgcccaagctggccacccagagcaatgagatcaccatccctgtgacctttgagagccgggcccagctgggcggccctgaggccgccaagagtgatgaaacagctgccaagtag

SEQ ID NO: 118660 - DNA, 513 bp, Artificial Sequence
  derived and/or modified sequence
atgacagagcggcgggtgcccttcagcctgctgcggggccccagctggccaggctacgtgcggcccctgcccccagctgccatcgagagccctgctgtggccgccccagcctacagccgggccctgagccggcagctgagcagcggcgtgtctgagatccgccacacagctgaccgctggagggtgtccctggatgtgaaccactttgccccagatgagctgactgtgaagaccaaggatggagtggtggagatcaccgggaagcatgaggagcggcaggatgagcacggctacatcagccgctgcttcaccaggaagtacaccctgcccccaggagtggaccccacccaggtgagcagcagcctgagccctgagggcaccctgactgtggaggcccccatgcccaagctggccacccagagcaatgagatcaccatccctgtgacctttgagagccgggcccagctgggcggccctgaggccgccaagagtgatgaaacagctgccaagtag

SEQ ID NO: 118661 - DNA, 618 bp, Artificial Sequence
  derived and/or modified sequence
atgaccgagcggcgggtgcccttcagcctgctgcggggccccagctgggatcccttccgggactggtatcctcacagccggctctttgaccaggcattcggcctgccccgacttccggaggagtggtcccagtggctgggcggctcctcttggcccggctacgtccgccccctccctccagccgctatcgagtcccctgccgtggctgcccccgcttactccagagccctgtctaggcagcttagcagtggtgtcagtgagattcggcatacagcagatcggtggagagtatcgctcgatgtgaaccattttgcgccagacgaactcaccgtgaagacaaaggatggcgttgtggagataacggggaaacatgaggaacgacaggatgaacacggatatatttcgcgctgtttcaccaggaaatacactctgcctccgggggttgaccccacccaagtgtcttcaagtctgtcccctgagggaacgctgactgtggaggctcctatgccaaaactggcaactcaaagtaatgaaatcaccatccctgtgactttcgagtcaagggcccagctcggcggacccgaggctgctaagtcagatgagaccgcagccaagtag

SEQ ID NO: 118662 - DNA, 513 bp, Artificial Sequence
  derived and/or modified sequence
atgaccgagcggcgggtgcccttcagcctgctgcggggccccagctggcccggctacgttaggcctcttcctccagcagcaatcgaatctcctgctgtggccgccccggcttactctcgagctctctcgcgacagttgtcctcaggtgtctcggaaatccggcacacagccgatcgctggagagtctcactggatgtgaaccatttcgcgccagatgaactgaccgtgaaaacaaaggatggagtagtggagatcactggcaaacacgaagagcggcaagacgagcacggctatatttctagatgctttaccagaaaatataccctgcctcccggagtcgaccctacacaggtatccagttcgctctctcccgagggtacgttaacggttgaagctccaatgccaaaactcgctacccagagcaatgagatcacaattccagtgacctttgaatcacgggcccagcttggcggcccagaagcggctaagagtgacgagaccgccgctaagtag

SEQ ID NO: 118663 - DNA, 618 bp, Artificial Sequence
  derived and/or modified sequence
atgacggagagaagggtgccctttagcttacttcgaggcccatcctgggacccctttcgagactggtatccgcatagccggctgtttgatcaagcgtttggcctcccccgactccccgaagagtggtcacagtggctgggcggtagctcttggcccggatacgtccggcctctgcctccagcagcaattgaatcgcccgctgtggctgcacctgcttacagccgcgctttgagtcgacagttgagttccggggtctccgaaatcaggcatactgcggacaggtggcgcgtgagcctcgatgttaaccatttcgcccctgatgagctaactgtgaaaacgaaggacggtgtcgtcgaaataacaggaaaacatgaagagaggcaggatgaacacggctatatcagccgctgctttacgaggaaatacacactgcccccaggtgtggacccgactcaggtgtctagtagcctgtctccggaaggcacactcacagtcgaggctcctatgcctaagcttgccacgcagagcaatgaaataaccatccccgtcacgttcgaatcccgcgctcaactgggaggacctgaggctgccaaaagcgatgagacagccgctaaatag

SEQ ID NO: 118664 - DNA, 513 bp, Artificial Sequence
  derived and/or modified sequence
atgaccgaaaggcgcgttccattctcactcctgcgtgggccttcttggcccggttacgtccgacctctgcccccagccgcaatcgagtctccagccgtggccgctcctgcttattctcgggcactctcacggcaactgtcatccggcgtgagcgagatccgccacaccgcggataggtggagggtctccctggatgtcaatcatttcgcccctgacgagctaaccgtaaagacaaaagacggcgtcgtcgagattaccgggaagcatgaagagcggcaggacgagcatggatacatctcccgctgcttcacgcggaagtacactctgcctccaggcgtggacccgacgcaggttagcagttcccttagtcctgagggcaccttgacggttgaggccccaatgccaaaactggctacacagtctaacgaaattaccattcctgtcacttttgagagcagggcacagttaggcggtcccgaggctgctaagagcgacgagactgcagctaaatag

SEQ ID NO: 118665 - DNA, 914 bp, Artificial Sequence
  derived and/or modified sequence
gcatggggaggggcggccctcaaacgggtcattgccattaatagagacctcaaacaccgcctgctaaaaatacccgactggaggagcataaaagcgcagccgagcccagcgccccgcacttttctgagcagacgtccagagcagagtcagccagcatgaccgagcgccgcgtccccttctcgctcctgcggggccccagctgggaccccttccgcgactggtacccgcatagccgcctcttcgaccaggccttcgggctgccccggctgccggaggagtggtcgcagtggttaggcggcagcagctggccaggctacgtgcgccccctgccccccgccgccatcgagagccccgcagtggccgcgcccgcctacagccgcgcgctcagccggcaactcagcagcggggtctcggagatccggcacactgcggaccgctggcgcgtgtccctggatgtcaaccacttcgccccggacgagctgacggtcaagaccaaggatggcgtggtggagatcaccggcaagcacgaggagcggcaggacgagcatggctacatctcccggtgcttcacgcggaaatacacgctgccccccggtgtggaccccacccaagtttcctcctccctgtcccctgagggcacactgaccgtggaggcccccatgcccaagctagccacgcagtccaacgagatcaccatcccagtcaccttcgagtcgcgggcccagcttgggggcccagaagctgcaaaatccgatgagactgccgccaagtaaagccttagcccggatgcccacccctgctgccgccactggctgtgcctcccccgccacctgtgtgttcttttgatacatttatcttctgtttttctcaaataaagttcaaagcaaccacctgtcaaaaaaaaaaaaaaaaaa

SEQ ID NO: 118666 - protein, 182 aa, Artificial Sequence
  derived and/or modified sequence
MSGRSVPHAHPATAEYEFANPSRLGEQRFGEGLLPEEILTPTLYHGYYVRPRAAPAGEGSRAGASELRLSEGKFQAFLDVSHFTPDEVTVRTVDNLLEVSARHPQRLDRHGFVSREFCRTYVLPADVDPWRVRAALSHDGILNLEAPRGGRHLDTEVNEVYISLLPAPPDPEEEEEAAIVEP

SEQ ID NO: 118667 - DNA, 549 bp, Artificial Sequence
  derived and/or modified sequence
atgtctggtcgatccgtgccccacgcgcacccggctaccgcagaatatgaattcgcgaaccctagtaggctgggagagcagcgcttcggagagggcctgctgccagaagaaatcctgacgcccacgttgtaccacggatactatgtccgccctcgggcagcccctgctggagagggatctagagccggcgcttcagagttgcgcctctccgaggggaaattccaagcctttttagatgtcagtcactttacccccgacgaggtgaccgttcgcaccgtcgacaacctactggaggtgtccgcaagacatccccagagactagaccgacacggcttcgtgtctagagaattctgtagaacatacgtcctgcctgcggacgtagatccatggagagtgagggctgcattgagccacgacggtatcctcaacctcgaggcgccgcgcgggggcagacacctcgacacggaagtgaacgaggtatatatctctctgctgcccgctccgcctgacccggaggaggaggaagaagctgccatcgtggagccttag

SEQ ID NO: 118668 - DNA, 549 bp, Artificial Sequence
  derived and/or modified sequence
atgtcgggacgatccgttccacatgcccaccccgccaccgcggagtatgagttcgcaaacccgtcccggctgggagagcagcggttcggtgaagggctcctacctgaagaaattctgactccgaccctgtaccatggctattacgttagacccagggcagctcccgcgggagagggatcgcgggcaggggcctccgagctacggctgagcgagggcaaatttcaagcctttttggacgtgagccacttcacacccgatgaggtgacagtgcgaacagtagataatcttctggaagtgtccgctagacatccacagagacttgaccggcacggattcgtctcacgcgagttctgccgaacttacgttcttccagccgacgtcgatccttggcgcgtgagggctgctctctcacacgatggaatcctcaacctcgaagctccccgtggtggacggcacctggataccgaggtcaacgaggtatacatctctctgctgcccgcccctcccgatccggaggaagaagaggaggccgccatcgttgaaccttag

SEQ ID NO: 118669 - DNA, 549 bp, Artificial Sequence
  derived and/or modified sequence
atgagcggccgctctgtgccccacgcccacccagccacagcagaatatgaatttgccaaccccagccggctgggggagcagagatttggagagggcctgctgcctgaggagatcctgacccccaccctgtaccacggctactacgtgcggcccagggctgccccagctggggagggcagccgggccggggccagcgagctgcggctgtctgagggcaagttccaggccttcctggatgtgagccacttcaccccagatgaggtgacagtgaggacagtggacaacctgctggaggtgtctgcccggcacccccagaggctggacagacatggctttgtgtcccgggagttctgcaggacctacgtgctgcctgcagatgtggacccctggagggtgcgggccgccctgagccatgatggcatcctgaacctggaggccccccggggcggccgccacctggacacagaggtgaatgaggtgtacatcagcctgctgcctgcccccccagaccctgaggaggaggaggaggccgccatcgtggagccctag

SEQ ID NO: 118670 - DNA, 549 bp, Artificial Sequence
  derived and/or modified sequence
atgagcggccggagcgtgccccacgcccaccccgccaccgccgagtatgagtttgcaaacccgtcaagactcggtgagcagcgcttcggcgaaggtctcttgccagaagagattcttaccccaaccctgtatcatggttattacgttcgcccgcgggctgccccggccggcgagggctcacgtgccggcgcctccgagctccgtttgtctgaagggaagttccaggcattcttggatgtgtcccactttacaccagacgaggtgaccgtgcgaacagttgataacctgctggaagtctctgccaggcacccccaaaggctggataggcatgggttcgtgagtagagagttctgccggacctacgtgctgcctgccgatgtggacccctggcgggtgagagctgcgctcagccacgatgggatccttaacttagaagcccctcggggagggagacacctcgataccgaggtaaacgaggtgtatatctcattgctccctgcaccacccgatcccgaagaagaagaagaggccgctatagtggaaccctag

SEQ ID NO: 118671 - DNA, 549 bp, Artificial Sequence
  derived and/or modified sequence
atgagcggccggagcgtgccccacgcccaccccgccaccgccgagtatgaatttgcgaatccttctcgattaggggagcagcgcttcggcgaagggctgctgccagaggagatccttacacccacgctttaccatggctactacgtcaggccacgtgccgctcccgccggggagggtagccgtgccggagcctctgagctgaggctgtcagagggaaagttccaggctttcctggatgtgtcccactttacccccgatgaagttacagttagaaccgtggataatctgctggaagtgagcgcccggcatccccagaggctcgaccgccacggttttgtctcaagagaattttgcaggacttacgttctaccagccgacgtcgacccgtggcgggtgcgcgccgctctcagtcacgatggcattctgaacctggaggctccaagagggggacgtcatctcgacacagaggtgaatgaagtgtacatctcactgctacccgctcctcctgaccccgaagaggaagaggaagctgcaatcgtggagccttag

SEQ ID NO: 118672 - DNA, 549 bp, Artificial Sequence
  derived and/or modified sequence
atgtcaggtcgaagtgtgccacatgcccatcctgctacggccgagtacgagttcgccaacccttctagacttggggagcaacgtttcggcgaaggcctgctgcccgaagaaatcctcacacccacgctataccatggatactatgtcaggcccagggctgccccagcaggcgagggttcacgggctggggcaagcgagctccgtctgtcggagggaaaatttcaggcatttctggacgtcagtcactttacgcctgatgaagtgacagtgcgaacagtcgataacctcctggaggtgtccgctcgtcatcctcagagactggatagacacggctttgtgtctagggaattctgtcggacttatgtgctccccgctgacgttgacccctggcgcgtgcgggctgcactgagccacgatggtattctcaacctcgaagcccctcggggaggcaggcacctagatacagaggtgaacgaggtctatattagtctgttgccagctcccccagaccccgaagaggaggaagaggcagccattgtggaaccatag

SEQ ID NO: 118673 - DNA, 549 bp, Artificial Sequence
  derived and/or modified sequence
atgagtggcaggtcagtgcctcacgcacatcctgccacggccgaatacgagtttgctaacccttcgcgattaggggagcagcggttcggtgaaggattactgccagaggaaattcttactcccaccctttaccatgggtattatgtgcggcctcgagcagccccagcgggagaggggagccgcgctggagccagtgaacttcggctgtctgagggaaagttccaagccttcctagacgtgtcacatttcaccccagatgaagtgactgtgcggacagtagataaccttttggaggtttccgccagacatccgcaacggctcgaccgccacggattcgtcagtcgggagttctgtcgaacctatgtcctccccgcagatgtggacccatggagagtgcgggcagctctgtctcacgatggtattctcaacttagaggctccacgcggaggtcgccacctggataccgaagtgaatgaggtgtacatatcattattgcctgcccctcccgatcctgaggaagaggaggaagccgctatcgttgaaccttag

SEQ ID NO: 118674 - DNA, 892 bp, Artificial Sequence
  derived and/or modified sequence
cctatcgagccctggctctccgggcagctggaggggtcgcgctgcgcctgttggggctgcacctcggaccagggcttctgctgcatctgcagccatgtcgggccgctcagtgccacatgcccacccggccaccgccgagtacgaatttgccaacccgagccgcctgggtgagcagcgcttcggagaaggcctcctgccagaagagatcctgacccccacactctaccatggctactatgtccggcctcgggccgccccagctggggagggcagcagggcaggggcctccgagcttaggctcagtgagggcaagttccaggcatttctggatgtgagccactttaccccagacgaggtgactgtgaggactgtggataacctgctggaggtgtctgcccggcacccccagcgcctggaccgccacggcttcgtgtcccgagagttctgccgcacctatgtcctgcctgctgatgtcgacccctggcgagtccgagctgctctctcccatgatggcatcttaaacctggaagcacctcggggtggccgacatttggacacagaggtcaatgaggtctacatctccctgctccctgcgcctcctgatccagaggaagaggaggaggcagccatagttgagccctgattgccacagacccagcacccagcaaatccctctctacctcccaaggtgatatgggcagctgcccaccactccagaggtttctttttattgaagcttgaagctcaagttcatggcttcatcaaaagacgcttcaaatcctgaagttgagatagctctcacctggagcccgtgtgttgttctaccctttggctgggaacacagtcacctgggaatcattccagcaggtggcttcaaaagtccaacctgcta

SEQ ID NO: 118675 - DNA, 1335 bp, Artificial Sequence
  derived and/or modified sequence
tgatggtcaacatgtcagcaccagccatctgcctcgtgccctgggttgacctgggtttaggagaggatcccacatctgggcagaaagaccccaccccctgaaaaaagagcaaacagatttcttgcatctttcgttctatgtggctctcagaacattaaatccaggagtgctttaggaattgggtgcacagtgcctgccaccgaagaggagaaaatgaggtgtggaaacgtgcaaaccgtttgtgagggtctcagcgaggcctcttcatgccccaggcaccaccagctccccctccccagctcgttcccagccaggaccctcagctgtcctctcaggccccctgcgacagctgaagagtgtgcgggggaggggactaggggtccgggcggcgctggtcacaccctcgttgctctcactcagggcccccactcccagcccctccccccccaagaggctcggcactattttgggtggtgtcgaccccgcccccacctcctatcgagccctggctctccgggcagctggaggggtcgcgctgcgcctgttggggctgcacctcggaccagggcttctgctgcatctgcagccatgtcgggccgctcagtgccacatgcccacccggccaccgccgagtacgaatttgccaacccgagccgcctgggtgagcagcgcttcggagaaggcctcctgccagaagagatcctgacccccacactctaccatggctactatgtccggcctcgggccgccccagctggggagggcagcagggcaggggcctccgagcttaggctcagtgagggcaagttccaggcatttctggatgtgagccactttaccccagacgaggtgactgtgaggactgtggataacctgctggaggtgtctgcccggcacccccagcgcctggaccgccacggcttcgtgtcccgagagttctgccgcacctatgtcctgcctgctgatgtcgacccctggcgagtccgagctgctctctcccatgatggcatcttaaacctggaagcacctcggggtggccgacatttggacacagaggtcaatgaggtctacatctccctgctccctgcgcctcctgatccagaggaagaggaggaggcagccatagttgagccctgattgccacagacccagcacccagcaaatccctctctacctcccaaggtgatatgggcagctgcccaccactccagaggtagcagcatccttgggggaagggaaaggtgcatggtccacaatgtatggtttggtcccatgggacatgtcatagccttggtttagttttgggtggagctgaataaacccaaatctcagggc

SEQ ID NO: 118676 - DNA, 549 bp, Artificial Sequence
  derived and/or modified sequence
atgagcggcagaagcgtgccccacgcccaccccgccaccgccgagtacgagttcgccaaccccagcagactgggcgagcagagattcggcgagggcctgctgcccgaggagatcctgacccccaccctgtaccacggctactacgtgagacccagagccgcccccgccggcgagggcagcagagccggcgccagcgagctgagactgagcgagggcaagttccaggccttcctggacgtgagccacttcacccccgacgaggtgaccgtgagaaccgtggacaacctgctggaggtgagcgccagacacccccagagactggacagacacggcttcgtgagcagagagttctgcagaacctacgtgctgcccgccgacgtggacccctggagagtgagagccgccctgagccacgacggcatcctgaacctggaggcccccagaggcggcagacacctggacaccgaggtgaacgaggtgtacatcagcctgctgcccgccccccccgaccccgaggaggaggaggaggccgccatcgtggagccctag

SEQ ID NO: 118677 - DNA, 549 bp, Artificial Sequence
  derived and/or modified sequence
atgtctggacggagcgtgcctcacgctcaccctgcaacagccgagtatgaatttgcgaatccttcccgcctgggggaacagcgtttcggagaaggtttgcttcctgaggagatcctcacccccacgctgtatcatgggtactacgtgcggcctagggccgctcccgctggggaaggaagtcgcgccggcgcgtccgagttaagactgtcagaggggaagttccaggctttcctggacgtctctcattttacaccagacgaggtgacagtgaggacagtggataatctgctcgaagtgtctgcacggcacccccagcgtctggatcggcacggcttcgtgagccgcgaattctgccgtacatatgttctgccagcagacgtcgatccctggcgtgtccgggcagctctgagccacgatgggatcctcaatctcgaggcacctagaggtggcaggcacctggatacagaggtgaacgaggtatatatatccctcctgcccgccccacccgacccggaggaagaggaagaggcagccatagtggagccttag

SEQ ID NO: 118678 - DNA, 549 bp, Artificial Sequence
  derived and/or modified sequence
atgagcggccggagcgtgccccacgcccaccccgccaccgccgagtatgaatttgcaaatccttccaggctgggggagcaacggttcggcgaggggctgctgccagaggaaatcctgacccccacactgtaccatggctattatgtgcggccaagagccgccccagctggagaggggagtcgcgcaggagcctctgaactcagattgagtgaagggaaatttcaagcttttctcgacgtctctcatttcacgcccgacgaggtcactgtaagaaccgtggacaatctgctggaggtgagcgctcgacacccccagcgactggaccgccacgggttcgtctctagagaattctgcagaacgtatgtacttcccgccgacgtagatccttggagagtccgagcagctctgtcacatgatggaattctgaacttagaagccccaagaggtgggcgacacctcgacacagaagtgaacgaggtgtacattagcttgttacctgcccctccagacccagaggaagaggaggaagccgccattgtcgagccctag

SEQ ID NO: 118679 - DNA, 549 bp, Artificial Sequence
  derived and/or modified sequence
atgtccggtaggagcgtgccccatgcgcatccagccaccgccgagtatgagttcgcaaatccttcacgcctaggtgagcaaagattcggtgaggggctcctcccagaggagattctaactcccactctctatcacgggtactatgtgcgaccacgagccgcaccagccggtgaaggttccagggcgggtgcatctgagcttcgtctttcggagggcaagttccaggcctttcttgatgtgagccattttacgcctgacgaagtcacagttagaactgtggacaatctattggaggtgtcagccagacatcctcagcgcctggaccgacatggcttcgtctccagagagttctgccgcacatacgtcctgcctgccgacgtcgacccatggcgggtccgcgcagcactgtcacacgacggtattttaaacctggaagcacccaggggaggcaggcaccttgacacagaggtgaatgaagtctacatctcactgctgcctgccccaccagatcctgaggaagaagaggaggcagccatcgtagaaccttag

SEQ ID NO: 118680 - protein, 271 aa, Artificial Sequence
  derived and/or modified sequence
MGSLFPLSLLFFLAAAYPGVGSALGRRTKRAQSPKGSPLAPSGTSVPFWVRMSPEFVAVQPGKSVQLNCSNSCPQPQNSSLRTPLRQGKTLRGPGWVSYQLLDVRAWSSLAHCLVTCAGKTRWATSRITAYKPPHSVILEPPVLKGRKYTLRCHVTQVFPVGYLVVTLRHGSRVIYSESLERFTGLDLANVTLTYEFAAGPRDFWQPVICHARLNLDGLVVRNSSAPITLMLAWSPAPTALASGSIAALVGILLTVGAAYLCKCLAMKSQA

SEQ ID NO: 118681 - DNA, 816 bp, Artificial Sequence
  derived and/or modified sequence
atggggtccctgtttcctctgtcattactgttttttcttgcagccgcttaccctggcgtgggatcagccctcggaaggcgaactaagcgggcgcaaagtcccaagggctcccctctcgctccatctggcacatctgtgcccttttgggtgcgcatgagcccggagttcgtggccgtacaacccggaaagtccgtacaactgaactgttctaacagttgcccacagccgcagaactccagcctgcgcactcccctccggcagggcaagaccttgcgagggcccggttgggtgtcttatcagctgctggatgttcgcgcctggtctagcttggctcactgcctggtgacctgcgcaggcaagacccggtgggcaaccagtcgcatcaccgcctacaaaccccctcattccgtgatcctcgagcctcctgtgttgaaggggcgaaaatacacactcaggtgccacgtcactcaagtgttccctgttgggtacctggttgtaaccctgcgacacgggtctcgggttatctattccgaaagcctggagagatttacagggctggatcttgctaacgtcaccctgacatacgagttcgcagcaggccctcgcgacttctggcagccagtgatttgccacgccaggctaaacctggatgggctcgtggtccgtaattcctccgcgcccattacactgatgctcgcatggagccctgcgcccacagctttagccagcggttctattgccgcactcgttggcatactgctgactgttggcgccgcctacctatgcaaatgcctcgcaatgaagagccaggcctag

SEQ ID NO: 118682 - DNA, 1273 bp, Artificial Sequence
  derived and/or modified sequence
gctctctggcgcggggccccttagtccgggctttttgccatggggtctctgttccctctgtcgctgctgttttttttggcggccgcctacccgggagttgggagcgcgctgggacgccggactaagcgggcgcaaagccccaagggtagccctctcgcgccctccgggacctcagtgcccttctgggtgcgcatgagcccggagttcgtggctgtgcagccggggaagtcagtgcagctcaattgcagcaacagctgtccccagccgcagaattccagcctccgcaccccgctgcggcaaggcaagacgctcagagggccgggttgggtgtcttaccagctgctcgacgtgagggcctggagctccctcgcgcactgcctcgtgacctgcgcaggaaaaacacgctgggccacctccaggatcaccgcctacaaaccgccccacagcgtgattttggagcctccggtcttaaagggcaggaaatacactttgcgctgccacgtgacgcaggtgttcccggtgggctacttggtggtgaccctgaggcatggaagccgggtcatctattccgaaagcctggagcgcttcaccggcctggatctggccaacgtgaccttgacctacgagtttgctgctggaccccgcgacttctggcagcccgtgatctgccacgcgcgcctcaatctcgacggcctggtggtccgcaacagctcggcacccattacactgatgctcgcttggagccccgcgcccacagctttggcctccggttccatcgctgcccttgtagggatcctcctcactgtgggcgctgcgtacctatgcaagtgcctagctatgaagtcccaggcgtaaagggggatgttctatgccggctgagcgagaaaaagaggaatatgaaacaatctggggaaatggccatacatggtggctgacgcctgtaatcccagcactttgggaggccgaggcaggagaatcgcttgagcccaggagttcgagaccagcctggacaacatagtgagaccccgtctatgcaaaaaatacacaaattagcctggtgtggtggcccgcacctgtggtcccagctacccgggaggctgagttgggaggatcctttgagccctgaaagtcgaggttgcagtgagccttgatcgtgccactgcactccagcctgggggacagagcacgaccctgtctccaaaaataaaataaaaataaaaataaatattggcgggggaaccctctggaatcaataaaggcttccttaaccagc

SEQ ID NO: 118683 - DNA, 1420 bp, Artificial Sequence
  derived and/or modified sequence
gctctctggcgcggggccccttagtccgggctttttgccatggggtctctgttccctctgtcgctgctgttttttttggcggccgcctacccgggagttgggagcgcgctgggacgccggactaagcgggcgcaaagccccaagggtagccctctcgcgccctccgggacctcagtgcccttctgggtgcgcatgagcccggagttcgtggctgtgcagccggggaagtcagtgcagctcaattgcagcaacagctgtccccagccgcagaattccagcctccgcaccccgctgcggcaaggcaagacgctcagagggccgggttgggtgtcttaccagctgctcgacgtgagggcctggagctccctcgcgcactgcctcgtgacctgcgcaggaaaaacacgctgggccacctccaggatcaccgcctacaaaccgccccacagcgtgattttggagcctccggtcttaaagggcaggaaatacactttgcgctgccacgtgacgcaggtgttcccggtgggctacttggtggtgaccctgaggcatggaagccgggtcatctattccgaaagcctggagcgcttcaccggcctggatctggccaacgtgaccttgacctacgagtttgctgctggaccccgcgacttctggcagcccgtgatctgccacgcgcgcctcaatctcgacggcctggtggtccgcaacagctcggcacccattacactgatgctcggtgaggcacccctgtaaccctggggactaggaggaagggggcagagagagttatgaccccgagagggcgcacagaccaagcgtgagctccacgcgggtcgacagacctccctgtgttccgttcctaattctcgccttctgctcccagcttggagccccgcgcccacagctttggcctccggttccatcgctgcccttgtagggatcctcctcactgtgggcgctgcgtacctatgcaagtgcctagctatgaagtcccaggcgtaaagggggatgttctatgccggctgagcgagaaaaagaggaatatgaaacaatctggggaaatggccatacatggtggctgacgcctgtaatcccagcactttgggaggccgaggcaggagaatcgcttgagcccaggagttcgagaccagcctggacaacatagtgagaccccgtctatgcaaaaaatacacaaattagcctggtgtggtggcccgcacctgtggtcccagctacccgggaggctgagttgggaggatcctttgagccctgaaagtcgaggttgcagtgagccttgatcgtgccactgcactccagcctgggggacagagcacgaccctgtctccaaaaataaaataaaaataaaaataaatattggcgggggaaccctctggaatcaataaaggcttccttaaccagc

SEQ ID NO: 118684 - DNA, 816 bp, Artificial Sequence
  derived and/or modified sequence
atgggcagcctcttccccctgagcctgctcttcttcctggccgccgcctacccaggagtgggcagcgccctgggccgccgcaccaagagggcccagagccccaagggcagccccctggcccccagcggcacctctgtgcccttctgggtgaggatgagccctgagtttgtggccgtgcagcccgggaagtctgtgcagctgaactgcagcaacagctgcccccagccccagaacagcagcctgcggacccccctgcggcagggcaagaccctgcggggccctggctgggtgtcctaccagctgctggatgtgcgggcctggagcagcctggcccactgcctggtgacctgtgccggcaagacccgctgggccaccagccgcatcacagcctacaagccaccccacagcgtcatcctggagccccctgtgctgaagggcaggaagtacaccctgcgctgccacgtgacccaggtgtttcctgtgggctacctggtggtgaccctgcggcacggcagcagggtcatctacagcgagagcctggagcgcttcaccggcctggacctggccaacgtgaccctgacctatgaatttgctgctggcccccgggacttctggcagcctgtgatctgccacgcccggctgaacctggatggcctggtggtgaggaacagcagcgcccccatcaccctgatgctggcctggagccctgcccccacagccctggccagcggcagcattgctgccctggtgggcatcctgctgactgtgggcgccgcctacctgtgcaagtgcctggccatgaagagccaggcctag

SEQ ID NO: 118685 - DNA, 816 bp, Artificial Sequence
  derived and/or modified sequence
atgggcagcctgttccccctgagcctgctgttcttcctggccgccgcctatcccggggtgggctctgccctggggaggcgcactaaacgggcccagtctccgaagggatcccccctagcgccctctggaacttccgtgcccttttgggtgcgcatgtcccccgaattcgttgcagtccagcccggaaaatccgttcagctcaattgttccaatagttgtccccaaccacagaacagttctctgaggacgccgctgcggcagggaaaaacattgcgcgggccgggatgggtgtcctaccagctgctggacgtgcgggcctggagcagcctcgcacattgcctggtgacatgcgcaggtaagacccggtgggctacaagtagaattactgcttacaaacccccacactctgtgatactggagcctccagtgctgaaaggccgaaagtataccttaaggtgtcacgtgactcaggttttcccagtgggctacttagtagtgacacttagacacggcagtagagtcatttattccgaaagcttagagcgctttactgggttagatctcgccaacgtcacacttacatacgagttcgctgcgggtcctagggacttctggcaacctgtcatctgccacgctcggctgaatctggacggattagtggttcggaattcctcggccccgattacactaatgctggcgtggtcccccgcgcccaccgcgcttgcttccggatcaattgcagccttagttgggatcctcctgacagtcggagcggcatatctctgtaaatgcctcgcaatgaaaagtcaggcgtag

SEQ ID NO: 118686 - DNA, 816 bp, Artificial Sequence
  derived and/or modified sequence
atggggtcccttttccctctcagcctgctattttttttagcagcagcgtacccaggggttgggagtgcactgggtaggcggaccaagcgggcacagtcgcctaaggggtctccattggccccttcaggtaccagtgtgccattctgggtcagaatgtcgccggaatttgtagccgtgcaacccggtaagtccgtgcagctgaattgtagtaatagctgtccccagccccaaaactcgtctcttcggactccactcaggcaaggcaaaacgttgaggggtccgggatgggttagttatcagctgctagacgtcagggcctggagcagcttggcacattgtcttgtgacgtgtgctgggaagacacgatgggctaccagtaggattaccgcctacaagccaccccacagcgtgatccttgagccccctgtcctgaagggacggaagtatacgcttagatgtcacgttacccaggtctttcctgtgggttacctcgtggtaaccctgcgccacgggtcccgcgttatctacagcgagagcctcgagaggtttaccggtttggatctggccaatgtgacgctgacttatgagttcgctgcaggccctcgcgacttttggcagccggtcatctgccatgccaggctgaacctggacggcctggtcgtgaggaattctagcgcgcctattaccttaatgctggcctggtccccagccccaacggcactggcgagcgggtccatcgcagccctggttggcatcctcctcacagtgggagctgcgtacctgtgtaagtgtttggctatgaagtcccaggcttag

SEQ ID NO: 118687 - DNA, 816 bp, Artificial Sequence
  derived and/or modified sequence
atgggcagcctgttccccctgagcctgctgttcttcctggccgccgcctaccccggcgtgggcagcgccctgggcagaagaaccaagagagcccagagccccaagggcagccccctggcccccagcggcaccagcgtgcccttctgggtgagaatgagccccgagttcgtggccgtgcagcccggcaagagcgtgcagctgaactgcagcaacagctgcccccagccccagaacagcagcctgagaacccccctgagacagggcaagaccctgagaggccccggctgggtgagctaccagctgctggacgtgagagcctggagcagcctggcccactgcctggtgacctgcgccggcaagaccagatgggccaccagcagaatcaccgcctacaagcccccccacagcgtgatcctggagccccccgtgctgaagggcagaaagtacaccctgagatgccacgtgacccaggtgttccccgtgggctacctggtggtgaccctgagacacggcagcagagtgatctacagcgagagcctggagagattcaccggcctggacctggccaacgtgaccctgacctacgagttcgccgccggccccagagacttctggcagcccgtgatctgccacgccagactgaacctggacggcctggtggtgagaaacagcagcgcccccatcaccctgatgctggcctggagccccgcccccaccgccctggccagcggcagcatcgccgccctggtgggcatcctgctgaccgtgggcgccgcctacctgtgcaagtgcctggccatgaagagccaggcctag

SEQ ID NO: 118688 - protein, 161 aa, Artificial Sequence
  derived and/or modified sequence
MKAVSPVRPSGRKAPSGCGGGELALRCLAEHGHSLGGSAAAAAAAAAARCKAAEAAADEPALCLQCDMNDCYSRLRRLVPTIPPNKKVSKVEILQHVIDYILDLQLALETHPALLRQPPPPAPPHHPAGTCPAAPPRTPLTALNTDPAGAVNKQGDSILCR

SEQ ID NO: 118689 - DNA, 2389 bp, Artificial Sequence
  derived and/or modified sequence
aggcgcggttgtgagtagtaccgggagtggggtgatcccgggctaggggagcgcggcggccgcgatcgggcttagtcggagctccgaagggagtgactaggacacccgggtgggctacttttcttccggtgcttttgctttttttttcctttgggctcgggctgagtgtcgcccactgagcaaagattccctcgtaaaacccagagcgaccctcccgtcaattgttgggctcgggagtgtcgcggtgccccgagcgcgccgggcgcggaggcaaagggagcggagccggccgcggacggggcccggagcttgcctgcctccctcgctcgccccagcgggttcgctcgcgtagagcgcagggcgcgcgcgatgaaggcggtgagcccggtgcgcccctcgggccgcaaggcgccgtcgggctgcggcggcggggagctggcgctgcgctgcctggccgagcacggccacagcctgggtggctccgcagccgcggcggcggcggcggcggcagcgcgctgtaaggcggccgaggcggcggccgacgagccggcgctgtgcctgcagtgcgatatgaacgactgctatagccgcctgcggaggctggtgcccaccatcccgcccaacaagaaagtcagcaaagtggagatcctgcagcacgttatcgactacatcctggacctgcagctggcgctggagacgcacccggccctgctgaggcagccaccaccgcccgcgccgccacaccacccggccgggacctgtccagccgcgccgccgcggaccccgctcactgcgctcaacaccgacccggccggcgcggtgaacaagcagggcgacagcattctgtgccgctgagccgcgctgtccaggtgtgcggccgcctgagcccgagccaggagcactagagagggagggggaagagcagaagttagagaaaaaaagccaccggaggaaaggaaaaaacatcggccaacctagaaacgttttcattcgtcattccaagagagagagaggaaagaaaaatacaactttcattctttctttgcacgttcataaacattctacatacgtattctcttttgtctcttcatttataactgctgtgaattgtacatttctgtgttttttggaggtgcagttaaacttttaagcttaagtgtgacaggactgataaatagaagatcaagagtagatccgactttagaagcctactttgtgaccaaggagctcaatttttgttttgaagctttactaatctaccagagcattgtagatattttttttttacatctattgtttaaaatagatgattataacggggcagagaactttcttttctctgcaagaatgttacatattgtatagataaatgagtgacatttcataccatgtatatatagagatgttctataagtgtgagaaagtatatgctttaatagatactgtaattataagatatttttaattaaatatttttttgtaaatattatgtgtgtgtttttttttaatctatgggaatatttcttttggaaaatcatttttcagctcaattacagagctcttgatatcttgaatgtcttttctgtttggcctggctcttaatttgcttttgttttgcccagtatagactcggaagtaacagttatagctagtggtcttgcatgattgcatgagatgtttaatcacaaattaaacttgttctgagtccattcaaatgtgtttttttaaatgtagattgaaatctttgtatttgaagcatacatgttgaaaatacaccttatcagtttttaagtacagggttttatagtgtaatatatacagagtaagtgtttgtttttgtttttcaactgaggtcaaaatggattctgaatgattttgcatatgggatgaggaaatgcttggatccttaaggagtttacgaaatctgctgttttatcaaagtgaaaaaaaattgcttattactcttcattttacactaaagcttaatgtcactaagtttcatgtctgtacagattatttaaatcatggaaatgaaaaaaatgttctctgcttgctaccaaaggacaaactcttggaaatgaacactttctgctttccttcctccaaagaattaataggcaacagtgggagaaaaaaaaggcataatggcaaatccttcaagcagggataaaagtcgatcttcaaacattaacttaagcagaccaaaaattctgatgaccgcatctagattatttttttataaaaatgattttcactatagctatgttacgctaagctactgtcccatctcttgtgatgtgtaacttttacatgtgaatattaaagtagatttctctgtcttgtaaaaaaaaaaaaaaaaaaaaaaaaaaaaaaaaaaaaaaaaaaaaaa

SEQ ID NO: 118690 - DNA, 486 bp, Artificial Sequence
  derived and/or modified sequence
atgaaggccgttagcccggtgagaccttcaggacgcaaggctccgagcgggtgcggagggggggagctcgccctgagatgcctggccgagcatggtcactctttaggaggatctgctgccgccgcggccgccgccgcggccgctcggtgcaaggccgccgaggcggctgctgacgagccggccctgtgcctccagtgtgacatgaacgactgttacagccgcctgcgacggttggtccccaccatccccccaaacaaaaaggtatcaaaggtggagatcctacagcatgttatagattacattctggacctacagctggcgctcgagacccaccccgctcttctccgccagcctccaccacccgcccctccccaccatcctgcagggacctgccccgcggcaccacctagaaccccactgaccgctcttaacacggaccctgctggcgccgtgaacaagcaaggtgacagcattctgtgtcggtag

SEQ ID NO: 118691 - DNA, 2344 bp, Artificial Sequence
  derived and/or modified sequence
aggcgcggttgtgagtagtaccgggagtggggtgatcccgggctaggggagcgcggcggccgcgatcgggcttagtcggagctccgaagggagtgactaggacacccgggtgggctacttttcttccggtgcttttgctttttttttcctttgggctcgggctgagtgtcgcccactgagcaaagattccctcgtaaaacccagagcgaccctcccgtcaattgttgggctcgggagtgtcgcggtgccccgagcgcgccgggcgcggaggcaaagggagcggagccggccgcggacggggcccggagcttgcctgcctccctcgctcgccccagcgggttcgctcgcgtagagcgcagggcgcgcgcgatgaaggcggtgagcccggtgcgcccctcgggccgcaaggcgccgtcgggctgcggcggcggggagctggcgctgcgctgcctggccgagcacggccacagcctgggtggctccgcagccgcggcggcggcggcggcggcagcgcgctgtaaggcggccgaggcggcggccgacgagccggcgctgtgcctgcagtgcgatatgaacgactgctatagccgcctgcggaggctggtgcccaccatcccgcccaacaagaaagtcagcaaagtggagatcctgcagcacgttatcgactacatcctggacctgcagctggcgctggagacgcacccggccctgctgaggcagccaccaccgcccgcgccgccacaccacccggccgggacctgtccagccgcgccgccgcggaccccgctcactgcgctcaacaccgacccggccggcgcggtgaacaagcagggcgacagcattctgtgccgctgagccgcgctgtccaggtgtgcggccgcctgagcccgagccaggagcactagagagggagggggaagagcagaagttagagaaaaaaagccaccggaggaaaggaaaaaacatcggccaacctagaaacgttttcattcgtcattccaagagagagagaggaaagaaaaatacaactttcattctttctttgcacgttcataaacattctacatacgtattctcttttgtctcttcatttataactgctgtgaattgtacatttctgtgttttttggaggtgcagttaaacttttaagcttaagtgtgacaggactgataaatagaagatcaagagtagatccgactttagaagcctactttgtgaccaaggagctcaatttttgttttgaagctttactaatctaccagagcattgtagatattttttttttacatctattgtttaaaatagatgattataacggggcagagaactttcttttctctgcaagaatgttacatattgtatagataaatgagtgacatttcataccatgtatatatagagatgttctataagtgtgagaaagtatatgctttaatagatactgtaattataagatatttttaattaaatatttttttgtaaatattatgtgtgtgtttttttttaatctatgggaatatttcttttggaaaatcatttttcagctcaattacagagctcttgatatcttgaatgtcttttctgtttggcctggctcttaatttgcttttgttttgcccagtatagactcggaagtaacagttatagctagtggtcttgcatgattgcatgagatgtttaatcacaaattaaacttgttctgagtccattcaaatgtgtttttttaaatgtagattgaaatctttgtatttgaagcatacatgttgaaaatacaccttatcagtttttaagtacagggttttatagtgtaatatatacagagtaagtgtttgtttttgtttttcaactgaggtcaaaatggattctgaatgattttgcatatgggatgaggaaatgcttggatccttaaggagtttacgaaatctgctgttttatcaaagtgaaaaaaaattgcttattactcttcattttacactaaagcttaatgtcactaagtttcatgtctgtacagattatttaaatcatggaaatgaaaaaaatgttctctgcttgctaccaaaggacaaactcttggaaatgaacactttctgctttccttcctccaaagaattaataggcaacagtgggagaaaaaaaaggcataatggcaaatccttcaagcagggataaaagtcgatcttcaaacattaacttaagcagaccaaaaattctgatgaccgcatctagattatttttttataaaaatgattttcactatagctatgttacgctaagctactgtccaatctcttgtgatgtgtaacttttacatgtgaatattaaagtagatttctctgtcttgta

SEQ ID NO: 118692 - DNA, 486 bp, Artificial Sequence
  derived and/or modified sequence
atgaaggctgtgtcccctgtgcggcccagcggcaggaaggcccccagcggctgcggcggcggggagctggccctgcgctgcctggccgagcacggccacagcctgggcggcagcgctgctgctgctgctgctgctgctgctgcccgctgcaaggctgctgaggccgctgctgatgagcccgccctgtgcctgcagtgtgacatgaatgactgctacagccggctgcggcggctggtgcccaccatcccccccaacaagaaggtgtccaaggtggagatcctgcagcacgtgattgactacatcctggacctgcagctggccctggagacccacccagccctgctgcggcagcccccacctccagccccaccccaccaccctgctggcacctgcccagctgccccacccaggacccccctgacagccctgaacacagatcctgctggagctgtgaacaagcagggcgacagcatcctgtgcaggtag

SEQ ID NO: 118693 - DNA, 486 bp, Artificial Sequence
  derived and/or modified sequence
atgaaggccgtgagccccgtgcggcccagcggccggaaggcccccagcggctgcggaggcggggagctcgctttaagatgtctagctgaacacggacatagcctggggggctccgccgcagcagccgccgccgcggccgcagcgagatgtaaggccgccgaggccgcagctgacgagccagctctttgtctccagtgcgacatgaacgattgctacagccgactgcgtaggctcgtacctactattcctcctaataaaaaggtcagcaaggtggagatcctccagcacgtgatcgattatattttggatcttcaattggcgcttgagacccaccccgcgctgctgagacagcctcccccccctgctccgcctcaccacccggcaggaacttgccccgccgcaccacctcgaacacccctcacagcgctgaacacagatccggccggggctgttaacaaacagggcgactcaattctttgcagatag

SEQ ID NO: 118694 - DNA, 486 bp, Artificial Sequence
  derived and/or modified sequence
atgaaagcagtaagcccagtcaggccatccggaaggaaagctccgtctggctgcggtggcggagaactggccctgcggtgtctagcagaacacggtcacagccttggcggttcggccgcagccgcagccgctgccgcagccgctcgctgtaaggcagccgaggctgctgccgatgagcctgccctgtgtctccaatgtgacatgaacgactgttatagcaggctgagacgcctcgtgccaaccattcccccaaataagaaggtctccaaagtggaaatcttacagcatgtcatcgactacatcctggatctgcaactggctcttgaaacccacccagccctcctccggcagcccccacccccagcccctcctcatcacccggcaggaacctgtcctgcggcacctccacggacccccctgacagccttgaacactgatcccgctggggcagttaacaaacagggagattccattctctgcaggtag

SEQ ID NO: 118695 - DNA, 486 bp, Artificial Sequence
  derived and/or modified sequence
atgaaggccgtgagccccgtgagacccagcggcagaaaggcccccagcggctgcggcggcggcgagctggccctgagatgcctggccgagcacggccacagcctgggcggcagcgccgccgccgccgccgccgccgccgccgccagatgcaaggccgccgaggccgccgccgacgagcccgccctgtgcctgcagtgcgacatgaacgactgctacagcagactgagaagactggtgcccaccatcccccccaacaagaaggtgagcaaggtggagatcctgcagcacgtgatcgactacatcctggacctgcagctggccctggagacccaccccgccctgctgagacagccccccccccccgcccccccccaccaccccgccggcacctgccccgccgccccccccagaacccccctgaccgccctgaacaccgaccccgccggcgccgtgaacaagcagggcgacagcatcctgtgcagatag

SEQ ID NO: 118696 - protein, 472 aa, Artificial Sequence
  derived and/or modified sequence
MSENNKNSLESSLRQLKCHFTWNLMEGENSLDDFEDKVFYRTEFQNREFKATMCNLLAYLKHLKGQNEAALECLRKAEELIQQEHADQAEIRSLVTWGNYAWVYYHMGRLSDVQIYVDKVKHVCEKFSSPYRIESPELDCEEGWTRLKCGGNQNERAKVCFEKALEKKPKNPEFTSGLAIASYRLDNWPPSQNAIDPLRQAIRLNPDNQYLKVLLALKLHKMREEGEEEGEGEKLVEEALEKAPGVTDVLRSAAKFYRRKDEPDKAIELLKKALEYIPNNAYLHCQIGCCYRAKVFQVMNLRENGMYGKRKLLELIGHAVAHLKKADEANDNLFRVCSILASLHALADQYEDAEYYFQKEFSKELTPVAKQLLHLRYGNFQLYQMKCEDKAIHHFIEGVKINQKSREKEKMKDKLQKIAKMRLSKNGADSEALHVLAFLQELNEKMQQADEDSERGLESGSLIPSASSWNGE

SEQ ID NO: 118697 - DNA, 1419 bp, Artificial Sequence
  derived and/or modified sequence
atgtctgagaacaacaaaaatagcttagaatcgagtctgcggcagctgaaatgccatttcacatggaaccttatggaaggagagaactcactcgacgatttcgaggacaaagtgttctacagaacggaatttcagaaccgggaattcaaagctacaatgtgcaaccttttggcttatctgaaacacttaaagggccagaacgaggctgcgctggagtgcctgagaaaagccgaagagttgatccaacaggaacacgctgatcaggccgagatcaggtctctcgtgacttggggtaactatgcctgggtgtattaccatatggggcgtctttctgatgtgcagatctatgtggacaaagtgaagcatgtctgtgaaaagttctctagcccctacaggatagagagtcccgaactcgattgcgaggaaggctggacccggctgaagtgcggcgggaatcaaaatgaacgggctaaagtatgctttgagaaggccctggagaaaaagcccaaaaaccccgagttcacttcagggctcgctatcgcaagttatcgcttagacaattggccaccgtcccaaaatgcgattgaccccctgagacaagcgattcgccttaaccctgataatcagtatctgaaagtgcttttggccttgaagcttcacaagatgagagaggaaggagaagaggagggggagggagagaagttagtggaggaggctttggagaaagccccgggcgtgactgacgtattgaggtctgccgctaaattctacaggagaaaggacgagcccgataaagctatcgaacttttaaagaaagctctagagtatatccccaacaatgcttatttacattgtcagattggatgctgctaccgcgctaaagttttccaggtgatgaaccttagggagaatggcatgtacgggaaaagaaagctgctggagctgatcggacacgccgtagctcacttaaaaaaggccgacgaagccaatgataatctgttccgggtatgctccattctggcttcactccacgctttagctgatcagtatgaggatgcggagtattacttccagaaagagttcagcaaggaacttacccctgtcgccaagcaacttttacatttgcgctatgggaattttcagctgtatcagatgaagtgcgaggataaagcaatccaccattttatcgaaggggttaaaatcaaccagaaaagccgggagaaggaaaaaatgaaagacaaactccagaaaattgcgaaaatgcgactgtcaaagaacggcgctgactcagaggccctccatgtgcttgcctttcttcaggagctgaacgagaagatgcaacaggccgacgaggactccgagcgcggtctggagagcgggagcctcattccctccgcctcatcctggaatggggagtag

SEQ ID NO: 118698 - DNA, 3489 bp, Artificial Sequence
  derived and/or modified sequence
actttcccttttgtaacgtcagctgaagggaaacaaacaaaaaggaaccagaggccacttgtatatataggtctcttcagcatttattggtggcagaagaggaagatttctgaagagtgcagctgcctgaaccgagccctgccgaacagctgagaattgcactgcaaccatgagtgagaacaataagaattccttggagagcagcctacggcaactaaaatgccatttcacctggaacttgatggagggagaaaactccttggatgattttgaagacaaagtattttaccggactgagtttcagaatcgtgaattcaaagccacaatgtgcaacctactggcctatctaaagcacctcaaagggcaaaacgaggcagccctggaatgcttacgtaaagctgaagagttaatccagcaagagcatgctgaccaggcagaaatcagaagtctggtcacctggggaaactatgcctgggtctactatcacatgggccgactctcagacgttcagatttatgtagacaaggtgaaacatgtctgtgagaagttttccagtccctatagaattgagagtccagagcttgactgtgaggaagggtggacacggttaaagtgtggaggaaaccaaaatgaaagagcgaaggtgtgctttgagaaggctctggaaaagaagccaaagaacccagaattcacctctggactggcaatagcaagctaccgtctggacaactggccaccatctcagaacgccattgaccctctgaggcaagccattcggctgaatcctgacaaccagtaccttaaagtcctcctggctctgaagcttcataagatgcgtgaagaaggtgaagaggaaggtgaaggagagaagttagttgaagaagccttggagaaagccccaggtgtaacagatgttcttcgcagtgcagccaagttttatcgaagaaaagatgagccagacaaagcgattgaactgcttaaaaaggctttagaatacataccaaacaatgcctacctgcattgccaaattgggtgctgctatagggcaaaagtcttccaagtaatgaatctaagagagaatggaatgtatgggaaaagaaagttactggaactaataggacacgctgtggctcatctgaagaaagctgatgaggccaatgataatctcttccgtgtctgttccattcttgccagcctccatgctctagcagatcagtatgaagacgcagagtattacttccaaaaggaattcagtaaagagcttactcctgtagcgaaacaactgctccatctgcggtatggcaactttcagctgtaccaaatgaagtgtgaagacaaggccatccaccactttatagagggtgtaaaaataaaccagaaatcaagggagaaagaaaagatgaaagacaaactgcaaaaaattgccaaaatgcgactttctaaaaatggagcagattctgaggctttgcatgtcttggcattccttcaggagctgaatgaaaaaatgcaacaagcagatgaagactctgagaggggtttggagtctggaagcctcatcccttcagcatcaagctggaatggggaatgaagaatagagatgtggtgcccactaggctactgctgaaagggagctgaaattcctccaccaagttggtattcaaaatatgtaatgactggtatggcaaaagattggactaagacactggccataccactggacagggttatgttaacacctgaattgctgggtcttgagagagcccaaggagttctgggagagggaccagattggggggtaggtccacgggcttggtgatagaattatttctcgattgacttcttgagtgcaatttgaactgtaacatttgcttagtcacctttagtggagtaatctactgggcttgtttctatatttatataaagcagccaaatccttcatgtaatattgaagtccatttttgcaatgttgttccatacttggagtcattttgcatcccatagaggttagtcctgcatagccagtaatgtgctaagttcatccaaaagctggcggaccaaagtctaaatagggctcagtatcccccatcgcttatctctgcctccttcctcctccttcccagtctatcatcaaccttgagtattctacacaatgtgaattcaagtgcctgattaattgaggtggcaacatagtttgagacgagggcagagaacaggaagatacatagctagaagcgacgggtacaaaaagcaatgtgtacaagaagactttcagcaagtatacagagagttcacctctactctgccctcctcatagtcataatgtagcaagtaaagaatgagaatggattctgtacaatacactagaaaccaacataatgtatttctttaaaacctgtgtgaaaaaataaatgttccaccagtagggataggggaaaagtaaccaaaagagagaaagagaaaggaatgctggtttatctttgtagattgtaatcgaatggagaaatttgcagtattttagccactattaggaattttttttttttgtaaaatgaagactgaactctgttcaaatgctttcatgaacctggtttgagacggtaggaaagcaacaaaacgtgggaacctggtgactaagggcctggtgcaaggacttgggaaatgtcattgataatagatggtggggttttcccccctttagaaatgttggatattaagtgatataaacacttcttttaactccgaaaatcttctgagaaatcacaaaattcacggtatgcttggaacgattgagattttctaggtagatgctgaatagcctagacatcaaagttggtgtgaaccaaaatagagtcagctgacccagcatcagccacactctgggttggaaaatgtttgcctgttggaattaatttaagcttaagtatatatcaacattattttattgtgcaattaaaacaatacaaattcatggttttttaaagttaaaaattctaaccactgtaacaacagtttttgtgttattttctgtattaaacatcttgttgcacgcatttgaggtcatcagggtgcaaaatttgtattcctgaaaatgtcatatattttcattaataaataacctaaatatgataaaacataaagcagtgttctggttcatctggaattttgctgtactttaaatctttcagactcagctactgataaatgaaacgttacacaggtgtgaaccaaatccaaataacctcgactggtctactatcataatcacctgaacagaacaaaactttttcctcagctttaagagtccagggcttcggataacagctgccatctgccacctgctaccattgacctacgtgaacacagacattctgtctccaccttgatggtgggtgggctgctccccttttctttgttaaattttgtgctttcatcacattttctctattctgacctctgttatgagaaataaaagtcactgattccatttta

SEQ ID NO: 118699 - DNA, 1419 bp, Artificial Sequence
  derived and/or modified sequence
atgtctgagaacaacaagaacagcctggagagcagcctgcggcagctgaagtgccacttcacctggaacctgatggagggggagaacagcctggatgactttgaggacaaggtgttctacagaacagagttccagaaccgggagttcaaggccaccatgtgcaacctgctggcctacctgaagcacctgaagggccagaatgaagctgccctggagtgcctgaggaaggccgaggagctgatccagcaggagcacgccgaccaggccgagatccgcagcctggtgacctggggcaactatgcctgggtgtactaccacatgggccgcctgagtgatgtgcagatctacgtggacaaggtgaagcacgtgtgtgagaagttcagcagcccctacagaattgagagccctgagctggactgtgaggagggctggacccggctgaagtgtggcggcaaccagaatgaaagagccaaggtgtgctttgagaaggccctggagaagaagcccaagaaccctgagttcaccagcggcctggccatcgccagctaccgcctggacaactggccacccagccagaatgccatcgaccccctgcggcaggccatccggctgaacccagacaaccagtacctgaaggtgctgctggccctgaagctgcacaagatgagggaggagggggaggaggagggggagggggagaagctggtggaggaggccctggagaaggcccctggggtgacagatgtgctgcggtctgctgccaagttctacagaaggaaggatgagccagacaaggccatcgagctgctgaagaaggccctggagtacatccccaacaatgcctacctgcactgccagatcggctgctgctaccgggccaaggtgttccaggtgatgaacctgagagaaaatggcatgtatggcaagaggaagctgctggagctgattggacatgctgtggcccacctgaagaaggcagatgaggccaatgacaacctcttccgggtgtgcagcatcctggccagcctgcacgccctggccgaccagtatgaagatgctgagtactacttccagaaggagttcagcaaggagctgacccctgtggccaagcagctgctgcacctgcgctatggcaacttccagctgtaccagatgaagtgtgaggacaaggccatccaccacttcatcgagggcgtgaagatcaaccagaagagccgggagaaggagaagatgaaggacaagctgcagaagatcgccaagatgaggctgagcaagaatggagctgacagcgaggccctgcacgtgctggccttcctgcaggagctgaatgagaagatgcagcaggctgatgaagattctgagcggggcctggagagcggcagcctcatccccagcgccagctcctggaatggagagtag

SEQ ID NO: 118700 - DNA, 1419 bp, Artificial Sequence
  derived and/or modified sequence
atgagcgagaacaacaagaacagcctggagagcagcctgcggcagctcaaatgccatttcacgtggaacctgatggagggagagaactccttagacgactttgaggataaagttttctacaggaccgaattccagaatcgcgagttcaaggcaacaatgtgcaatctgctcgcttacttaaagcacctgaagggacagaatgaagcggctctagagtgcctgaggaaggctgaagaactgatccagcaagagcatgctgaccaggccgagatcagatctctcgtgacatggggaaactatgcttgggtgtactatcacatggggagactgtccgacgttcagatttacgtcgacaaagtgaagcacgtttgcgaaaagttctccagtccctataggatcgagtcgcctgaactggattgcgaggaaggctggacacgcttaaagtgtggggggaatcagaatgagagggcaaaggtttgtttcgagaaggcgctggagaaaaaacctaaaaacccagaatttacaagcggacttgctattgcttcgtatcggctcgataactggcctccctctcaaaatgccatagatcctctgcgccaggccatcaggctgaaccctgacaaccaatacctgaaagtcctgctagccctgaaactacacaaaatgcgggaggagggtgaggaagaaggagagggggaaaaactagtggaggaggctctcgaaaaggcacctggagtgactgacgtgttgagatcagccgctaaattctaccggagaaaagacgagcccgataaagctattgaactgttaaagaaggctttagagtatatccctaataacgcttacttgcattgccagattggctgttgctacagagctaaagtctttcaggttatgaacttgcgcgaaaacggaatgtatggcaagcggaaattactggagcttattggccacgccgtcgcccacctcaaaaaagctgacgaggcgaatgacaatctgttcagagtgtgctcaatcttggcctctctccacgctttggccgaccagtacgaggacgcagagtactatttccaaaaggagttctcaaaggagcttaccccagtggccaagcagttactgcacctacgatacgggaactttcaattgtaccagatgaagtgtgaagacaaggctattcaccacttcattgagggggtaaagataaaccagaaaagcagagagaaggagaaaatgaaggataagctccagaaaatagcaaagatgcggctgagcaaaaatggcgccgatagcgaagcattgcatgtgctggcctttcttcaggagctgaacgagaagatgcagcaggccgatgaggattctgagcgaggcctcgagagtggttcccttattcctagtgccagtagctggaatggtgaatag

SEQ ID NO: 118701 - DNA, 1419 bp, Artificial Sequence
  derived and/or modified sequence
atgagtgagaacaataagaattctctggaatccagcctgcgccagctgaaatgccattttacttggaacctgatggagggcgaaaacagcctggacgatttcgaggacaaagtgttttatagaactgagttccagaatcgcgaattcaaagctacgatgtgcaacttgctagcatatctgaagcatttgaagggccagaacgaggctgctctcgagtgtctgaggaaggcagaagaactaattcagcaggagcacgcggaccaggccgagattaggtcactggtgacatgggggaactatgcttgggtctattaccacatgggcagactttcagacgttcagatctacgtggataaggtaaagcacgtctgcgagaaatttagctccccttatcgtattgaatcccccgaacttgattgcgaggaagggtggactcggctgaaatgtgggggtaaccagaatgagagagctaaggtgtgttttgaaaaagctctggaaaaaaaacccaaaaacccagagttcacttctggtctggccatagctagttatcgattagataattggcccccttcacagaacgcaatcgatcccctgcggcaggccattcggctcaaccccgacaaccaatacctaaaagtgttgctggcattgaagctgcataaaatgcgtgaggagggcgaggaggagggggaaggcgagaaactggttgaggaggccctggagaaggctcctggagtgaccgatgtcctccgctcagccgcaaagttctacaggcgcaaggatgagcctgacaaggctattgaattactgaaaaaggcactggagtacattcctaacaacgcatacctgcactgccagattggatgttgttaccgggcaaaggtgttccaagtgatgaatttaagggaaaacggaatgtatggaaaacgaaaactcctggagctgatcgggcacgcagtggctcatctcaaaaaggcagacgaagcaaatgacaacctattccgcgtttgttcaattctggcctccttacatgcattagcggaccagtacgaggacgcggaatactattttcaaaaagaattttcaaaagaactgaccccagttgccaagcagttactgcatcttagatacggcaatttccagctctatcagatgaagtgtgaagacaaggctatccatcacttcatagaaggcgtgaagattaatcaaaaaagcagagaaaaggagaagatgaaggacaaactgcagaagatcgcgaagatgaggctgtctaagaacggcgctgatagcgaagcactgcatgtcctcgctttcctacaagaacttaacgagaagatgcagcaggccgacgaagactccgaacggggtttggaatcaggctctctcattccctccgctagcagctggaacggggagtag

SEQ ID NO: 118702 - DNA, 1419 bp, Artificial Sequence
  derived and/or modified sequence
atgagcgagaacaacaagaacagcctggagagcagcctgagacagctgaagtgccacttcacctggaacctgatggagggcgagaacagcctggacgacttcgaggacaaggtgttctacagaaccgagttccagaacagagagttcaaggccaccatgtgcaacctgctggcctacctgaagcacctgaagggccagaacgaggccgccctggagtgcctgagaaaggccgaggagctgatccagcaggagcacgccgaccaggccgagatcagaagcctggtgacctggggcaactacgcctgggtgtactaccacatgggcagactgagcgacgtgcagatctacgtggacaaggtgaagcacgtgtgcgagaagttcagcagcccctacagaatcgagagccccgagctggactgcgaggagggctggaccagactgaagtgcggcggcaaccagaacgagagagccaaggtgtgcttcgagaaggccctggagaagaagcccaagaaccccgagttcaccagcggcctggccatcgccagctacagactggacaactggccccccagccagaacgccatcgaccccctgagacaggccatcagactgaaccccgacaaccagtacctgaaggtgctgctggccctgaagctgcacaagatgagagaggagggcgaggaggagggcgagggcgagaagctggtggaggaggccctggagaaggcccccggcgtgaccgacgtgctgagaagcgccgccaagttctacagaagaaaggacgagcccgacaaggccatcgagctgctgaagaaggccctggagtacatccccaacaacgcctacctgcactgccagatcggctgctgctacagagccaaggtgttccaggtgatgaacctgagagagaacggcatgtacggcaagagaaagctgctggagctgatcggccacgccgtggcccacctgaagaaggccgacgaggccaacgacaacctgttcagagtgtgcagcatcctggccagcctgcacgccctggccgaccagtacgaggacgccgagtactacttccagaaggagttcagcaaggagctgacccccgtggccaagcagctgctgcacctgagatacggcaacttccagctgtaccagatgaagtgcgaggacaaggccatccaccacttcatcgagggcgtgaagatcaaccagaagagcagagagaaggagaagatgaaggacaagctgcagaagatcgccaagatgagactgagcaagaacggcgccgacagcgaggccctgcacgtgctggccttcctgcaggagctgaacgagaagatgcagcaggccgacgaggacagcgagagaggcctggagagcggcagcctgatccccagcgccagcagctggaacggcgagtag

SEQ ID NO: 118703 - protein, 478 aa, Artificial Sequence
  derived and/or modified sequence
MSTNGDDHQVKDSLEQLRCHFTWELSIDDDEMPDLENRVLDQIEFLDTKYSVGIHNLLAYVKHLKGQNEEALKSLKEAENLMQEEHDNQANVRSLVTWGNFAWMYYHMGRLAEAQTYLDKVENICKKLSNPFRYRMECPEIDCEEGWALLKCGGKNYERAKACFEKVLEVDPENPESSAGYAISAYRLDGFKLATKNHKPFSLLPLRQAVRLNPDNGYIKVLLALKLQDEGQEAEGEKYIEEALANMSSQTYVFRYAAKFYRRKGSVDKALELLKKALQETPTSVLLHHQIGLCYKAQMIQIKEATKGQPRGQNREKLDKMIRSAIFHFESAVEKKPTFEVAHLDLARMYIEAGNHRKAEENFQKLLCMKPVVEETMQDIHFHYGRFQEFQKKSDVNAIIHYLKAIKIEQASLTRDKSINSLKKLVLRKLRRKALDLESLSLLGFVYKLEGNMNEALEYYERALRLAADFENSVRQGP

SEQ ID NO: 118704 - protein, 447 aa, Artificial Sequence
  derived and/or modified sequence
MPDLENRVLDQIEFLDTKYSVGIHNLLAYVKHLKGQNEEALKSLKEAENLMQEEHDNQANVRSLVTWGNFAWMYYHMGRLAEAQTYLDKVENICKKLSNPFRYRMECPEIDCEEGWALLKCGGKNYERAKACFEKVLEVDPENPESSAGYAISAYRLDGFKLATKNHKPFSLLPLRQAVRLNPDNGYIKVLLALKLQDEGQEAEGEKYIEEALANMSSQTYVFRYAAKFYRRKGSVDKALELLKKALQETPTSVLLHHQIGLCYKAQMIQIKEATKGQPRGQNREKLDKMIRSAIFHFESAVEKKPTFEVAHLDLARMYIEAGNHRKAEENFQKLLCMKPVVEETMQDIHFHYGRFQEFQKKSDVNAIIHYLKAIKIEQASLTRDKSINSLKKLVLRKLRRKALDLESLSLLGFVYKLEGNMNEALEYYERALRLAADFENSVRQGP

SEQ ID NO: 118705 - DNA, 1437 bp, Artificial Sequence
  derived and/or modified sequence
atgagcactaacggggatgatcatcaagtcaaggatagcctggagcagctccgttgccacttcacatgggaactttcgatcgatgacgacgaaatgcctgaccttgagaatagagtactagatcagatcgagtttctcgataccaagtacagcgtggggatacacaatctcctcgcatatgtgaaacacctcaagggtcaaaatgaagaggctctgaaatccctcaaagaagcagagaatctcatgcaggaggagcacgacaaccaagcgaatgttagatcattggttacatggggcaacttcgcctggatgtactaccacatgggccgattagcagaagcccagacttatttggataaagtcgagaatatctgtaagaaactctctaacccattcaggtaccgaatggagtgccccgagatcgattgtgaggaagggtgggccttgcttaagtgcggcggtaagaattacgaacgagccaaggcttgctttgagaaagtactggaagtcgaccctgagaatccagagtcctcggcagggtatgcaatttctgcttataggcttgacggattcaagcttgccactaaaaatcacaagccgttttcactattgccccttaggcaggcagttcgtctcaatcctgataacggatacataaaggtgttgctggcccttaagttgcaggacgagggccaggaagcagagggagagaaatacatcgaagaggctctggctaatatgagctcgcagacgtacgtgttccgctacgctgccaaattctatagacggaagggcagcgtggataaagctctcgaactgctgaagaaggccctgcaggagacaccaacatctgtcctgctgcatcaccagatcggcctatgctataaggcacaaatgattcagatcaaggaagccacaaagggccagccacgagggcaaaatagagaaaaactcgacaagatgatcagaagtgccatttttcattttgagtccgcagtcgaaaagaagccaacttttgaggtcgcccacctggatctcgccagaatgtacattgaagcggggaaccacaggaaggcggaagaaaatttccaaaagctgttgtgtatgaaaccggtggtggaagagactatgcaggatatccacttccattatggccggtttcaggaatttcagaagaaaagcgacgtgaacgctatcatccattatctcaaagcaattaaaatcgagcaggccagcctcactagagacaagtcaattaactcactcaagaagctggtgctcaggaaactgcgtcgcaaggccctcgatctagagtcgctttcactgctcggctttgtctataagctggaagggaacatgaatgaggcccttgagtattatgaaagagcgttaaggctggccgcagattttgaaaattcagtgagacaggggccatag

SEQ ID NO: 118706 - DNA, 1880 bp, Artificial Sequence
  derived and/or modified sequence
gcaaggacacacccacagcttacaccattggctgctgtttagctcccttatataacactgtcttggggtttaaacgtaactgaaaatccacaagacagaatagccagatctcagaggagcctggctaagcaaaaccctgcagaacggctgcctaatttacagcaaccatgagtacaaatggtgatgatcatcaggtcaaggatagtctggagcaattgagatgtcactttacatgggagttatccattgatgacgatgaaatgcctgatttagaaaacagagtcttggatcagattgaattcctagacaccaaatacagtgtgggaatacacaacctactagcctatgtgaaacacctgaaaggccagaatgaggaagccctgaagagcttaaaagaagctgaaaacttaatgcaggaagaacatgacaaccaagcaaatgtgaggagtctggtgacctggggcaactttgcctggatgtattaccacatgggcagactggcagaagcccagacttacctggacaaggtggagaacatttgcaagaagctttcaaatcccttccgctatagaatggagtgtccagaaatagactgtgaggaaggatgggccttgctgaagtgtggaggaaaaaattatgaacgggccaaggcctgctttgaaaaggtgcttgaagtggaccctgaaaaccctgaatccagcgctgggtatgcgatctctgcctatcgcctggatggctttaaattagccacaaaaaatcacaagccattttctttgcttcccctaaggcaggctgtccgcttaaatccagacaatggatatattaaggttctccttgccctgaagcttcaggatgaaggacaggaagctgaaggagaaaagtacattgaagaagctctagccaacatgtcctcacagacctatgtctttcgatatgcagccaagttttaccgaagaaaaggctctgtggataaagctcttgagttattaaaaaaggccttgcaggaaacacccacttctgtcttactgcatcaccagatagggctttgctacaaggcacaaatgatccaaatcaaggaggctacaaaagggcagcctagagggcagaacagagaaaagctagacaaaatgataagatcagccatatttcattttgaatctgcagtggaaaaaaagcccacatttgaggtggctcatctagacctggcaagaatgtatatagaagcaggcaatcacagaaaagctgaagagaattttcaaaaattgttatgcatgaaaccagtggtagaagaaacaatgcaagacatacatttccactatggtcggtttcaggaatttcaaaagaaatctgacgtcaatgcaattatccattatttaaaagctataaaaatagaacaggcatcattaacaagggataaaagtatcaattctttgaagaaattggttttaaggaaacttcggagaaaggcattagatctggaaagcttgagcctccttgggttcgtctacaaattggaaggaaatatgaatgaagccctggagtactatgagcgggccctgagactggctgctgactttgagaactctgtgagacaaggtccttaggcacccagatatcagccactttcacatttcatttcattttatgctaacatttactaatcatcttttctgcttactgttttcagaaacattataattcactgtaatgatgtaattcttgaataataaatctgacaaaatattagttgtgttcaacaattagtgaaacagaatgtgtgtatgcatgtaagaaagagaaatcatttgtatgagtgctatgtagtagagaaaaaatgttagttaactttgtaggaaataaaacattggacttacactaaa

SEQ ID NO: 118707 - DNA, 2769 bp, Artificial Sequence
  derived and/or modified sequence
tttgctatgtgaataatgctgctatgaatatggacaaataaataatctgcttgagtctctgctttcacttctttttgggtataaaaccaaaagtggaattgctggatcaaatggtaattctatggttaatttttctgaggaattaccataccatttttcacagcacttgcccccttttacattcctactagcagtgcacatttctctagattctcaccaataattgttatatcctgctttttttttaaaataatagccaacctaacagacatgaagtggtatctcattgtggtttttatttgcatttcactaatgattagtgatattgagcatctttgcatatgtttattggccatttgtatattttcttttgggaaatgtctatttaagtcctttgcccatttcttaatcagttgtttgttttttgttgctgagttgtagaggttctttatctattctgtatattaatcccctatcaggtacaagatttgcaaatattttccttcattctgtgatttgtcttatcactctgttgatagtatccttccatgcataaaagtttttaattttggtggagtccagcttaattatttttactgttattgcctgtgattttggtatcatatctaatgaatcactgccaattgccaaatccaatgttacaaagctttttcctttcttctgagttttataattttagggcttacatttaggtctttcatccattttgagttaatttttgtatatggcataaagtaagggtccaactttaccctttttcatcatatatccagctttcccacacatttgttgaaaagaccatcctttccccattagatggtcttgtcattcttattgaaaatcattccaccattgttatggaatgaattgtgcacttcccacccacccctgcccaaaattcttaagttgaagccttaaccctcttatgttgaactgttgtttggagatagagtctaaaaagaggtaataaaggttaaataaaatcgtaagagtgaggccttaatccaacagagctggtgtccttagacaccaaagctcactctctctctctctgtgccactgaggaaaggccacttaaggatgcagcaagaaggagccatctgcaatccaggaagaaattccttgccaggaaccaaattggttgtcaccttcatctaggacttctagcctcgagaacttacaaatggtgatgatcatcaggtcaaggatagtctggagcaattgagatgtcactttacatgggagttatccattgatgacgatgaaatgcctgatttagaaaacagagtcttggatcagattgaattcctagacaccaaatacagtgtgggaatacacaacctactagcctatgtgaaacacctgaaaggccagaatgaggaagccctgaagagcttaaaagaagctgaaaacttaatgcaggaagaacatgacaaccaagcaaatgtgaggagtctggtgacctggggcaactttgcctggatgtattaccacatgggcagactggcagaagcccagacttacctggacaaggtggagaacatttgcaagaagctttcaaatcccttccgctatagaatggagtgtccagaaatagactgtgaggaaggatgggccttgctgaagtgtggaggaaaaaattatgaacgggccaaggcctgctttgaaaaggtgcttgaagtggaccctgaaaaccctgaatccagcgctgggtatgcgatctctgcctatcgcctggatggctttaaattagccacaaaaaatcacaagccattttctttgcttcccctaaggcaggctgtccgcttaaatccagacaatggatatattaaggttctccttgccctgaagcttcaggatgaaggacaggaagctgaaggagaaaagtacattgaagaagctctagccaacatgtcctcacagacctatgtctttcgatatgcagccaagttttaccgaagaaaaggctctgtggataaagctcttgagttattaaaaaaggccttgcaggaaacacccacttctgtcttactgcatcaccagatagggctttgctacaaggcacaaatgatccaaatcaaggaggctacaaaagggcagcctagagggcagaacagagaaaagctagacaaaatgataagatcagccatatttcattttgaatctgcagtggaaaaaaagcccacatttgaggtggctcatctagacctggcaagaatgtatatagaagcaggcaatcacagaaaagctgaagagaattttcaaaaattgttatgcatgaaaccagtggtagaagaaacaatgcaagacatacatttccactatggtcggtttcaggaatttcaaaagaaatctgacgtcaatgcaattatccattatttaaaagctataaaaatagaacaggcatcattaacaagggataaaagtatcaattctttgaagaaattggttttaaggaaacttcggagaaaggcattagatctggaaagcttgagcctccttgggttcgtctacaaattggaaggaaatatgaatgaagccctggagtactatgagcgggccctgagactggctgctgactttgagaactctgtgagacaaggtccttaggcacccagatatcagccactttcacatttcatttcattttatgctaacatttactaatcatcttttctgcttactgttttcagaaacattataattcactgtaatgatgtaattcttgaataataaatctgacaaaat

SEQ ID NO: 118708 - DNA, 1437 bp, Artificial Sequence
  derived and/or modified sequence
atgagcaccaatggagatgaccaccaggtgaaggacagcctggagcagctgcgctgccacttcacctgggagctgagcattgatgatgatgagatgccagacctggagaacagagtgctggaccagatcgagttcctggacaccaagtacagcgtgggcatccacaacctgctggcctacgtgaagcacctgaagggccagaatgaggaggccctgaagagcctgaaggaggccgagaacctgatgcaggaggagcatgacaaccaggccaacgtgcgcagcctggtgacctggggcaactttgcctggatgtactaccacatgggccgcctggccgaggcccagacctacctggacaaggtggagaacatctgcaagaagctgagcaaccccttccgctacaggatggagtgcccagaaattgactgtgaggagggctgggccctgctgaagtgtggcggcaagaactatgagcgggccaaggcctgctttgagaaggtgctggaggtggaccctgaaaatcctgagagcagcgctggctacgccatcagcgcctaccgcctggatggcttcaagctggccaccaagaaccacaagcccttcagcctgctgcccctgcggcaggccgtgcggctgaacccagacaatggctacatcaaggtgctgctggccctgaagctgcaggatgagggccaggaggccgagggggagaagtacatcgaggaggccctggccaacatgagcagccagacctacgtgttccgctatgctgccaagttctacagaaggaagggctctgtggacaaggccctggagctgctgaagaaggccctgcaggagacccccacctctgtgctgctgcaccaccagatcggcctgtgctacaaggcccagatgatccagatcaaggaggccaccaagggccagccccggggccagaaccgggagaagctggacaagatgatccgcagcgccatcttccactttgaatctgctgtggagaagaagcccacctttgaggtggcccacctggacctggccaggatgtacattgaagctggcaaccacaggaaggccgaggagaacttccagaagctgctgtgcatgaagcctgtggtggaggagaccatgcaggacatccacttccactacggccgcttccaggagttccagaagaagagtgatgtgaatgccatcatccactacctgaaggccatcaagattgagcaggccagcctgacccgggacaagagcatcaacagcctgaagaagctggtgctgaggaagctgcggaggaaggccctggacctggagagcctgagcctgctgggctttgtgtacaagctggagggcaacatgaatgaggccctggagtactatgaaagagccctgcggctggccgctgactttgaaaattctgtgcggcagggcccctag

SEQ ID NO: 118709 - DNA, 1437 bp, Artificial Sequence
  derived and/or modified sequence
atgagcaccaacggcgacgaccaccaggtgaaggacagcctggagcagctgaggtgtcacttcacttgggagctgtcaatcgatgacgacgagatgcccgatctcgaaaaccgggtgctagatcagattgagttcctggatacaaagtattccgttgggattcataacctgctcgcatacgtaaaacacctgaaggggcagaatgaggaggcgttgaaaagtctcaaggaggcggaaaatttgatgcaggaggagcacgacaatcaggctaacgtacggtccctggtaacctggggaaatttcgcctggatgtattaccacatggggaggctcgccgaagcgcaaacctacctggacaaagttgagaatatatgtaaaaaactgtcgaacccgtttcgctaccggatggagtgccctgagatagattgcgaggagggatgggctctgctgaaatgcggaggcaagaattacgaacgggctaaagcatgcttcgagaaagtcttagaagtggatccggagaaccccgagtccagtgccgggtatgcaatctctgcgtatagactcgatgggtttaaactggcaactaagaaccataaaccattctcactcttgcctctgcgccaggctgtgcgcctgaacccggataatggatacattaaagtgctgttggccttgaaactgcaggacgagggacaggaagccgagggagagaaatacatcgaagaggccctggcaaatatgagttcacagacctatgtattcaggtatgccgctaagttctatcgtcggaaggggagtgtggataaggcgctcgagctgctgaagaaggccctgcaggagacgcctacttccgttttgctgcaccaccagatcgggctctgttacaaagcacagatgatccaaataaaggaagccactaaaggccagccacgaggccagaacagagagaagctagacaagatgatacggtcagccatctttcattttgagtctgcagtggaaaaaaaacctacctttgaagtggcgcaccttgacctggctcggatgtatatcgaagcgggaaatcaccgcaaagctgaggaaaatttccagaaactcttatgtatgaaacctgttgtcgaagaaaccatgcaggacatccatttccactatggaagattccaggagtttcaaaaaaaatctgacgtcaatgcaatcattcattacctcaaagctattaaaattgagcaggcctccctgacacgcgataaatctattaactcccttaagaagcttgtgctccgcaaactacgccgtaaggcgttggatctggagtccctcagtctgctggggtttgtgtataaactagaggggaatatgaatgaggcgctggagtactacgagcgagcactgagattggcagccgatttcgaaaattcggtgcgccagggcccctag

SEQ ID NO: 118710 - DNA, 1437 bp, Artificial Sequence
  derived and/or modified sequence
atgagtacgaatggggatgatcaccaggtgaaagattcgctggaacaactcaggtgtcactttacctgggagctgagcatcgatgacgatgagatgccagacctggaaaaccgcgtgctagaccagatcgagtttctggatactaagtactccgtgggcatccacaacctgctggcgtacgtaaagcatctgaagggacagaatgaggaagctctgaagtccctaaaggaagccgagaatctcatgcaggaagaacacgataaccaggccaacgtgcgctcacttgtcacctggggaaattttgcatggatgtattaccatatgggcaggctcgcggaagcacagacctacctggacaaggtggaaaacatctgcaaaaaactaagcaatcctttccgttacaggatggagtgtcccgaaatagactgtgaggaaggatgggctctactgaagtgcggtggtaagaattatgaaagagccaaagcctgttttgagaaagtattagaggtggatccagagaaccccgagagctctgctggatacgctatctctgcttacagactggatggttttaaactggcaacgaagaatcataagccgttctccctcctgccacttcgacaggccgtgcggctcaatccagacaacggctatataaaagtcctgctcgccctgaagttgcaggacgaggggcaggaagccgagggtgaaaaatatatcgaagaggctcttgctaacatgtcgtcacagacctatgtgttccggtacgcagcaaaattctaccgacgaaagggcagtgtggacaaggccctggagctgctcaaaaaagcgttgcaggagactccaactagcgtgctgcttcaccaccagattggtctgtgctataaggcacagatgatccagatcaaagaggccaccaaggggcagcccagaggacagaaccgagagaaactcgataagatgatccgatccgcaatatttcacttcgagtcagccgtcgagaagaagcccacctttgaagtggctcacctcgatctagctagaatgtatatagaggctggcaaccaccggaaagctgaggagaactttcaaaagctcttgtgtatgaaacccgtcgtggaagagacgatgcaagacatccacttccactacgggaggttccaggaattccagaaaaaatccgacgtaaatgccatcattcactatctcaaggctatcaagatagaacaagcttccctcacgcgggacaagtccattaattcgctgaagaagttggtgttgcgcaaacttagaagaaaggctctggatctggagagtctgagtctattgggctttgtgtacaagcttgagggaaatatgaatgaagcactggagtattacgagcgggctcttagactggccgctgatttcgaaaattcggtgcggcaggggccatag

SEQ ID NO: 118711 - DNA, 1437 bp, Artificial Sequence
  derived and/or modified sequence
atgagcaccaacggcgacgaccaccaggtgaaggacagcctggagcagctgagatgccacttcacctgggagctgagcatcgacgacgacgagatgcccgacctggagaacagagtgctggaccagatcgagttcctggacaccaagtacagcgtgggcatccacaacctgctggcctacgtgaagcacctgaagggccagaacgaggaggccctgaagagcctgaaggaggccgagaacctgatgcaggaggagcacgacaaccaggccaacgtgagaagcctggtgacctggggcaacttcgcctggatgtactaccacatgggcagactggccgaggcccagacctacctggacaaggtggagaacatctgcaagaagctgagcaaccccttcagatacagaatggagtgccccgagatcgactgcgaggagggctgggccctgctgaagtgcggcggcaagaactacgagagagccaaggcctgcttcgagaaggtgctggaggtggaccccgagaaccccgagagcagcgccggctacgccatcagcgcctacagactggacggcttcaagctggccaccaagaaccacaagcccttcagcctgctgcccctgagacaggccgtgagactgaaccccgacaacggctacatcaaggtgctgctggccctgaagctgcaggacgagggccaggaggccgagggcgagaagtacatcgaggaggccctggccaacatgagcagccagacctacgtgttcagatacgccgccaagttctacagaagaaagggcagcgtggacaaggccctggagctgctgaagaaggccctgcaggagacccccaccagcgtgctgctgcaccaccagatcggcctgtgctacaaggcccagatgatccagatcaaggaggccaccaagggccagcccagaggccagaacagagagaagctggacaagatgatcagaagcgccatcttccacttcgagagcgccgtggagaagaagcccaccttcgaggtggcccacctggacctggccagaatgtacatcgaggccggcaaccacagaaaggccgaggagaacttccagaagctgctgtgcatgaagcccgtggtggaggagaccatgcaggacatccacttccactacggcagattccaggagttccagaagaagagcgacgtgaacgccatcatccactacctgaaggccatcaagatcgagcaggccagcctgaccagagacaagagcatcaacagcctgaagaagctggtgctgagaaagctgagaagaaaggccctggacctggagagcctgagcctgctgggcttcgtgtacaagctggagggcaacatgaacgaggccctggagtactacgagagagccctgagactggccgccgacttcgagaacagcgtgagacagggcccctag

SEQ ID NO: 118712 - protein, 490 aa, Artificial Sequence
  derived and/or modified sequence
MSEVTKNSLEKILPQLKCHFTWNLFKEDSVSRDLEDRVCNQIEFLNTEFKATMYNLLAYIKHLDGNNEAALECLRQAEELIQQEHADQAEIRSLVTWGNYAWVYYHLGRLSDAQIYVDKVKQTCKKFSNPYSIEYSELDCEEGWTQLKCGRNERAKVCFEKALEEKPNNPEFSSGLAIAMYHLDNHPEKQFSTDVLKQAIELSPDNQYVKVLLGLKLQKMNKEAEGEQFVEEALEKSPCQTDVLRSAAKFYRRKGDLDKAIELFQRVLESTPNNGYLYHQIGCCYKAKVRQMQNTGESEASGNKEMIEALKQYAMDYSNKALEKGLNPLNAYSDLAEFLETECYQTPFNKEVPDAEKQQSHQRYCNLQKYNGKSEDTAVQHGLEGLSISKKSTDKEEIKDQPQNVSENLLPQNAPNYWYLQGLIHKQNGDLLQAAKCYEKELGRLLRDAPSGIGSIFLSASELEDGSEEMGQGAVSSSPRELLSNSEQLN

SEQ ID NO: 118713 - protein, 311 aa, Artificial Sequence
  derived and/or modified sequence
MYHLDNHPEKQFSTDVLKQAIELSPDNQYVKVLLGLKLQKMNKEAEGEQFVEEALEKSPCQTDVLRSAAKFYRRKGDLDKAIELFQRVLESTPNNGYLYHQIGCCYKAKVRQMQNTGESEASGNKEMIEALKQYAMDYSNKALEKGLNPLNAYSDLAEFLETECYQTPFNKEVPDAEKQQSHQRYCNLQKYNGKSEDTAVQHGLEGLSISKKSTDKEEIKDQPQNVSENLLPQNAPNYWYLQGLIHKQNGDLLQAAKCYEKELGRLLRDAPSGIGSIFLSASELEDGSEEMGQGAVSSSPRELLSNSEQLN

SEQ ID NO: 118714 - DNA, 89 bp, Artificial Sequence
  derived and/or modified sequence
agaaacagaaaacagtcaaaccaatgggcaatccatatcagatgcagtattatgaacagaagtgtaaagaatgcaccaggcacaatggc

SEQ ID NO: 118715 - DNA, 1473 bp, Artificial Sequence
  derived and/or modified sequence
atgagcgaggtgaccaagaacagcctggagaagatcctgccccagctgaagtgccacttcacctggaacctgttcaaggaggacagcgtgagcagagacctggaggacagagtgtgcaaccagatcgagttcctgaacaccgagttcaaggccaccatgtacaacctgctggcctacatcaagcacctggacggcaacaacgaggccgccctggagtgcctgagacaggccgaggagctgatccagcaggagcacgccgaccaggccgagatcagaagcctggtgacctggggcaactacgcctgggtgtactaccacctgggcagactgagcgacgcccagatctacgtggacaaggtgaagcagacctgcaagaagttcagcaacccctacagcatcgagtacagcgagctggactgcgaggagggctggacccagctgaagtgcggcagaaacgagagagccaaggtgtgcttcgagaaggccctggaggagaagcccaacaaccccgagttcagcagcggcctggccatcgccatgtaccacctggacaaccaccccgagaagcagttcagcaccgacgtgctgaagcaggccatcgagctgagccccgacaaccagtacgtgaaggtgctgctgggcctgaagctgcagaagatgaacaaggaggccgagggcgagcagttcgtggaggaggccctggagaagagcccctgccagaccgacgtgctgagaagcgccgccaagttctacagaagaaagggcgacctggacaaggccatcgagctgttccagagagtgctggagagcacccccaacaacggctacctgtaccaccagatcggctgctgctacaaggccaaggtgagacagatgcagaacaccggcgagagcgaggccagcggcaacaaggagatgatcgaggccctgaagcagtacgccatggactacagcaacaaggccctggagaagggcctgaaccccctgaacgcctacagcgacctggccgagttcctggagaccgagtgctaccagacccccttcaacaaggaggtgcccgacgccgagaagcagcagagccaccagagatactgcaacctgcagaagtacaacggcaagagcgaggacaccgccgtgcagcacggcctggagggcctgagcatcagcaagaagagcaccgacaaggaggagatcaaggaccagccccagaacgtgagcgagaacctgctgccccagaacgcccccaactactggtacctgcagggcctgatccacaagcagaacggcgacctgctgcaggccgccaagtgctacgagaaggagctgggcagactgctgagagacgcccccagcggcatcggcagcatcttcctgagcgccagcgagctggaggacggcagcgaggagatgggccagggcgccgtgagcagcagccccagagagctgctgagcaacagcgagcagctgaactag

SEQ ID NO: 118716 - DNA, 1473 bp, Artificial Sequence
  derived and/or modified sequence
atgtccgaggttaccaagaacagcctagaaaaaatcctgccacaactgaaatgccacttcacgtggaacctgtttaaagaagattccgtctctcgtgatctggaggatagggtttgcaaccaaatcgagtttcttaataccgagttcaaggccaccatgtataacctcctggcgtatataaagcacctggacgggaataacgaagcagccttagagtgtctgagacaggctgaggagttgattcagcaggagcatgcagaccaggccgagataaggagcctggtcacatggggcaactacgcttgggtatattaccacctgggccgtctgtcagacgctcagatttacgtcgacaaggtgaaacagacatgtaagaagttttccaatccttattcgattgaatactcggagctggattgtgaggagggttggacccagcttaagtgtggtcggaacgaacgcgctaaggtgtgcttcgaaaaggctttggaggaaaagcctaacaatccagagttttcttcgggtctagccattgcaatgtatcacctggataatcatccagagaaacaattctccacggacgtgctcaaacaggcaatagagctcagtcccgataatcaatatgtgaaggtgctgctcggtttaaagctgcagaagatgaataaggaagccgaaggcgagcaattcgtggaggaggccctggaaaaatcaccttgccagaccgatgttctccgatctgccgcaaaattctacagacgaaaaggcgatctagataaggccatcgaactgttccagcgagtgctagagagtacgcccaataacgggtacttatatcaccaaatcggctgttgttataaggccaaggttagacagatgcaaaatacgggggaaagcgaggcatccggaaacaaggagatgatcgaagcgctgaagcagtacgcgatggattactctaataaggcattggaaaagggactgaatcccctgaatgcatactctgatctagccgagttcttggaaaccgaatgctatcagactccctttaataaagaggtccccgacgctgagaagcagcaatcccatcagaggtactgcaacttgcaaaaatacaacgggaagagcgaggatactgccgtccagcatgggctggagggactctccattagcaagaagagcacagacaaggaggaaataaaggaccaaccccaaaacgtaagcgaaaacctgttgccgcagaacgcccccaattactggtatttacagggcttgatacacaagcagaatggagacctgttgcaggccgctaagtgctatgaaaaagaacttggacggctgctaagggatgcccctagcggaatcggctctatctttctgagcgcctcagagcttgaggatgggtcagaggaaatgggacagggcgccgtgagcagctccccgcgagagctgttgtctaatagcgaacaactgaattag

SEQ ID NO: 118717 - DNA, 1473 bp, Artificial Sequence
  derived and/or modified sequence
atgtcagaggtgaccaaaaacagtctcgagaagatccttccccaactcaaatgtcactttacctggaatctgttcaaagaggacagtgtgtcccgcgacctggaagatagggtttgtaaccagatcgagttcctcaatactgaatttaaggctactatgtacaatctgttagcatatattaaacatcttgacgggaacaatgaggctgcgctagaatgccttaggcaggctgaagaattgatacagcaggagcatgcagatcaggcggagattcgaagtctggttacgtggggcaattacgcatgggtttactatcacctggggcggttatcagatgcccaaatctacgtggacaaggtcaaacagacatgtaaaaagttctcaaacccttacagtatcgagtattctgaattagattgtgaagagggctggacacagcttaagtgcggtaggaacgagagggcaaaggtctgctttgagaaggccctggaagagaaaccaaacaatccagaatttagttccggactggccatagcaatgtaccacctggacaaccatcccgaaaaacagttctctacagacgtgctgaagcaggccatagagctgtctcccgacaaccagtatgtaaaagtactcctgggcctgaagctgcaaaaaatgaacaaggaagctgaaggcgagcagttcgtggaagaggctctggaaaagagcccatgccagacggacgtgctgcgatcagccgccaagttttacagacggaaaggcgacttggacaaggccattgagctcttccagcgggttctggagtccacccccaacaacgggtacctgtatcatcaaatagggtgttgctataaggccaaggtgaggcaaatgcagaataccggggagtctgaggccagcggaaacaaggaaatgattgaggcgctcaagcagtatgccatggattactctaataaggccctcgagaaggggctgaacccgctgaatgcatattctgacttggctgaattcctggagacagaatgctaccaaactccattcaacaaagaagtgcccgacgccgaaaagcagcaaagccaccaaaggtattgcaatctgcagaaatataacggaaagtcggaagacaccgctgtgcaacatgggctagaaggcctgtcgatttccaaaaagtctacggacaaagaagaaatcaaagaccagccccagaacgtgagcgaaaacttgcttccccagaatgcgcccaactactggtaccttcagggcttgatccacaagcaaaacggggaccttcttcaagccgccaagtgttatgaaaaggaactcgggaggctactgagagacgcaccatctggtatcgggtctatatttctctccgcttctgaactggaagacggatcggaggaaatggggcagggcgctgtgtcctcttcccctagggaattattgtctaatagcgagcagttgaattag

SEQ ID NO: 118718 - DNA, 2455 bp, Artificial Sequence
  derived and/or modified sequence
tttcctttcccctttcataaaagcacagacctaacagcaccctgggtggaaacctcttcagcatttgcttggaatcagtaagctaaaaacaaaatcaaccgggaccccagcttttcagaactgcagggaaacagccatcatgagtgaggtcaccaagaattccctggagaaaatccttccacagctgaaatgccatttcacctggaacttattcaaggaagacagtgtctcaagggatctagaagatagagtgtgtaaccagattgaatttttaaacactgagttcaaagctacaatgtacaacttgttggcctacataaaacacctagatggtaacaacgaggcagccctggaatgcttacggcaagctgaagagttaatccagcaagaacatgctgaccaagcagaaatcagaagtctagtcacttggggaaactacgcctgggtctactatcacttgggcagactctcagatgctcagatttatgtagataaggtgaaacaaacctgcaagaaattttcaaatccatacagtattgagtattctgaacttgactgtgaggaagggtggacacaactgaagtgtggaagaaatgaaagggcgaaggtgtgttttgagaaggctctggaagaaaagcccaacaacccagaattctcctctggactggcaattgcgatgtaccatctggataatcacccagagaaacagttctctactgatgttttgaagcaggccattgagctgagtcctgataaccaatacgtcaaggttctcttgggcctgaaactgcagaagatgaataaagaagctgaaggagagcagtttgttgaagaagccttggaaaagtctccttgccaaacagatgtcctccgcagtgcagccaaattttacagaagaaaaggtgacctagacaaagctattgaactgtttcaacgggtgttggaatccacaccaaacaatggctacctctatcaccagattgggtgctgctacaaggcaaaagtaagacaaatgcagaatacaggagaatctgaagctagtggaaataaagagatgattgaagcactaaagcaatatgctatggactattcgaataaagctcttgagaagggactgaatcctctgaatgcatactccgatctcgctgagttcctggagacggaatgttatcagacaccattcaataaggaagtccctgatgctgaaaagcaacaatcccatcagcgctactgcaaccttcagaaatataatgggaagtctgaagacactgctgtgcaacatggtttagagggtttgtccataagcaaaaaatcaactgacaaggaagagatcaaagaccaaccacagaatgtatctgaaaatctgcttccacaaaatgcaccaaattattggtatcttcaaggattaattcataagcagaatggagatctgctgcaagcagccaaatgttatgagaaggaactgggccgcctgctaagggatgccccttcaggcataggcagtattttcctgtcagcatctgagcttgaggatggtagtgaggaaatgggccagggcgcagtcagctccagtcccagagagctcctctctaactcagagcaactgaactgagacagaggaggaaaacagagcatcagaagcctgcagtggtggttgtgacgggtaggacgataggaagacagggggccccaacctgggattgctgagcagggaagctttgcatgttgctctaaggtacatttttaaagagttgttttttggccgggcgcagtggctcatgcctgtaatcccagcactttgggaggccgaggtgggcggatcacgaggtctggagtttgagaccatcctggctaacacagtgaaatcccgtctctactaaaaatacaaaaaattagccaggcgtggtggctggcacctgtagtcccagctacttgggaggctgaggcaggagaatggcgtgaacctggaaggaagaggttgcagtgagccaagattgcgcccctgcactccagcctgggcaacagagcaagactccatctcaaaaaaaaaaaaaaaaaaaaaaaagagttgttttctcatgttcattatagttcattacagttacatagtccgaaggtcttacaactaatcactggtagcaataaatgcttcaggcccacatgatgctgattagttctcagttttcattcagttcacaatataaccaccattcctgccctccctgccaagggtcataaatggtgactgcctaacaacaaaatttgcagtctcatctcattttcatccagacttctggaactcaaagattaacttttgactaaccctggaatatctcttatctcacttatagcttcaggcatgtatttatatgtattcttgatagcaataccataatcaatgtgtattcctgatagtaatgctacaataaatccaaacatttcaactctgttagaa

SEQ ID NO: 118719 - DNA, 2496 bp, Artificial Sequence
  derived and/or modified sequence
cttccttcccctaaaagcaattactcaaaaacggagaaaacatcagctgatgcgtgccctactctcccacccctttatatagttccttcagtatttacttgaggcagacaggaagacttctgaagaacaaatcagcctggtcaccagcttttcggaacagcagagacacagagggcagtcatgagtgaggtcaccaagaattccctggagaaaatccttccacagctgaaatgccatttcacctggaacttattcaaggaagacagtgtctcaagggatctagaagatagagtgtgtaaccagattgaatttttaaacactgagttcaaagctacaatgtacaacttgttggcctacataaaacacctagatggtaacaacgaggcagccctggaatgcttacggcaagctgaagagttaatccagcaagaacatgctgaccaagcagaaatcagaagtctagtcacttggggaaactacgcctgggtctactatcacttgggcagactctcagatgctcagatttatgtagataaggtgaaacaaacctgcaagaaattttcaaatccatacagtattgagtattctgaacttgactgtgaggaagggtggacacaactgaagtgtggaagaaatgaaagggcgaaggtgtgttttgagaaggctctggaagaaaagcccaacaacccagaattctcctctggactggcaattgcgatgtaccatctggataatcacccagagaaacagttctctactgatgttttgaagcaggccattgagctgagtcctgataaccaatacgtcaaggttctcttgggcctgaaactgcagaagatgaataaagaagctgaaggagagcagtttgttgaagaagccttggaaaagtctccttgccaaacagatgtcctccgcagtgcagccaaattttacagaagaaaaggtgacctagacaaagctattgaactgtttcaacgggtgttggaatccacaccaaacaatggctacctctatcaccagattgggtgctgctacaaggcaaaagtaagacaaatgcagaatacaggagaatctgaagctagtggaaataaagagatgattgaagcactaaagcaatatgctatggactattcgaataaagctcttgagaagggactgaatcctctgaatgcatactccgatctcgctgagttcctggagacggaatgttatcagacaccattcaataaggaagtccctgatgctgaaaagcaacaatcccatcagcgctactgcaaccttcagaaatataatgggaagtctgaagacactgctgtgcaacatggtttagagggtttgtccataagcaaaaaatcaactgacaaggaagagatcaaagaccaaccacagaatgtatctgaaaatctgcttccacaaaatgcaccaaattattggtatcttcaaggattaattcataagcagaatggagatctgctgcaagcagccaaatgttatgagaaggaactgggccgcctgctaagggatgccccttcaggcataggcagtattttcctgtcagcatctgagcttgaggatggtagtgaggaaatgggccagggcgcagtcagctccagtcccagagagctcctctctaactcagagcaactgaactgagacagaggaggaaaacagagcatcagaagcctgcagtggtggttgtgacgggtaggacgataggaagacagggggccccaacctgggattgctgagcagggaagctttgcatgttgctctaaggtacatttttaaagagttgttttttggccgggcgcagtggctcatgcctgtaatcccagcactttgggaggccgaggtgggcggatcacgaggtctggagtttgagaccatcctggctaacacagtgaaatcccgtctctactaaaaatacaaaaaattagccaggcgtggtggctggcacctgtagtcccagctacttgggaggctgaggcaggagaatggcgtgaacctggaaggaagaggttgcagtgagccaagattgcgcccctgcactccagcctgggcaacagagcaagactccatctcaaaaaaaaaaaaaaaaaaaaaaaagagttgttttctcatgttcattatagttcattacagttacatagtccgaaggtcttacaactaatcactggtagcaataaatgcttcaggcccacatgatgctgattagttctcagttttcattcagttcacaatataaccaccattcctgccctccctgccaagggtcataaatggtgactgcctaacaacaaaatttgcagtctcatctcattttcatccagacttctggaactcaaagattaacttttgactaaccctggaatatctcttatctcacttatagcttcaggcatgtatttatatgtattcttgatagcaataccataatcaatgtgtattcctgatagtaatgctacaataaatccaaacatttcaactctgttagaa

SEQ ID NO: 118720 - DNA, 1473 bp, Artificial Sequence
  derived and/or modified sequence
atgtctgaggtgaccaagaacagcctggagaagatcctgccccagctgaagtgccacttcacctggaacctcttcaaggaggacagcgtgtcccgggacctggaggacagagtgtgcaaccagatcgagttcctgaacacagagttcaaggccaccatgtacaacctgctggcctacatcaagcacctggatggcaacaatgaagctgccctggagtgcctgcggcaggccgaggagctgatccagcaggagcacgccgaccaggccgagatccgcagcctggtgacctggggcaactatgcctgggtgtactaccacctgggccgcctgagtgatgcccagatctacgtggacaaggtgaagcagacctgcaagaagttcagcaacccctacagcattgagtacagcgagctggactgtgaggagggctggacccagctgaagtgtggcagaaatgaaagagccaaggtgtgctttgagaaggccctggaggagaagcccaacaaccctgagttcagcagcggcctggccatcgccatgtaccacctggacaaccaccctgagaagcagttcagcacagatgtgctgaagcaggccatcgagctgagcccagacaaccagtatgtgaaggtgctgctgggcctgaagctgcagaagatgaacaaggaggccgagggggagcagtttgtggaggaggccctggagaagagcccctgccagacagatgtgctgcggtctgctgccaagttctacagaaggaagggggacctggacaaggccatcgagctgttccagagggtgctggagagcacccccaacaacggctacctgtaccaccagatcggctgctgctacaaggccaaggtgcggcagatgcagaacacaggagagagcgaggccagcggcaacaaggagatgattgaggccctgaagcagtatgccatggactacagcaacaaggccctggagaagggcctgaaccccctgaatgcctacagcgacctggccgagttcctggagacagagtgctaccagacccccttcaacaaggaggtgcctgatgctgagaagcagcagagccaccagcgctactgcaacctgcagaagtacaacgggaagtctgaggacacagctgtgcagcacggcctggagggcctgagcatcagcaagaagagcacagacaaggaggagatcaaggaccagccccagaatgtgtctgagaacctgctgccccagaatgcccccaactactggtacctgcagggcctcatccacaagcagaatggagacctgctgcaggccgccaagtgctatgagaaggagctgggccgcctgctgagagatgcccccagcggcatcggcagcatcttcctgagcgccagcgagctggaggatggcagcgaggagatgggccagggcgctgtgagcagcagcccccgggagctgctgagcaacagcgagcagctgaactag

SEQ ID NO: 118721 - DNA, 1473 bp, Artificial Sequence
  derived and/or modified sequence
atgagcgaggtgaccaagaacagcctggagaagatcctgccccagctgaaatgccatttcacgtggaatctgttcaaggaggattccgtctcccgtgacctggaagaccgcgtctgcaatcaaatcgagtttctgaacactgagttcaaggctactatgtacaacctgctggcatacattaaacacctagatgggaacaatgaggccgcgttggaatgtctgcgccaggcagaggaactgatacagcaggagcacgccgaccaggctgaaatcagatcgttggtcacctggggcaactacgcttgggtttactatcacttaggcaggctgagtgatgcacagatctacgtcgacaaggttaagcagacttgcaagaaattttcaaatccctattcaattgaatacagcgaattagactgcgaggaggggtggacgcagttgaagtgcggaagaaatgagcgggccaaggtatgtttcgagaaagccctggaagaaaaaccaaataaccccgagttctctagtggccttgctatcgcgatgtaccacttagacaatcacccagaaaagcagttcagcaccgatgtgctgaaacaggccatagaactatcaccagataaccaatatgtcaaggttctcctcggccttaagcttcagaagatgaataaagaagcggagggcgaacagtttgtagaagaggcattggaaaagagtccgtgccaaactgacgttctgaggtcagccgcaaagttttacaggagaaagggagacctggataaggccatcgaactatttcagcgcgtacttgaatctacaccaaacaatgggtatctgtaccaccagataggttgctgttataaagctaaggtgagacagatgcaaaacacgggcgagtctgaagcgtctggtaacaaggagatgatcgaggcccttaaacagtacgccatggactactccaataaggccctggaaaagggactgaaccctctcaatgcctactcggatctagcggaattcctggagacagaatgttaccagacacctttcaacaaggaggtcccagatgctgagaagcaacagagccaccagcggtactgcaacctacagaaatataacggcaagtctgaagatactgccgtccagcacggcctagaggggcttagtatctccaaaaagtcaacggacaaggaagaaattaaggaccagccccagaatgtcagcgagaatctgcttccacaaaacgctcctaactattggtacttgcagggcttgatccacaagcagaatggcgatctgttgcaggccgctaaatgctacgaaaaggaattgggaaggctgctgcgggatgcaccaagcgggattggatcaatctttctgtcggccagcgaactggaagatggcagcgaggaaatggggcagggcgctgtgagctccagcccccgtgagctcctctctaactccgagcagctgaactag

SEQ ID NO: 118722 - DNA, 1473 bp, Artificial Sequence
  derived and/or modified sequence
atgagcgaggtgaccaagaacagcctggagaagatcctgccccagctcaaatgccactttacctggaatctatttaaggaggatagtgtgtcacgcgacctcgaagatcgggtctgcaaccagattgagtttctcaacacagaattcaaggctacgatgtacaacctgcttgcctatataaaacacttggacggcaacaacgaggctgcccttgaatgcttgagacaggctgaggagcttattcagcaggaacatgctgatcaggcagagatcaggtccctggtaacctggggcaattatgcatgggtctactaccaccttggcagattatcagacgcacagatttacgtggataaggtcaagcagacttgcaagaaattctctaatccatattcgattgagtattctgagctcgactgtgaggaaggctggacccagctgaagtgtggccggaacgaacgcgccaaagtgtgttttgaaaaagccctggaggagaaacccaataaccccgagttctctagcgggctggccattgcaatgtatcatctcgataaccaccccgaaaagcagttttcgactgacgtacttaaacaagctatcgagttgtcccctgacaaccagtatgtgaaggtgctgctaggactaaaactgcagaagatgaacaaggaggctgaaggtgagcagttcgtcgaagaggctttggagaagtccccatgccagacagatgtccttcgatccgccgctaaattttatcggaggaagggggacttagacaaggcgattgaactcttccaaagggtgctggaatcaacacccaataatggctacctgtatcatcagattggttgctgttacaaagccaaggtgagacagatgcaaaatactggcgaaagcgaggcctcaggtaataaggaaatgatagaggccttaaagcagtatgcaatggactacagtaacaaggccctcgagaaggggttgaacccactaaacgcttactccgatctggcggaattcctcgagaccgaatgctaccagacacctttcaataaggaggtcccggatgccgagaaacagcagtcacaccagagatactgcaacctgcaaaagtataatggaaagagcgaggacacagcagtgcagcatggccttgaaggtcttagtatcagcaaaaaatctactgataaagaggaaatcaaagaccagcctcagaacgtgtcggaaaatctgctgccccagaatgcccccaattattggtatctgcaagggttgattcacaagcaaaatggggatctcctgcaagcggcaaagtgttacgagaaagagctgggcagactgctcagggatgctccatcaggcattggaagcattttcctcagtgcgagcgagctggaggacgggtcagaggagatgggacagggtgccgtttcaagcagcccaagagaactcctctctaattctgaacaactgaactag

SEQ ID NO: 118723 - DNA, 1473 bp, Artificial Sequence
  derived and/or modified sequence
atgagcgaagtcacaaaaaactccctcgaaaagatcttgccacagcttaaatgccatttcacttggaatctgtttaaggaggattcggtttcgcgtgacctggaggacagagtgtgcaaccagattgagtttttgaatacagaatttaaagcgactatgtacaatctgctcgcatatatcaaacatctggatggaaacaatgaagctgccctcgagtgccttcgccaagccgaggaacttatccagcaggagcatgccgatcaggcggagatcaggtccctcgtgacatggggcaattatgcttgggtatactatcacctgggcaggctgagcgatgctcagatctacgtggataaggtcaagcagacgtgcaagaaatttagcaacccgtacagtatcgagtattctgaactcgactgtgaggaaggctggactcagttaaagtgtggcagaaacgagcgtgcaaaagtgtgcttcgagaaggcactggaagaaaagcctaacaatccagagttttcttccggcttagccatcgccatgtaccatctagataatcaccccgagaagcagtttagtacagacgttttaaaacaggccatcgagctttcccctgacaatcaatatgtgaaagtgctgctcggattgaagctgcagaaaatgaataaggaagctgaaggggaacagtttgtggaggaggcgctagaaaaatcaccttgtcagaccgatgtgctgcgatctgctgctaaattttatagaaggaagggagatttggacaaggccatcgagctctttcaacgtgtgcttgagtcaactcccaacaacgggtatctgtatcaccagatcggttgttgctacaaggcgaaggtgagacaaatgcaaaacacaggtgagagtgaggccagcggcaacaaagagatgatcgaggccctgaagcaatatgctatggactattctaataaggccctcgaaaagggcctgaatccacttaacgcttattccgacctcgcagagttcctggaaaccgaatgttatcagacccccttcaacaaggaggtgcccgatgccgagaagcaacagtctcaccagcgttattgcaatctacagaagtacaacggaaaatccgaagacaccgcagtacagcatgggttggaaggcctgagcatctccaagaaatcaactgacaaagaggaaataaaggatcagccgcagaatgtgtcggagaacctgctgcctcagaacgcccctaactactggtacttgcaggggctgattcacaagcagaatggagaccttctgcaagctgctaagtgctatgaaaaagagctgggaaggcttcttcgcgatgctccctcaggcatcgggagcattttcctttcagcctccgaattagaagatggctcagaagagatggggcagggggcagtctcaagctctccgcgtgagctgctgtctaacagcgaacaactgaactag

SEQ ID NO: 118724 - DNA, 1473 bp, Artificial Sequence
  derived and/or modified sequence
atgagcgaggtcactaaaaattcgctggaaaaaattctccctcaactgaagtgtcattttacatggaatctgttcaaggaggactccgtgtctagggatttagaagaccgtgtttgcaaccagattgagtttctgaacaccgagttcaaagccaccatgtataatctactggcctacattaagcatctggacggcaacaacgaagcggcacttgaatgcttgagacaggccgaagagctcattcagcaggagcacgctgatcaggctgaaatacgctctttggttacttgggggaattacgcttgggtgtactaccatcttggtcgactctccgacgcccaaatttatgtggataaggtcaagcagacctgtaaaaagttttccaatccatactctattgagtacagcgaactggattgtgaggaaggctggacccagctgaaatgtggacggaatgaacgagcaaaggtgtgtttcgaaaaggctcttgaggagaagcctaataatcctgaattctcgagcgggctggctatcgccatgtatcacctcgacaatcatcccgagaaacagttcagcaccgatgtccttaagcaggctattgagctgagtcccgataatcaatacgtgaaggtcctgctgggcctgaaactacaaaaaatgaataaggaagccgagggtgagcagtttgtcgaggaggcactggagaagagtccttgtcagaccgatgtgctacgctcagctgctaagttctatcgcaggaagggcgacctggataaagctattgagctctttcagagagtgctggagagcacccccaacaacggatatctgtaccaccaaattggatgctgttacaaagccaaagtgcgacagatgcagaacacaggcgagtccgaggcttctgggaacaaggagatgatcgaagcactgaagcagtacgccatggattactctaataaagccttggagaagggcttgaatccactgaacgcttactctgatctggccgaatttctagagacagaatgctaccagactcccttcaataaggaagtcccagacgcagaaaagcaacaatctcatcaacggtactgcaatttgcagaagtacaatgggaagagtgaagatacggccgtgcagcatgggttggaggggctttcgatcagcaagaagagcaccgacaaggaagaaatcaaggaccagccgcagaatgtgtccgaaaatcttctcccccaaaatgcccctaattactggtatctgcagggcctgatccacaaacagaatggcgacctgctgcaagcagctaaatgctatgagaaggaactggggagactgttaagggacgctccgagcggcatcggcagcatcttcctgtccgcttctgagctggaggacggatcagaggagatggggcagggagcagtctcttcgtcacccagggaactgctttctaactctgaacagctgaattag

SEQ ID NO: 118725 - protein, 339 aa, Artificial Sequence
  derived and/or modified sequence
MAAEDELQLPRLPELFETGRQLLDEVEVATEPAGSRIVQEKVFKGLDLLEKAAEMLSQLDLFSRNEDLEEIASTDLKYLLVPAFQGALTMKQVNPSKRLDHLQRAREHFINYLTQCHCYHVAEFELPKTMNNSAENHTANSSMAYPSLVAMASQRQAKIQRYKQKKELEHRLSAMKSAVESGQADDERVREYYLLHLQRWIDISLEEIESIDQEIKILRERDSSREASTSNSSRQERPPVKPFILTRNMAQAKVFGAGYPSLPTMTVSDWYEQHRKYGALPDQGIAKAAPEEFRKAAQQQEEQEEKEEEDDEQTLHRAREWDDWKDTHPRGYGNRQNMG

SEQ ID NO: 118726 - DNA, 1020 bp, Artificial Sequence
  derived and/or modified sequence
atggccgctgaagacgagcttcaactcccacggctgcccgagttgtttgagacaggtcggcagctgctggatgaggtagaggtggctactgagcccgccgggagcagaatcgtgcaggagaaagtcttcaaggggctggatctcctggaaaaggcagccgagatgcttagtcagttagacctattcagccggaatgaagacctggaggagattgccagtaccgatctgaagtacttattggtacccgcatttcaaggggcgttgacaatgaagcaagtcaatccctctaaacgtttagatcacctacagcgcgcgcgagaacactttattaactacttaacacagtgccattgctaccatgtagcagaatttgaactcccaaagactatgaacaatagtgccgaaaatcatacagcaaattcctccatggcctacccctccctggtggctatggcgtctcaaagacaagctaagatccagcgatacaagcagaaaaaggagcttgaacaccgcttgtccgctatgaaatctgcggtagagagcggccaagccgatgatgaacgtgtccgggagtattatctgctgcatttgcagcgctggatcgacatttcactggaagaaatagagtctatagatcaggagattaagatccttcgtgagagagactcgagtcgcgaggcgtctactagcaactcaagcagacaagaaagaccaccagtgaaaccctttattctgacgaggaatatggcccaagcaaaagtgttcggcgccggataccccagcctgccgactatgaccgtcagtgactggtatgagcagcaccgcaagtatggggcactccccgatcaaggaatcgccaaagcagcccccgaggaattccgtaaggctgcccagcaacaggaggagcaagaggaaaaggaagaggaggacgacgagcagactttgcatcgcgcccgcgaatgggatgactggaaggatacccatccacgaggctacgggaaccgccagaatatgggatag

SEQ ID NO: 118727 - DNA, 1020 bp, Artificial Sequence
  derived and/or modified sequence
atggccgccgaagatgaactgcagctcccgagactgcccgagctgttcgagactggaaggcaactgctggacgaggtggaggtggcaacagagcctgcaggtagtcggattgtgcaggagaaagtgtttaaggggctggacttgctggaaaaagccgctgagatgctcagccaattagacttattctcaaggaacgaggacttagaagagatcgcctccaccgatcttaaatacctgttggtcccagcattccagggagcgttgaccatgaagcaagttaatccttctaagagattagaccacctccaaagggctagagagcacttcattaactacctgacccagtgccactgctaccatgtggccgaatttgaactgcctaaaactatgaacaactcagccgaaaatcataccgcgaattcatctatggcgtatcctagcttagtggcaatggcctctcagaggcaagcaaagattcagcggtataagcagaaaaaagaacttgaacatagactatccgccatgaaaagcgctgtcgagtccggccaggcagacgacgaaagagtacgggagtattatctactgcacctgcagagatggatagacatatccctggaagaaattgagagtattgaccaagaaattaaaatcttgagggagagggatagttcgagggaagcaagtacgagcaattcaagccgccaggaacgaccacctgttaaaccttttattctcacccgaaacatggcccaggcaaaagtgtttggagcgggttatccgtccttgccgaccatgaccgtgtcggattggtatgaacagcacaggaaatacggagcgctgccagatcaagggatagctaaagccgcacccgaagagttccgcaaggccgcacagcagcaggaggagcaggaagagaaagaggaggaggacgatgagcagaccctccatcgcgcccgtgaatgggacgactggaaagacacacacccacggggttatggaaaccggcagaacatgggctag

SEQ ID NO: 118728 - DNA, 1862 bp, Artificial Sequence
  derived and/or modified sequence
acttcgcgctcaagcgaccggatcttcaaaccgtgggagtggtgcggcggctagagtccctggactcctcaacctagggagctactcgcgaggtaaggggcgcgccagactggctcctaaaacgcactcgctcgtccgcactcctcgcgctccgaattcagcctcgcctcacccgggcttcagagcccacagaacttctcagccccgtgtcggcgacgaggagctcatggtaaaacagcgcctagggttttgcttgtttgtttgcttttaacagatgcctacgacttgtaacgggctgcctggtaaaatgagtctatggaaacggttgccagggccggctaacagcggctcccggaagtcctttgatgctttgttaacagtgaagctactggaccaatgaggtgcttcttccggttttgtccgcgctcgcctaattcttctttatcaaggttgcctttgaccccggaaaagagatcttccgggttcctctctccccaagatggctgctgaggacgagttacagctgccgcggctccccgagctgttcgaaactggtagacagttactggacgaagtagaagtggcgactgaacccgccggttcccggatagtccaggagaaggtgttcaagggcttggacctccttgagaaggctgccgaaatgttatcgcagctcgacttgttcagccgaaatgaagatttggaagagattgcttccaccgacctgaagtaccttttggtgccagcgtttcaaggagccctcaccatgaaacaagtcaaccccagcaagcgtctagatcatttgcagcgggctcgagaacactttataaactacttaactcagtgccattgctatcatgtggcagagtttgagctgcccaaaaccatgaacaactctgctgaaaatcacactgccaattcctccatggcttatcctagtctcgttgctatggcatctcaaagacaggctaaaatacagagatacaagcagaagaaggagttggagcataggttgtctgcaatgaaatctgctgtggaaagtggtcaagcagatgatgagcgtgttcgtgaatattatcttcttcaccttcagaggtggattgatatcagcttagaagagattgagagcattgaccaggaaataaagatcctgagagaaagagactcttcaagagaggcatcaacttctaactcatctcgccaggagaggcctccagtgaaacccttcattctcactcggaacatggctcaagccaaagtatttggagctggttatccaagtctgccaactatgacggtgagtgactggtatgagcaacatcggaaatatggagcattaccggatcagggaatagccaaggcagcaccagaggaattcagaaaagcagctcagcaacaggaagaacaagaagaaaaggaggaagaggatgatgaacaaacactccacagagcccgggagtgggatgactggaaggacacccatcctaggggctatgggaaccgacagaacatgggctgatcttcccacaacaccacaggactgcagggtgcacaactcccctgccaaggaaaaccatgcagtcctcccctccctggtctcctgcttcagctctgtacaacgagggcaaagatgctaaatcttgctttgcattcagtaaagtgtcaagtgattaagtgtgtatttgtaccctagatgatatgaaccagcagtcttgttttggcatcatcctcatcatgttgtattccagcttcttaagtggaaggaaaagagtgctgagaaatggctctgtataatctatggctatccgaattctctgaaaaaataataaaagtcccctctattatatgagcctgtacagaaa

SEQ ID NO: 118729 - DNA, 1666 bp, Artificial Sequence
  derived and/or modified sequence
cgaccggatcttcaaaccgtgggagtggtgcggcggctagagtccctggactcctcaacctagggagctactcgcgagatgcctacgacttgtaacgggctgcctggtaaaatgagtctatggaaacggttgccagggccggctaacagcggctcccggaagtcctttgatgctttgttaacagtgaagctactggaccaatgaggtgcttcttccggttttgtccgcgctcgcctaattcttctttatcaaggttgcctttgaccccggaaaagagatcttccgggttcctctctccccaagatggctgctgaggacgagttacagctgccgcggctccccgagctgttcgaaactggtagacagttactggacgaagtagaagtggcgactgaacccgccggttcccggatagtccaggagaaggtgttcaagggcttggacctccttgagaaggctgccgaaatgttatcgcagctcgacttgttcagccgaaatgaagatttggaagagattgcttccaccgacctgaagtaccttttggtgccagcgtttcaaggagccctcaccatgaaacaagtcaaccccagcaagcgtctagatcatttgcagcgggctcgagaacactttataaactacttaactcagtgccattgctatcatgtggcagagtttgagctgcccaaaaccatgaacaactctgctgaaaatcacactgccaattcctccatggcttatcctagtctcgttgctatggcatctcaaagacaggctaaaatacagagatacaagcagaagaaggagttggagcataggttgtctgcaatgaaatctgctgtggaaagtggtcaagcagatgatgagcgtgttcgtgaatattatcttcttcaccttcagaggtggattgatatcagcttagaagagattgagagcattgaccaggaaataaagatcctgagagaaagagactcttcaagagaggcatcaacttctaactcatctcgccaggagaggcctccagtgaaacccttcattctcactcggaacatggctcaagccaaagtatttggagctggttatccaagtctgccaactatgacggtgagtgactggtatgagcaacatcggaaatatggagcattaccggatcagggaatagccaaggcagcaccagaggaattcagaaaagcagctcagcaacaggaagaacaagaagaaaaggaggaagaggatgatgaacaaacactccacagagcccgggagtgggatgactggaaggacacccatcctaggggctatgggaaccgacagaacatgggctgatcttcccacaacaccacaggactgcagggtgcacaactcccctgccaaggaaaaccatgcagtcctcccctccctggtctcctgcttcagctctgtacaacgagggcaaagatgctaaatcttgctttgcattcagtaaagtgtcaagtgattaagtgtgtatttgtaccctagatgatatgaaccagcagtcttgttttggcatcatcctcatcatgttgtattccagcttcttaagtggaaggaaaagagtgctgagaaatggctctgtataatctatggctatccgaattctctgaaaaaataataaaagtcccctctattatatgagcctgtacagaaa

SEQ ID NO: 118730 - DNA, 1020 bp, Artificial Sequence
  derived and/or modified sequence
atggctgctgaagatgagctgcagctgccccggctgcctgagctgtttgagaccggccggcagctgctggatgaggtggaggtggccacagagcctgctggcagcagaattgtgcaggagaaggtgttcaagggcctggacctgctggagaaggctgctgagatgctgagccagctggacctcttcagcagaaatgaagacctggaggagatcgccagcacagacctgaagtacctgctggtgcctgccttccagggcgccctgaccatgaagcaggtgaaccccagcaagaggctggaccacctgcagagggcccgggagcacttcatcaactacctgacccagtgccactgctaccacgtggccgagtttgagctgcccaagaccatgaacaacagcgctgagaaccacacagccaacagctccatggcctaccccagcctggtggccatggccagccagaggcaggccaagatccagcgctacaagcagaagaaggagctggagcaccggctgagcgccatgaagtctgctgtggagagcggccaggctgatgatgagcgggtgcgggagtactacctgctgcacctgcagcgctggattgacatcagcctggaggagattgagagcattgaccaggagatcaagatcctgcgggagcgggacagcagccgggaggccagcaccagcaacagcagccggcaggagcggccccctgtgaagcccttcatcctgaccaggaacatggcccaggccaaggtgtttggagctggctaccccagcctgcccaccatgacagtgtctgactggtatgagcagcacaggaaatatggagccctgcctgaccagggcatcgccaaggccgcccctgaggagttcaggaaggccgcccagcagcaggaggagcaggaggagaaggaggaggaggatgatgagcagaccctgcaccgggcccgggagtgggatgactggaaggacacccacccccggggctacggcaaccggcagaacatgggctag

SEQ ID NO: 118731 - DNA, 1020 bp, Artificial Sequence
  derived and/or modified sequence
atggccgccgaggacgagctgcagctgccccggctgcccgagctgttcgagaccggaaggcagcttcttgatgaggtggaggttgctactgaacctgcagggagtaggatagtacaggaaaaggtgttcaaagggctggatctgctggagaaagctgccgagatgctgtctcagctcgacctcttttcaagaaacgaggatctagaggagattgcgtcaacggaccttaagtatctcctagtgccggccttccagggagcattaaccatgaagcaggtgaatccctcaaagagactcgaccatctgcagagagcacgggagcacttcatcaactacttaacccagtgccactgttatcatgttgcggagtttgagctcccaaagacaatgaacaattctgccgagaatcacacagccaatagtagcatggcttatccttctctggttgcgatggcttcccagaggcaagctaaaatccaaaggtataaacagaaaaaggaactcgagcaccggcttagcgccatgaagtcagcggtcgagtcaggccaggcagatgatgaacgcgtgcgcgagtattacctgcttcatctccagcggtggattgatattagtctggaggaaatcgagtccattgaccaggagataaagatcttacgtgagcgagactcttctagggaggcctcaacttccaattcctcaagacaggaaaggccaccagtgaaacccttcatcctgacccgcaatatggcccaggcaaaggtgttcggcgctgggtacccctcactgcccaccatgacagtttccgattggtacgagcagcatcgcaagtacggagcacttcccgaccagggtatcgcgaaggccgcaccagaggagttcaggaaggccgctcagcagcaggaagaacaggaagaaaaggaagaggaggatgatgaacaaactctgcaccgtgcccgggagtgggacgattggaaggatacgcatcctcgtggctacgggaacaggcagaacatgggctag

SEQ ID NO: 118732 - DNA, 1020 bp, Artificial Sequence
  derived and/or modified sequence
atggccgccgaggacgagctgcagctgccccggctgcccgagctgtttgagaccggcaggcagctgctggatgaggtggaagtggcaacggagcccgcgggaagccgtatagtgcaggaaaaggttttcaaaggactggacctgttggagaaggcggcagagatgctttcccagctcgacctatttagtcgaaacgaggatttggaggaaatcgcctcaaccgaccttaagtacctgctggtgccagcgttccagggtgctttgacaatgaagcaggtgaatccatccaagcgcctggatcatttgcaaagggcccgagagcacttcataaattatctgactcagtgtcattgctaccacgtggccgagttcgagctgccaaaaaccatgaataacagcgctgaaaaccacacagccaactcctcaatggcatacccctctctagttgctatggctagccagcgacaggccaagatccagaggtacaagcagaaaaaagaactcgaacaccgcctttccgcaatgaagtcagccgtggagtctggccaagccgatgacgaacgcgtaagagagtattacctgttgcaccttcagcgatggatcgacattagccttgaagagatcgagtccattgatcaggaaatcaagattctacgagagcgtgactctagcagggaagctagcacttcaaattctagcaggcaagagcggccgcccgtcaaaccttttatattaacccgtaacatggcacaggccaaggttttcggagcagggtacccaagcctgcccaccatgaccgtttctgattggtatgagcaacatagaaaatatggcgctctgcctgatcaggggattgcaaaagccgcccctgaggaatttagaaaggcggcgcaacagcaggaggagcaagaagagaaagaggaagaggacgacgagcagactctccatcgtgcgcgagaatgggacgactggaaagatacacacccaagaggatatggcaaccggcaaaatatgggctag

SEQ ID NO: 118733 - DNA, 1020 bp, Artificial Sequence
  derived and/or modified sequence
atggccgctgaagatgagttgcagctgcccagattaccagaattattcgagaccggtagacagcttctggatgaagtcgaggtggccactgagcccgcaggctcacgtatcgtgcaggaaaaagttttcaaaggactggatttactggagaaggccgcagagatgctgtcccagctcgatttgttctcacgcaacgaagatctcgaagaaatagcatctactgaccttaagtatttgctggtgccagcattccagggggctctgactatgaagcaagtgaatccctcgaagcgactggaccatttacagagggcccgagagcattttatcaactatttaacccagtgccattgctatcacgtcgccgagtttgagctgccgaaaaccatgaataacagtgctgagaatcatacagccaatagttctatggcatacccctctctggttgcaatggcgtctcagcgccaggccaagatacagagatacaagcagaagaaagaactggaacaccggcttagtgcgatgaagtcagctgtggaaagcggccaagccgacgatgagagagtgagggagtattacttactccatctgcagcgatggatagacattagcctggaggagattgaaagcattgaccaggagatcaaaatcctgagggaaagagattcttcccgggaggcctccacctcaaacagttcaagacaggaaagaccaccagtcaagccctttatcttgaccaggaacatggcacaggctaaggtgtttggagctggctatcctagtttacccaccatgacagtgtctgattggtatgaacaacaccggaaatatggcgctctgcctgaccagggaatcgccaaggcggctcctgaggagttcaggaaggcagcgcaacaacaggaggagcaggaagagaaggaagaggaagacgatgaacagacattacacagagcccgtgagtgggatgattggaaggacacacatcctcgcggttacgggaaccgccaaaatatggggtag

SEQ ID NO: 118734 - DNA, 1020 bp, Artificial Sequence
  derived and/or modified sequence
atggccgcagaagacgagcttcagcttccaagactgccagagctgttcgagaccgggaggcagctgctggacgaggtggaggtcgccactgagccggctggctcgcgcatcgtgcaggaaaaggtgttcaagggcctggacctgcttgaaaaagcagccgagatgctatcgcagctggacttattcagtaggaatgaggacctggaggagatcgcctccactgatctgaagtacctgttagtaccagcctttcagggagccctaaccatgaaacaggtgaatccatcgaaaagactggatcatttgcagagagcacgcgagcatttcatcaactatctcacacagtgccactgttatcatgtggccgagttcgaactacctaagaccatgaacaactctgccgagaaccacaccgctaactccagtatggcttatccttcccttgtggccatggcttctcagaggcaggctaagattcagaggtataagcagaaaaaggaactagagcaccggctgtccgccatgaagagcgcagtggagtccgggcaggccgacgatgagcgtgttagagaatactacctgctgcacttgcaacggtggatcgacatttcgcttgaggagattgagtctatagatcaagagatcaagatcctgcgggaacgagacagtagcagggaggccagtacttccaactcttcaagacaagaacgaccacctgtcaaaccatttatcctaaccaggaacatggctcaggccaaggtgtttggggctggctatccgagcctgccgacaatgactgtgtccgactggtacgagcagcaccgcaaatacggcgctttacctgaccaaggcatcgctaaagccgctccggaagagtttcggaaggccgcacagcagcaagaagaacaggaagaaaaggaggaggaggatgatgaacagacactacatcgggctagggaatgggacgattggaaggacacgcacccaaggggctatggaaataggcagaatatgggctag

SEQ ID NO: 118735 - DNA, 1020 bp, Artificial Sequence
  derived and/or modified sequence
atggccgccgaggacgagctgcagctgcccagactgcccgagctgttcgagaccggcagacagctgctggacgaggtggaggtggccaccgagcccgccggcagcagaatcgtgcaggagaaggtgttcaagggcctggacctgctggagaaggccgccgagatgctgagccagctggacctgttcagcagaaacgaggacctggaggagatcgccagcaccgacctgaagtacctgctggtgcccgccttccagggcgccctgaccatgaagcaggtgaaccccagcaagagactggaccacctgcagagagccagagagcacttcatcaactacctgacccagtgccactgctaccacgtggccgagttcgagctgcccaagaccatgaacaacagcgccgagaaccacaccgccaacagcagcatggcctaccccagcctggtggccatggccagccagagacaggccaagatccagagatacaagcagaagaaggagctggagcacagactgagcgccatgaagagcgccgtggagagcggccaggccgacgacgagagagtgagagagtactacctgctgcacctgcagagatggatcgacatcagcctggaggagatcgagagcatcgaccaggagatcaagatcctgagagagagagacagcagcagagaggccagcaccagcaacagcagcagacaggagagaccccccgtgaagcccttcatcctgaccagaaacatggcccaggccaaggtgttcggcgccggctaccccagcctgcccaccatgaccgtgagcgactggtacgagcagcacagaaagtacggcgccctgcccgaccagggcatcgccaaggccgcccccgaggagttcagaaaggccgcccagcagcaggaggagcaggaggagaaggaggaggaggacgacgagcagaccctgcacagagccagagagtgggacgactggaaggacacccaccccagaggctacggcaacagacagaacatgggctag

SEQ ID NO: 118736 - protein, 258 aa, Artificial Sequence
  derived and/or modified sequence
MLPLCLVAALLLAAGPGPSLGDEAIHCPPCSEEKLARCRPPVGCEELVREPGCGCCATCALGLGMPCGVYTPRCGSGLRCYPPRGVEKPLHTLMHGQGVCMELAEIEAIQESLQPSDKDEGDHPNNSFSPCSAHDRRCLQKHFAKIRDRSTSGGKMKVNGAPREDARPVPQGSCQSELHRALERLAASQSRTHEDLYIIPIPNCDRNGNFHPKQCHPALDGQRGKCWCVDRKTGVKLPGGLEPKGELDCHQLADSFRE

SEQ ID NO: 118737 - protein, 158 aa, Artificial Sequence
  derived and/or modified sequence
MELAEIEAIQESLQPSDKDEGDHPNNSFSPCSAHDRRCLQKHFAKIRDRSTSGGKMKVNGAPREDARPVPQGSCQSELHRALERLAASQSRTHEDLYIIPIPNCDRNGNFHPKQCHPALDGQRGKCWCVDRKTGVKLPGGLEPKGELDCHQLADSFRE

SEQ ID NO: 118738 - DNA, 777 bp, Artificial Sequence
  derived and/or modified sequence
atgctacccctctgtctggtcgcggcattgctcctggccgctggcccgggcccgagtctgggcgacgaagcaatccattgcccaccgtgctccgaggagaagcttgctcgctgtagaccaccagtaggctgtgaggagctcgtaagggagcccggctgcgggtgctgcgccacctgtgctctgggattaggcatgccatgtggggtgtatacaccacggtgtggatcaggactcaggtgttacccaccgcgcggtgtggaaaaaccgctacacacgttgatgcatggacagggcgtctgcatggaactggcggagattgaagcgattcaggaaagcttgcagcctagcgataaagatgagggcgatcatccaaataatagcttcagtccatgttcagcacatgaccgccggtgcttacagaaacatttcgccaagatcagagatcggtcaacctccggggggaaaatgaaagtgaatggggcacctcgagaggatgctcggcctgtgccacaggggtcgtgtcaaagtgagcttcaccgcgccttggagcgtttggcggcttcccagtctcgcacccacgaagacctgtacataatccccataccaaattgcgacagaaacggcaacttccaccccaagcagtgccaccccgcactcgacggccagcggggaaagtgttggtgcgtcgaccgcaaaactggcgtgaaactgcctggcggcttggagccgaagggggagctcgattgccaccagctcgctgactcttttcgggagtag

SEQ ID NO: 118739 - DNA, 477 bp, Artificial Sequence
  derived and/or modified sequence
atggagctcgccgaaatcgaggcaatccaggagtctctccagccatccgataaggacgagggggaccaccctaataattcatttagtccatgcagcgcacacgacagaagatgcctgcagaagcatttcgcaaaaattcgtgatcgcagcacgagtggtggaaagatgaaggttaatggggccccccgagaggacgctcgtccagtcccacaggggagttgtcagtccgagcttcaccgtgctctggagcggctggccgcctcacagtcccgcacccacgaggatctttacatcatccccatcccaaattgcgacaggaacggaaactttcatcccaaacagtgccatccagccctagacggccagagaggtaagtgctggtgtgtggatcgtaaaacaggcgtgaagctgccaggtggactcgagccaaagggagaactcgactgccatcaacttgcggatagcttccgggagtag

SEQ ID NO: 118740 - DNA, 2200 bp, Artificial Sequence
  derived and/or modified sequence
cccctgcccctcgccgcccgccgcctgcctgggccgggccgaggatgcggcgcagcgcctcggcggccaggcttgctcccctccggcacgcctgctaacttcccccgctacgtccccgttcgcccgccgggccgccccgtctccccgcgccctccgggtcgggtcctccaggagcgccaggcgctgccgccgtgtgccctccgccgctcgcccgcgcgcccgcgctccccgcctgcgcccagcgccccgcgcccgcgcccagtcctcgggcggtcatgctgcccctctgcctcgtggccgccctgctgctggccgccgggcccgggccgagcctgggcgacgaagccatccactgcccgccctgctccgaggagaagctggcgcgctgccgcccccccgtgggctgcgaggagctggtgcgagagccgggctgcggctgttgcgccacttgcgccctgggcttggggatgccctgcggggtgtacaccccccgttgcggctcgggcctgcgctgctacccgccccgaggggtggagaagcccctgcacacactgatgcacgggcaaggcgtgtgcatggagctggcggagatcgaggccatccaggaaagcctgcagccctctgacaaggacgagggtgaccaccccaacaacagcttcagcccctgtagcgcccatgaccgcaggtgcctgcagaagcacttcgccaaaattcgagaccggagcaccagtgggggcaagatgaaggtcaatggggcgccccgggaggatgcccggcctgtgccccagggctcctgccagagcgagctgcaccgggcgctggagcggctggccgcttcacagagccgcacccacgaggacctctacatcatccccatccccaactgcgaccgcaacggcaacttccaccccaagcagtgtcacccagctctggatgggcagcgtggcaagtgctggtgtgtggaccggaagacgggggtgaagcttccggggggcctggagccaaagggggagctggactgccaccagctggctgacagctttcgagagtgaggcctgccagcaggccagggactcagcgtcccctgctactcctgtgctctggaggctgcagagctgacccagagtggagtctgagtctgagtcctgtctctgcctgcggcccagaagtttccctcaaatgcgcgtgtgcacgtgtgcgtgtgcgtgcgtgtgtgtgtgtttgtgagcatgggtgtgcccttggggtaagccagagcctggggtgttctctttggtgttacacagcccaagaggactgagactggcacttagcccaagaggtctgagccctggtgtgtttccagatcgatcctggattcactcactcactcattccttcactcatccagccacctaaaaacatttactgaccatgtactacgtgccagctctagttttcagccttgggaggttttattctgacttcctctgattttggcatgtggagacactcctataaggagagttcaagcctgtgggagtagaaaaatctcattcccagagtcagaggagaagagacatgtaccttgaccatcgtccttcctctcaagctagccagagggtgggagcctaaggaagcgtggggtagcagatggagtaatggtcacgaggtccagacccactcccaaagctcagacttgccaggctccctttctcttcttccccaggtccttcctttaggtctggttgttgcaccatctgcttggttggctggcagctgagagccctgctgtgggagagcgaagggggtcaaaggaagacttgaagcacagagggctagggaggtggggtacatttctctgagcagtcagggtgggaagaaagaatgcaagagtggactgaatgtgcctaatggagaagacccacgtgctaggggatgaggggcttcctgggtcctgttccctaccccatttgtggtcacagccatgaagtcaccgggatgaacctatccttccagtggctcgctccctgtagctctgcctccctctccatatctccttcccctacacctccctccccacacctccctactcccctgggcatcttctggcttgactggatggaaggagacttaggaacctaccagttggccatgatgtcttttcttctttttcttttttttaacaaaacagaacaaaaccaaaaaatgtccagatgat

SEQ ID NO: 118741 - DNA, 1187 bp, Artificial Sequence
  derived and/or modified sequence
agccgctcagccccctgcccctcgccgcccgccgcctgcctgggccgggccgaggatgcggcgcagcgcctcggcggccaggcttgctcccctccggcacgcctgctaacttcccccgctacgtccccgttcgcccgccgggccgccccgtctccccgcgccctccgggtcgggtcctccaggagcgccaggcgctgccgccgcgtgtgcatggagctggcggagatcgaggccatccaggaaagcctgcagccctctgacaaggacgagggtgaccaccccaacaacagcttcagcccctgtagcgcccatgaccgcaggtgcctgcagaagcacttcgccaaaattcgagaccggagcaccagtgggggcaagatgaaggtcaatggggcgccccgggaggatgcccggcctgtgccccagggctcctgccagagcgagctgcaccgggcgctggagcggctggccgcttcacagagccgcacccacgaggacctctacatcatccccatccccaactgcgaccgcaacggcaacttccaccccaagcagtgtcacccagctctggatgggcagcgtggcaagtgctggtgtgtggaccggaagacgggggtgaagcttccggggggcctggagccaaagggggagctggactgccaccagctggctgacagctttcgagagtgaggcctgccagcaggccagggactcagcgtcccctgctactcctgtgctctggaggctgcagagctgacccagagtggagtctgagtctgagtcctgtctctgcctgcggcccagaagtttccctcaaatgcgcgtgtgcacgtgtgcgtgtgcgtgcgtgtgtgtgtgtttgtgagcatgggtgtgcccttggggtaagccagagcctggggtgttctctttggtgttacacagcccaagaggactgagactggcacttagcccaagaggtctgagccctggtgtgtttccagatcgatcctggattcactcactcactcattccttcactcatccagccacctaaaaacatttactgaccatgtactacgtgccagctctagttttcagccttgggaggttttattctgacttcctctgattttggcatgtggagacactcctataaggagagttcaagcctgtgggagtagaaaaatctcattcccagagtcagagga

SEQ ID NO: 118742 - DNA, 777 bp, Artificial Sequence
  derived and/or modified sequence
atgctgcccctgtgcctggtggccgccctgctgctggccgccggccctggccccagcctgggagatgaggccatccactgccccccctgcagcgaggagaagctggcccgctgccggccccctgtgggctgtgaggagctggtgcgggagcccggctgcggctgctgtgccacctgtgccctgggcctgggcatgccctgtggggtgtacaccccccgctgtggcagcggcctgcgctgctacccaccccggggcgtggagaagcccctgcacaccctgatgcacggccagggcgtgtgcatggagctggccgagattgaggccatccaggagagcctgcagcccagcgacaaggatgaaggagaccaccccaacaacagcttcagcccctgcagcgcccatgaccggcgctgcctgcagaagcactttgccaagatccgggacaggagcaccagcggcggcaagatgaaggtgaatggagccccccgggaggatgcccggcctgtgccccagggcagctgccagagcgagctgcaccgggccctggagcggctggccgccagccagagcaggacccatgaggacctgtacatcatccccatccccaactgtgacagaaatggaaacttccaccccaagcagtgccacccagccctggatggccagaggggcaagtgctggtgtgtggacaggaagacaggagtgaagctgcccggcggcctggagcccaagggggagctggactgccaccagctggccgacagcttccgggagtag

SEQ ID NO: 118743 - DNA, 477 bp, Artificial Sequence
  derived and/or modified sequence
atggagctggccgagattgaggccatccaggagagcctgcagcccagcgacaaggatgaaggagaccaccccaacaacagcttcagcccctgcagcgcccatgaccggcgctgcctgcagaagcactttgccaagatccgggacaggagcaccagcggcggcaagatgaaggtgaatggagccccccgggaggatgcccggcctgtgccccagggcagctgccagagcgagctgcaccgggccctggagcggctggccgccagccagagcaggacccatgaggacctgtacatcatccccatccccaactgtgacagaaatggaaacttccaccccaagcagtgccacccagccctggatggccagaggggcaagtgctggtgtgtggacaggaagacaggagtgaagctgcccggcggcctggagcccaagggggagctggactgccaccagctggccgacagcttccgggagtag

SEQ ID NO: 118744 - DNA, 777 bp, Artificial Sequence
  derived and/or modified sequence
atgctgcccctgtgcctggtggccgccctgctgctggccgccggccctggcccaagcctcggggatgaagccatccactgccccccttgtagtgaggagaaactcgcgaggtgtcggccaccagtgggctgcgaagagctggtgcgggaacccggatgcgggtgctgcgctacatgtgcactgggactgggaatgccatgcggcgtctacaccccacgttgtggatccggcctgcgttgctacccaccccgcggcgtcgaaaagcccttgcacacgctcatgcatggccagggcgtgtgcatggaacttgccgagattgaagctatccaagagtccctccaaccctctgataaggatgaaggggaccatcctaacaatagcttcagcccctgttccgcacatgatcgcaggtgcttgcagaaacactttgctaaaattcgagaccgaagcacttccggggggaaaatgaaagtgaatggcgccccaagagaagatgcacggcccgtaccccagggaagctgccagtctgagctacaccgggcccttgagagacttgccgcatcccagagcaggacacacgaagatctgtacattattcccatccctaactgcgaccggaatgggaactttcacccaaaacagtgtcaccccgctttagacgggcagcggggaaaatgctggtgcgttgacagaaaaactggcgttaagctgcccggggggcttgaaccgaagggggaactagattgccaccaactcgccgattcgttcagggaatag

SEQ ID NO: 118745 - DNA, 477 bp, Artificial Sequence
  derived and/or modified sequence
atggagctggccgagatcgaggccatccaggagagcctgcagcccagcgacaaggatgagggagaccatcctaacaattcatttagtccctgttctgcacacgatcgaagatgcctgcagaagcactttgctaagatcagagaccggtctactagcgggggcaagatgaaggtgaacggagcccctcgcgaagacgcacgcccagtgcctcagggctcctgccagtcggaactccaccgcgctctggagcggttggctgcgtctcagagtagaacacatgaagacctctacatcatcccaattccgaactgcgaccgtaatggcaacttccatccaaagcagtgtcaccccgcgctggatgggcagcgaggaaaatgttggtgtgttgacaggaaaactggtgtgaagttaccaggagggctggaacccaagggggaactcgattgtcaccagttagcagattctttccgggagtag

SEQ ID NO: 118746 - DNA, 777 bp, Artificial Sequence
  derived and/or modified sequence
atgttaccgttatgcctcgtggccgctcttttgcttgctgccggtcccggtcccagtcttggggacgaagccatccactgtccgccttgctctgaagagaagcttgcccgttgtcgtccgccagtgggttgtgaagaactcgtgagggaacccggatgtgggtgctgcgccacctgcgcccttgggctgggaatgccatgcggcgtatacactcctagatgtggttccggcctgcgctgctatcctcctcgtggtgtcgaaaagccccttcatactctgatgcacggtcaaggcgtgtgcatggagttagcagagattgaggcgattcaggagtcactgcagcctagtgacaaagacgagggagatcatcctaacaacagtttctcaccctgcagtgcgcatgatcgtcggtgtcttcaaaaacatttcgccaagatacgggatagatccacctccggtgggaaaatgaaggtcaacggcgctccacgggaggacgcacgacctgtgcctcaagggagctgccagagcgagctgcaccgggctcttgagagacttgccgcaagtcagtctaggacgcatgaggatctctatattattcccatacctaattgcgaccgtaacggcaacttccacccgaaacaatgtcatcctgcgctagatggacaaaggggtaagtgctggtgcgtggacaggaagaccggagtcaaactgccaggcggactcgaaccaaagggtgagttggactgccaccagcttgcagatagtttccgagagtag

SEQ ID NO: 118747 - DNA, 477 bp, Artificial Sequence
  derived and/or modified sequence
atggagctggccgaaatagaagcaatacaggagtctttgcagccttccgacaaagacgagggcgaccacccgaataatagcttctccccttgcagcgcccacgaccggcgatgcctccaaaaacattttgcaaagatacgggataggagtacatcaggtggcaaaatgaaggtgaatggagcccctagagaagatgccaggccagttccacagggaagctgccagagtgaactccacagggctttggagagacttgcagcctctcagtcacggacccatgaagacctctacatcatacccatcccaaactgcgaccgcaacggcaattttcaccccaagcagtgccatccagctttggatggacagcgtggcaagtgctggtgtgtggaccgcaagacaggtgtgaaacttcccggaggcctcgaaccgaagggcgagctggattgtcatcaactcgccgatagcttcagggagtag

SEQ ID NO: 118748 - DNA, 777 bp, Artificial Sequence
  derived and/or modified sequence
atgctgcccctgtgcctggtggccgccctgctgctggccgccggccccggccccagcctgggcgacgaggccatccactgccccccctgcagcgaggagaagctggccagatgcagaccccccgtgggctgcgaggagctggtgagagagcccggctgcggctgctgcgccacctgcgccctgggcctgggcatgccctgcggcgtgtacacccccagatgcggcagcggcctgagatgctacccccccagaggcgtggagaagcccctgcacaccctgatgcacggccagggcgtgtgcatggagctggccgagatcgaggccatccaggagagcctgcagcccagcgacaaggacgagggcgaccaccccaacaacagcttcagcccctgcagcgcccacgacagaagatgcctgcagaagcacttcgccaagatcagagacagaagcaccagcggcggcaagatgaaggtgaacggcgcccccagagaggacgccagacccgtgccccagggcagctgccagagcgagctgcacagagccctggagagactggccgccagccagagcagaacccacgaggacctgtacatcatccccatccccaactgcgacagaaacggcaacttccaccccaagcagtgccaccccgccctggacggccagagaggcaagtgctggtgcgtggacagaaagaccggcgtgaagctgcccggcggcctggagcccaagggcgagctggactgccaccagctggccgacagcttcagagagtag

SEQ ID NO: 118749 - DNA, 477 bp, Artificial Sequence
  derived and/or modified sequence
atggagctggccgagatcgaggccatccaggagagcctgcagcccagcgacaaggacgagggcgaccaccccaacaacagcttcagcccctgcagcgcccacgacagaagatgcctgcagaagcacttcgccaagatcagagacagaagcaccagcggcggcaagatgaaggtgaacggcgcccccagagaggacgccagacccgtgccccagggcagctgccagagcgagctgcacagagccctggagagactggccgccagccagagcagaacccacgaggacctgtacatcatccccatccccaactgcgacagaaacggcaacttccaccccaagcagtgccaccccgccctggacggccagagaggcaagtgctggtgcgtggacagaaagaccggcgtgaagctgcccggcggcctggagcccaagggcgagctggactgccaccagctggccgacagcttcagagagtag

SEQ ID NO: 118750 - protein, 282 aa, Artificial Sequence
  derived and/or modified sequence
MERPSLRALLLGAAGLLLLLLPLSSSSSSDTCGPCEPASCPPLPPLGCLLGETRDACGCCPMCARGEGEPCGGGGAGRGYCAPGMECVKSRKRRKGKAGAAAGGPGVSGVCVCKSRYPVCGSDGTTYPSGCQLRAASQRAESRGEKAITQVSKGTCEQGPSIVTPPKDIWNVTGAQVYLSCEVIGIPTPVLIWNKVKRGHYGVQRTELLPGDRDNLAIQTRGGPEKHEVTGWVLVSPLSKEDAGEYECHASNSQGQASASAKITVVDALHEIPVKKGEGAEL

SEQ ID NO: 118751 - DNA, 849 bp, Artificial Sequence
  derived and/or modified sequence
atggagaggccttcactacgcgctttacttttgggggcagccggattgttgctccttctgctgcccctttcttcctctagtagcagcgacacgtgtgggccgtgcgagcctgcctcctgtcctcctctaccccccctgggatgtttgctaggcgagaccagggacgcctgtggctgctgtcccatgtgcgcacggggcgagggcgaaccctgcggcggaggaggcgctggaaggggttactgtgcccctgggatggagtgcgtcaagagcaggaagcggcgaaaaggtaaggcaggagccgctgcgggcggcccaggggtttctggcgtgtgtgtttgcaaaagcaggtacccagtctgcggctccgatggaaccacctacccatccgggtgtcagctcagagctgcatctcaacgtgccgagtcccgaggcgagaaggctatcacacaggtgtctaagggtacatgcgaacaaggaccgtcaatcgtgaccccacccaaggacatctggaacgttacaggagctcaagtgtatctgtcctgcgaagtgatcggcatcccaactcctgtgctaatatggaataaagttaaaagaggacattatggcgttcaacgaactgaattgctgcccggtgacagagataacttagcaattcagacccgcggcggccccgagaaacatgaggttacaggctgggttctggttagtcccctatctaaggaagacgctggggaatatgaatgtcatgcctcaaactcacagggccaggcttcagcttcggctaaaataaccgtggtggacgccctgcatgaaattcccgtgaaaaaaggcgagggagccgagctctag

SEQ ID NO: 118752 - DNA, 1427 bp, Artificial Sequence
  derived and/or modified sequence
actcgcgcccttgccgctgccaccgcaccccgccatggagcggccgtcgctgcgcgccctgctcctcggcgccgctgggctgctgctcctgctcctgcccctctcctcttcctcctcttcggacacctgcggcccctgcgagccggcctcctgcccgcccctgcccccgctgggctgcctgctgggcgagacccgcgacgcgtgcggctgctgccctatgtgcgcccgcggcgagggcgagccgtgcgggggtggcggcgccggcagggggtactgcgcgccgggcatggagtgcgtgaagagccgcaagaggcggaagggtaaagccggggcagcagccggcggtccgggtgtaagcggcgtgtgcgtgtgcaagagccgctacccggtgtgcggcagcgacggcaccacctacccgagcggctgccagctgcgcgccgccagccagagggccgagagccgcggggagaaggccatcacccaggtcagcaagggcacctgcgagcaaggtccttccatagtgacgccccccaaggacatctggaatgtcactggtgcccaggtgtacttgagctgtgaggtcatcggaatcccgacacctgtcctcatctggaacaaggtaaaaaggggtcactatggagttcaaaggacagaactcctgcctggtgaccgggacaacctggccattcagacccggggtggcccagaaaagcatgaagtaactggctgggtgctggtatctcctctaagtaaggaagatgctggagaatatgagtgccatgcatccaattcccaaggacaggcttcagcatcagcaaaaattacagtggttgatgccttacatgaaataccagtgaaaaaaggtgaaggtgccgagctataaacctccagaatattattagtctgcatggttaaaagtagtcatggataactacattacctgttcttgcctaataagtttcttttaatccaatccactaacactttagttatattcactggttttacacagagaaatacaaaataaagatcacacatcaagactatctacaaaaatttattatatatttacagaagaaaagcatgcatatcattaaacaaataaaatactttttatcacaacacagtacatatttgtcatttttaaaaagccacacaatagaaacaagacaccaagatatttaattatcttgttgactcctgtaaaatagctaaacactcatcattcgcggtgcaatactcatagacataagttcctgaaacaatagtttgcatgcgtaaggcattcgcaccaaagaaatctgaaaagaaaaaacaaatggtaattagcagaattgtattgaagtgaccccacttctctaccccagaaaaagacaaagatctggtactgtagataatgaataaatgagtggagctgagaacacaca

SEQ ID NO: 118753 - DNA, 849 bp, Artificial Sequence
  derived and/or modified sequence
atggagcggcccagcctgcgggccctgctgctgggcgccgccggcctgctgctgctgctgctgcccctgagcagcagcagcagcagtgacacctgtggcccctgtgagcccgccagctgcccccccctgccccccctgggctgcctgctgggggagaccagagatgcctgtggctgctgccccatgtgtgcccggggggagggggagccctgtggcggcggcggggccggccggggctactgtgcccctggcatggagtgtgtgaagagcaggaagaggaggaagggcaaggccggggctgctgctgggggccctggggtgtctggagtgtgtgtgtgcaagagccgctaccctgtgtgtggcagtgatggcaccacctaccccagcggctgccagctgcgggccgccagccagagagctgagagcagaggagagaaggccatcacccaggtgtccaagggcacctgtgagcagggccccagcatcgtgaccccacccaaggacatctggaatgtgactggagcccaggtgtacctgagctgtgaggtgattggcatccccacccctgtgctgatctggaacaaggtgaagaggggccactatggagtgcagaggacagagctgctgcccggggaccgggacaacctggccatccagacccggggcggccctgagaagcatgaggtgacaggctgggtgctggtgagccccctgagcaaagaagatgctggggagtatgaatgtcatgccagcaacagccagggccaggccagcgccagcgccaagatcaccgtggtggatgccctgcacgagatccctgtgaagaagggggagggcgctgagctgtag

SEQ ID NO: 118754 - DNA, 849 bp, Artificial Sequence
  derived and/or modified sequence
atggagcggcccagcctgcgggccctgctgctgggcgccgccggcctgctgctgcttctgttgccgcttagttccagcagttcgtctgacacttgcggcccctgcgagcctgcatcttgtcctccactacctcctttgggctgcctcctcggagagacgagggacgcctgtggctgctgccccatgtgtgcccgaggcgagggtgaaccatgcggtgggggtggtgctggtcggggctactgcgcccccgggatggagtgcgtcaagagccggaaacggaggaagggtaaagccggagcagcagccgggggcccaggggtatcaggcgtctgtgtctgcaaatctagatatcctgtgtgcgggtctgatggcacaacttatccttcaggttgtcagctcagggccgcgtcacagagggcagaaagtcgcggggagaaggccattacccaagttagcaaaggaacctgcgagcagggcccatccatagttactccgcctaaagacatctggaacgtcactggcgcacaggtctacctcagttgcgaagtgattggcatcccaacgccagtgctaatttggaacaaggtcaagcgcggacactatggcgtgcagaggactgagctcctgcccggggatagggataatctagcaattcagactcggggaggtcctgagaagcatgaggttaccgggtgggtactggtctcccccctctccaaagaggatgccggggagtacgagtgtcatgcatccaattcacagggacaggccagtgcgtctgccaaaataaccgtggtggacgcactgcacgagatccccgtgaaaaaaggagagggagccgaactctag

SEQ ID NO: 118755 - DNA, 849 bp, Artificial Sequence
  derived and/or modified sequence
atggagagaccatccctccgagccctcttgctgggtgccgctggcttactcctgctgcttttacccctctcaagcagtagcagttctgacacctgcgggccatgcgagccggcatcttgccctccccttccaccactcggttgcttgctgggcgagacgagagacgcctgcggatgctgtcccatgtgtgcccgtggtgaaggcgagccctgcgggggtggtggagccggaaggggatattgcgctccaggtatggagtgcgtgaaaagcaggaaaaggcggaaaggcaaagccggagctgccgcaggcggtccgggagtgagcggggtatgcgtatgcaagtcacggtatccagtatgtgggtctgacggaacaacgtacccttccggatgccaattacgcgctgcgtcccaaagagccgaatcccgcggagaaaaggcaatcactcaggtaagtaaggggacctgcgagcagggcccatccattgttacacctcctaaggatatttggaatgtaaccggggcacaggtgtatctaagttgcgaggtaattgggattcctacacccgtgctgatctggaataaagttaaacgaggccactacggtgtccaacgcacagaactgctcccaggcgacagggacaacctggcgattcaaaccagagggggaccagaaaaacatgaagttacagggtgggtgttagtgtctccgctgtcaaaggaggatgcgggtgagtacgaatgccacgcgtcgaattctcaggggcaggccagcgcatccgccaaaataaccgtggtcgacgcactgcacgagatcccggtcaaaaagggggagggcgcagagctatag

SEQ ID NO: 118756 - DNA, 849 bp, Artificial Sequence
  derived and/or modified sequence
atggagagacccagcctgagagccctgctgctgggcgccgccggcctgctgctgctgctgctgcccctgagcagcagcagcagcagcgacacctgcggcccctgcgagcccgccagctgcccccccctgccccccctgggctgcctgctgggcgagaccagagacgcctgcggctgctgccccatgtgcgccagaggcgagggcgagccctgcggcggcggcggcgccggcagaggctactgcgcccccggcatggagtgcgtgaagagcagaaagagaagaaagggcaaggccggcgccgccgccggcggccccggcgtgagcggcgtgtgcgtgtgcaagagcagataccccgtgtgcggcagcgacggcaccacctaccccagcggctgccagctgagagccgccagccagagagccgagagcagaggcgagaaggccatcacccaggtgagcaagggcacctgcgagcagggccccagcatcgtgaccccccccaaggacatctggaacgtgaccggcgcccaggtgtacctgagctgcgaggtgatcggcatccccacccccgtgctgatctggaacaaggtgaagagaggccactacggcgtgcagagaaccgagctgctgcccggcgacagagacaacctggccatccagaccagaggcggccccgagaagcacgaggtgaccggctgggtgctggtgagccccctgagcaaggaggacgccggcgagtacgagtgccacgccagcaacagccagggccaggccagcgccagcgccaagatcaccgtggtggacgccctgcacgagatccccgtgaagaagggcgagggcgccgagctgtag

SEQ ID NO: 118757 - protein, 1336 aa, Artificial Sequence
  derived and/or modified sequence
MTLDRPGEGATMLKTFTVLLFCIRMSLGMTSIVMDPQPELWIESNYPQAPWENITLWCRSPSRISSKFLLLKDKTQMTWIRPSHKTFQVSFLIGALTESNAGLYRCCYWKETGWSKPSKVLELEAPGQLPKPIFWIQAETPALPGCNVNILCHGWLQDLVFMLFKEGYAEPVDYQVPTGTMAIFSIDNLTPEDEGVYICRTHIQMLPTLWSEPSNPLKLVVAGLYPKPTLTAHPGPIMAPGESLNLRCQGPIYGMTFALMRVEDLEKSFYHKKTIKNEANFFFQSLKIQDTGHYLCFYYDASYRGSLLSDVLKIWVTDTFPKTWLLARPSAVVQMGQNVSLRCRGPVDGVGLALYKKGEDKPLQFLDATSIDDNTSFFLNNVTYSDTGIYSCHYLLTWKTSIRMPSHNTVELMVVDKPPKPSLSAWPSTVFKLGKAITLQCRVSHPVLEFSLEWEERETFQKFSVNGDFIISNVDGKGTGTYSCSYRVETHPNIWSHRSEPLKLMGPAGYLTWNYVLNEAIRLSLIMQLVALLLVVLWIRWKCRRLRIREAWLLGTAQGVTMLFIVTALLCCGLCNGVLIEETEIVMPTPKPELWAETNFPLAPWKNLTLWCRSPSGSTKEFVLLKDGTGWIATRPASEQVRAAFPLGALTQSHTGSYHCHSWEEMAVSEPSEALELVGTDILPKPVISASPTIRGQELQLRCKGWLAGMGFALYKEGEQEPVQQLGAVGREAFFTIQRMEDKDEGNYSCRTHTEKRPFKWSEPSEPLELVIKEMYPKPFFKTWASPVVTPGARVTFNCSTPHQHMSFILYKDGSEIASSDRSWASPGASAAHFLIISVGIGDGGNYSCRYYDFSIWSEPSDPVELVVTEFYPKPTLLAQPGPVVFPGKSVILRCQGTFQGMRFALLQEGAHVPLQFRSVSGNSADFLLHTVGAEDSGNYSCIYYETTMSNRGSYLSMPLMIWVTDTFPKPWLFAEPSSVVPMGQNVTLWCRGPVHGVGYILHKEGEATSMQLWGSTSNDGAFPITNISGTSMGRYSCCYHPDWTSSIKIQPSNTLELLVTGLLPKPSLLAQPGPMVAPGENMTLQCQGELPDSTFVLLKEGAQEPLEQQRPSGYRADFWMPAVRGEDSGIYSCVYYLDSTPFAASNHSDSLEIWVTDKPPKPSLSAWPSTMFKLGKDITLQCRGPLPGVEFVLEHDGEEAPQQFSEDGDFVINNVEGKGIGNYSCSYRLQAYPDIWSEPSDPLELVGAAGPVAQECTVGNIVRSSLIVVVVVALGVVLAIEWKKWPRLRTRGSETDGRDQTIALEECNQEGEPGTPANSPSSTSQRISVELPVPI

SEQ ID NO: 118758 - DNA, 4011 bp, Artificial Sequence
  derived and/or modified sequence
atgaccctggacagacccggcgagggggcaaccatgctaaagacctttactgtgttgctcttttgcattcgtatgtcgctgggcatgaccagcattgtgatggacccccagcccgagctctggatcgagagtaattatccgcaggccccttgggaaaacattacactctggtgtaggtctccttcccggatttcgtccaaatttctgctgctgaaagataagactcagatgacctggatacgtccttcccacaagacctttcaggtgagcttcctcataggtgcccttacagaatccaatgccgggctgtaccgttgctgttactggaaggagaccgggtggtccaaaccatctaaagtgcttgaactggaggcccctggccagctgcccaaacccatcttctggatacaagcagagactccagctctgcccggttgcaacgtgaacatactctgccatgggtggcttcaagacctggtcttcatgttgttcaaagaggggtacgctgaaccagtggactaccaggttcccaccgggacgatggcaatcttcagcatagacaacctgacccccgaggatgaaggcgtgtatatatgccgtacccacatccagatgctgccgacactctggagtgagccatctaaccctttgaagctcgttgtggcaggcctgtaccctaaaccgacgctaacggcgcacccagggcctatcatggccccaggagagtctcttaacctaagatgccaaggtccaatctacgggatgactttcgccctgatgagagtcgaagatctagaaaagtccttttatcataagaagacaatcaagaacgaagctaactttttcttccagtcactcaagatccaggacactggacattatctctgtttctactacgacgcgagttacagaggctctcttctctcagatgtcctgaagatctgggtcaccgatacctttccaaagacctggttgctggcgcgcccatctgccgtggtccagatggggcagaacgtatccctccgatgccggggccccgtggacggagtgggcctggcactctataagaaaggcgaagacaagccactgcagtttctggatgccacatcaatcgacgacaatacctcgtttttcctgaataacgtgacatactccgacacaggtatttactcgtgtcactacctcctcacttggaagacctcaattcggatgccttctcacaacaccgtggagctaatggtggtggacaaaccccctaaaccaagcctgagcgcatggccttccactgtgttcaaacttgggaaggcgatcacattgcagtgccgcgtaagccacccagtcttggagttctctttagagtgggaggagagagaaacgtttcagaagttcagcgtgaacggcgacttcattatctctaatgtggacggaaagggaacgggcacttacagctgttcataccgagtcgaaacacaccccaatatatggtcccaccgctctgaaccactaaagttaatggggccagctgggtacttgacttggaattatgtacttaacgaagccatcagactgtctctgattatgcagctggtggctctgctcctggttgtcttgtggattcgctggaaatgtcggcgtctgcgcataagggaggcttggctgctaggcacggcacaaggtgtcaccatgctgttcattgtaaccgccttgctttgctgcgggctctgtaacggcgtacttattgaggagaccgagatcgtcatgccgacgccaaaacctgaactgtgggccgagaccaactttcctctggctccctggaagaatctcactctgtggtgcaggtccccttcaggatccacaaaagaatttgtactgttaaaagatgggaccggatggatcgcaacaagacctgcaagcgagcaggtgcgagctgccttcccactcggcgccctgacgcagagtcatacaggcagctaccactgtcactcttgggaagaaatggcagtgagcgaacccagcgaagcactggagttagtaggcaccgatattctcccaaagccagtgatttccgcaagtcctaccatacgcgggcaggagctgcagctgaggtgcaagggctggttagccgggatgggtttcgctctgtataaggaaggggaacaggaacccgtccagcagctaggcgcagtgggcagagaggcgttcttcaccattcagcgaatggaggataaggacgaaggaaactatagctgccggacccatacggaaaagaggcctttcaagtggtctgagccctcagaaccgctggaattagtgataaaggagatgtaccccaaacccttcttcaagacatgggcctcgcctgtggttacgccaggagccagggtgacattcaattgctcaactccccaccagcatatgtcatttattctctacaaggacgggagcgagatcgcctcttcagatagatcgtgggccagccccggggcatccgcagctcatttcctcattattagtgtaggcatcggtgatggaggtaattacagctgccgctactatgatttcagtatctggtccgagccatctgaccccgtggaattggtggttaccgagttctatcctaagcccacgctgctggcgcagccaggccccgtcgtcttcccaggaaaatccgtgatcctccgttgtcagggaacatttcaaggaatgcgcttcgcactacttcaggagggagctcatgttccactgcagtttcgctcggtgtctggtaactccgcagatttcttacttcataccgtgggcgccgaggacagcgggaactactcatgtatatattacgagacgacgatgagcaatcgcggtagctatctgagcatgcccctgatgatctgggtgaccgacacatttcctaaaccctggctctttgcagagccgtcgagcgtggtacctatggggcagaatgtaactctctggtgcaggggtcccgttcatggggtcggctatattctacacaaggagggtgaggccacatctatgcagttatggggaagcacctctaacgatggtgccttccccatcacaaacatcagtggcacgagtatggggcgatactcatgctgttaccaccctgattggacctccagtattaaaatacagccatcaaacacgttggagctgctcgtgaccggattactacctaagccttccctcctagcacaaccaggccctatggtagcgcctggcgagaacatgacactacagtgtcagggcgaattacctgatagtaccttcgtgttacttaaggagggcgcccaggagcctctggaacagcagcgccccagcggctaccgggccgatttttggatgcctgccgttcgcggagaggactctggaatctattcatgcgtatactatttggatagcaccccattcgccgcgtctaaccactctgatagcctggaaatttgggtaaccgacaagccaccgaagccatccctgagcgcttggccctccacgatgttcaaactgggaaaggatattacactgcagtgtcgagggcccttacctggggtcgagtttgtgctggagcatgacggagaggaagcaccacagcaattctccgaagacggggacttcgtgatcaataatgtggaaggaaagggtatcgggaattattcttgtagctatcgactccaagcctatccagatatttggtccgagccaagtgaccccttggagcttgttggcgctgcagggcctgtcgcccaggaatgcactgtaggaaacatagtccggtcatccctcatcgttgtggttgtggtggccctgggcgttgtgctggccatcgaatggaaaaagtggccgcgactgagaactcgtggcagtgagactgatgggcgggatcagactatcgccctcgaggaatgcaaccaggagggagagccggggacaccagcaaattctccctccagcactagccaacgtatatcggttgagctgcctgtccccatttag

SEQ ID NO: 118759 - DNA, 4378 bp, Artificial Sequence
  derived and/or modified sequence
gccttcaactaccatcccaccacctgctgaggagaaaaattcttcaagactcagagcacacagccagcaccagaggccccatgaccctggacagaccaggggagggggccaccatgctgaagacattcactgttttgctcttttgcattcggatgagtctgggtatgacatcaatagtgatggaccctcaaccagagttgtggatagagtccaactacccccaggccccttgggagaacatcacgctttggtgccgaagcccctctcggatatcaagcaagttcctgctgctgaaggataagacacagatgacctggatccgcccttcccacaagaccttccaagtttcattccttataggtgcccttactgagtccaatgcaggtctttaccggtgctgctactggaaggagacaggctggtcaaagcccagtaaagttctagagttggaggcaccaggccaactgcccaagcccatcttctggattcaggctgagacccccgctcttcctgggtgtaatgttaacatcctctgccatggctggctgcaggatttggtattcatgctgtttaaagagggatatgcagagcctgtggattaccaagtcccaactgggacaatggccatattctccattgacaacctgacacctgaggatgaaggggtttacatctgccgcactcatatccagatgctccccaccctgtggtcagagcccagcaaccccctgaagctggttgtagcaggactctaccccaaaccaactttgacagcccatcctgggcccatcatggcacctggagaaagcctgaatctcaggtgccaagggccaatctatggaatgacctttgctctaatgagggttgaagacttggagaagtccttttaccacaagaagacaataaaaaatgaggcaaatttcttcttccagtctttgaagatccaagatactggacattacctctgtttttactatgacgcatcatatagaggttcactccttagtgatgtcctgaaaatctgggtgactgacactttccccaagacctggctacttgctcggcccagtgctgtggtccaaatgggtcagaatgtgagcctacggtgtcgaggaccagtggatggagtgggtcttgcactctataagaaaggagaagacaaaccacttcaatttttggatgccaccagcatcgatgacaacacatcattcttcctcaacaatgtaacctacagtgatactggcatctatagctgccactatcttctcacctggaagacctccattaggatgccatcacacaacactgtggagcttatggttgtagataagccccccaaaccctccctgtcagcttggccaagcactgtgttcaagctaggaaaggccatcacccttcagtgccgagtatctcatccagtactggaattttctctggaatgggaagaaagagaaacattccaaaaattctcagtaaacggagacttcatcatcagtaatgttgacgggaaaggcacagggacctacagttgcagctatcgcgtagagacacatcctaacatctggtcacatcgcagtgagcccctgaagctgatggggccagcaggctatctcacctggaattacgttctgaatgaagctatcaggttgtctctaatcatgcagcttgttgccttgctgttggtagtgctgtggataaggtggaagtgtcggagactcagaatcagagaagcctggttgctgggaacagctcaaggggtcaccatgctcttcatagtcacggcccttctctgctgtggactgtgcaatggggtattgatagaagagactgaaatagtcatgccaacccctaagcctgagctgtgggcagagaccaactttcctctggccccgtggaagaacttaaccctctggtgcagaagcccttctggctcaactaaggagtttgtgttgctgaaggatgggaccgggtggatcgccactcgcccggcctcagagcaggtccgggctgccttcccccttggcgccctgacccagagccacaccgggagctaccactgccattcatgggaggagatggctgtatcggagcccagtgaggcacttgagctggtggggacagacatcctccccaaacctgtcatttctgcttcccccacaatccggggccaggaactacaactccggtgcaaaggatggctggcaggcatggggtttgctctgtataaggagggagagcaagaacctgtccagcaacttggtgctgttggaagagaagccttctttacaatccagagaatggaggataaagacgaaggcaattacagctgccgcactcacactgaaaaacgccccttcaagtggtctgagcccagtgagccgctggagcttgtcataaaagaaatgtaccctaagcccttcttcaagacatgggccagccctgtggtcacccctggtgcccgagtgactttcaattgctccaccccccaccagcatatgagctttattctttacaaagatggaagtgaaatagcatccagtgacaggtcctgggcaagtccgggggccagtgcagctcactttctaatcatttcggtgggcattggtgatggagggaattacagctgccgatattatgacttttctatctggtctgagcccagcgaccctgtggagctcgtggtgacagaattctaccccaaacccactctcctggcacagccaggtcctgtggtgtttcctgggaagagtgtgatcctgcgctgccaagggactttccagggcatgaggttcgccctcttgcaggagggagcccatgttcccttacagtttcggagtgtctcagggaactcagctgacttccttctccacactgttggagcagaggactctgggaactatagctgtatctactatgagacaaccatgtcaaacagggggtcatatctcagtatgccccttatgatctgggtgactgacacattccctaagccatggttgtttgctgagcccagttctgtggttcccatggggcagaatgttactctctggtgccgagggccggtccatggagtaggatacattctgcacaaagaaggagaagccacttcaatgcagctctggggatccaccagtaatgacggggcattccccatcaccaatatatctggtactagcatggggcgttacagctgctgctaccaccctgactggaccagttctatcaagatacaacctagcaacaccctggaactcctagtcacaggcttactccccaaacccagcctattagcccagcctggtcccatggtggcccctggcgaaaatatgactcttcagtgtcaaggggaactgccagactcaacatttgtcctgttgaaggagggggctcaggagcctttagagcaacagaggccaagtgggtacagggctgacttctggatgccagcagtgagaggtgaagactctgggatctatagctgtgtttattatttggactctactccctttgcagcttcaaatcacagtgactccctggagatctgggtgactgataagccccctaaaccctctctgtcagcctggcccagcaccatgttcaagttagggaaggacatcacccttcagtgccgaggacccctgccaggtgttgaatttgtcctagaacatgatggagaagaagcacctcagcagttttcagaggatggagactttgtcatcaacaacgtagaaggaaaaggcattggaaactacagctgcagctaccgcctccaggcctaccctgatatctggtcagagcctagtgatcccctggagctggtgggggcagcagggcctgttgctcaggagtgcactgtagggaacattgtccgaagtagcctaatcgtggtggttgttgtagccttgggggtagtgctagccatagagtggaagaagtggcctcgactgcgaaccagaggctcagagacagacggaagagaccagaccattgcccttgaagagtgtaaccaagaaggagaaccaggcacccctgccaattctccttcatcaacctctcagagaatctctgtggaactgcccgttccaatataataatctcctcctttacaagagctttcctctcctctctcttgctctcagagacctataaatccaaccagttaccctgcaagtcagccccatctgctgttccttggtctctaatcacctgagctgggtaaaggggattctgggagttgagagctctgccagggtgagatgtttcctgaagagaggttccccacccctgtaactcctcactgtactgatttactggcgcatgaaattctattaaaaatgcattcttctgaataaaaagagtattcactatttaacttcaa

SEQ ID NO: 118760 - DNA, 4011 bp, Artificial Sequence
  derived and/or modified sequence
atgaccctggacaggcctggagagggcgccaccatgctgaagaccttcaccgtgctgctcttctgcatccgcatgagcctgggcatgaccagcatcgtgatggacccccagcctgagctgtggattgagagcaactacccccaggccccctgggagaacatcaccctgtggtgccgcagccccagccgcatcagcagcaagttcctgctgctgaaggacaagacccagatgacctggatccggcccagccacaagaccttccaggtgtccttcctgattggagccctgacagagagcaatgccggcctgtaccgctgctgctactggaaggagaccggctggagcaagcccagcaaggtgctggagctggaggcccctggccagctgcccaagcccatcttctggatccaggccgagaccccagccctgcccggctgcaatgtgaacatcctgtgccacggctggctgcaggacctggtgttcatgctgttcaaggagggctatgcagagcctgtggactaccaggtgcccaccggcaccatggccatcttcagcattgacaacctgaccccagaagatgaaggagtgtacatctgcaggacccacatccagatgctgcccaccctgtggagcgagcccagcaaccccctgaagctggtggtggccggcctgtaccccaagcccaccctgacagcccaccctggccccatcatggcccctggagagagcctgaacctgcgctgccagggccccatctacggcatgacctttgccctgatgagggtggaggacctggagaagagcttctaccacaagaagaccatcaagaatgaggccaacttcttcttccagagcctgaagatccaggacaccggccactacctgtgcttctactatgatgccagctaccggggcagcctgctgagtgatgtgctgaagatctgggtgacagacaccttccccaagacctggctgctggcccggcccagcgctgtggtgcagatgggccagaatgtgtccctgcgctgccggggccctgtggatggagtgggcctggccctgtacaagaagggggaggacaagcccctgcagttcctggatgccaccagcattgatgacaacaccagcttcttcctgaacaacgtgacctacagcgacaccggcatctacagctgccactacctgctgacctggaagaccagcatccgcatgcccagccacaacacagtggagctgatggtggtggacaagccacccaagcccagcctgagcgcctggcccagcacagtgttcaagctgggcaaggccatcaccctgcagtgccgggtgagccaccctgtgctggagttcagcctggagtgggaggagcgggagaccttccagaagttctctgtgaatggagacttcatcatcagcaatgtggatggaaaaggaacaggcacctacagctgcagctacagagtggagacccaccccaacatctggagccacaggtctgagcccctgaagctgatgggccctgctggctacctgacctggaactacgtgctgaatgaggccatccggctgagcctcatcatgcagctggtggccctgctgctggtggtgctgtggatccgctggaagtgccggcggctgcgcatccgggaggcctggctgctgggcacagcccagggcgtgaccatgctgttcatcgtgacagccctgctgtgctgcggcctgtgcaatggagtgctgattgaggagacagaaattgtgatgcccacccccaagccagagctgtgggccgagaccaacttccccctggccccctggaagaacctgaccctgtggtgccgcagccccagcggcagcaccaaggagtttgtgctgctgaaggatggcaccggctggatcgccaccaggcctgccagcgagcaggtgcgggccgccttccccctgggcgccctgacccagagccacacaggcagctaccactgccacagctgggaggagatggctgtgtctgagcccagcgaggccctggagctggtgggcacagacatcctgcccaagcctgtgatcagcgccagccccaccatccggggccaggagctgcagctgcgctgcaagggctggctggccggcatgggctttgccctgtacaaggagggggagcaggagcctgtgcagcagctgggcgctgtgggccgggaggccttcttcaccatccagaggatggaggacaaggatgagggcaactacagctgcaggacccacacagagaagaggcccttcaagtggagcgagcccagcgagcccctggagctggtgatcaaggagatgtaccccaagcccttcttcaagacctgggccagccctgtggtgacccctggggcccgggtgaccttcaactgcagcaccccccaccagcacatgtccttcatcctgtacaaggatggcagcgagatcgccagcagtgaccgctcctgggccagccctggggccagcgctgcccacttcctgatcatctctgtgggcattggagatggcggcaactacagctgccgctactatgacttcagcatctggagcgagcccagcgaccctgtggagctggtggtgacagagttctaccccaagcccaccctgctggcccagcccggccctgtggtgtttcctgggaagagcgtcatcctgcgctgccagggcaccttccagggcatgagatttgccctgctgcaggagggcgcccacgtgcccctgcagttccgctctgtgtctggcaacagcgctgacttcctgctgcacacagtgggcgcagaagattctggcaactacagctgcatctactatgagaccaccatgagcaacagaggcagctacctgtccatgcccctgatgatctgggtgacagacaccttccccaagccctggctgtttgctgagcccagctctgtggtgcccatgggccagaatgtgaccctgtggtgccggggccctgtgcacggcgtgggctacatcctgcacaaggagggggaggccacctccatgcagctgtggggcagcaccagcaatgatggagccttccccatcaccaacatcagcggcacctccatgggccgctacagctgctgctaccacccagactggaccagcagcatcaagatccagcccagcaacaccctggagctgctggtgacaggcctgctgcccaagcccagcctgctggcccagcccggccccatggtggcccctggagagaacatgaccctgcagtgccagggcgagctgcctgacagcacctttgtgctgctgaaggagggcgcccaggagcccctggagcagcagaggccttctggctacagagctgacttctggatgcctgctgtgagaggagaagattctggcatctacagctgtgtgtactacctggacagcaccccatttgctgccagcaaccacagcgacagcctggagatctgggtgacagacaagccacccaagcccagcctgagcgcctggcccagcaccatgttcaagctgggcaaggacatcaccctgcagtgccggggccccctgcccggggtggagtttgtgctggagcatgatggagaggaggccccccagcagttctctgaagatggagactttgtgatcaacaacgtggagggcaaaggaattggcaactacagctgcagctaccgcctgcaggcctacccagacatctggagcgagcccagcgaccccctggagctggtgggcgccgccggccctgtggcccaggagtgcaccgtgggcaacatcgtgcgcagcagcctcatcgtggtggtggtggtggccctgggcgtggtgctggccatcgagtggaagaagtggccccggctgcggacccggggcagcgagacagatggccgggaccagaccatcgccctggaggagtgcaaccaggagggggagcccggcaccccagccaacagccccagcagcaccagccagaggatctctgtggagctgcctgtgcccatctag

SEQ ID NO: 118761 - DNA, 4011 bp, Artificial Sequence
  derived and/or modified sequence
atgaccctggaccggcccggcgagggcgccaccatgctgaagaccttcactgttctcctcttctgtatccgtatgagcctgggaatgacaagtatcgtaatggatccccagcctgaattgtggatagagtccaactatcctcaggctccctgggaaaatatcacgctctggtgtaggtctcccagtagaatctctagtaagtttctgctgctgaaggacaagacacaaatgacatggatccgaccctcccacaaaactttccaggttagcttcttaattggcgcgctaaccgagtccaacgctggattatataggtgctgctactggaaagagacaggatggtccaagccctcaaaggtgcttgagctggaagcccctggtcaactccccaagcccatcttctggatccaggcagaaactcccgccctgcccgggtgcaacgtcaacatcctttgtcacggttggctgcaggacctggtattcatgctgtttaaagaaggttacgctgaacccgtcgactaccaagtgcctactgggactatggccatcttttcgattgataatttgactcctgaggacgagggagtgtatatctgtcggacacacatccagatgttgcccaccctgtggtcggaaccatcgaaccccctcaagctagttgtcgcaggactctaccccaaacccacacttacggcccatcctggacctatcatggcacctggggaatctctcaatctccgttgccagggtccaatttacgggatgacctttgctctgatgcgcgttgaagatctggagaaaagcttctaccacaaaaaaactattaaaaatgaggccaatttcttctttcagtccctaaagattcaggacaccgggcactacctctgtttctactatgacgcttcctaccggggttctctactttctgatgtactgaaaatctgggtgactgataccttcccgaagacttggctcttagcccggccatctgcggtagttcaaatggggcagaacgtgtcactgcgatgccgaggcccggtggatggcgtgggcctcgccctgtataagaaaggcgaggataagccactacaattcctagatgccaccagtattgatgacaatacaagcttttttttgaacaatgtgacctactccgatacgggcatttactcatgccattatctgctgacctggaagaccagcatccgaatgccctcacacaataccgtagagcttatggtggtggataaaccacccaaacctagtctctcagcatggccctccaccgtgttcaaactggggaaggctataacactccaatgtcgcgtgagtcatcccgtgctcgagtttagcctggaatgggaagagagggaaacgttccaaaaattttctgtgaatggggattttattatctcaaacgttgacggaaagggcaccgggacttactcttgtagctaccgcgtcgagacacatcctaacatctggagccatcgcagtgaacctctgaaactcatggggcccgctgggtacctgacatggaattatgtgctgaacgaggctatccggctgtcccttatcatgcagctcgtcgctctgcttttagtcgtcctgtggatcagatggaaatgccggcgtttgcgcattagagaagcttggctcctcggaacagcccagggcgttactatgctgtttatcgtgacggctcttctttgctgtggcttatgtaatggagttttgattgaagagaccgaaatcgtcatgcccacaccaaagcccgagctttgggccgagactaacttcccgctggcaccttggaaaaatctaacactgtggtgccgcagcccatcagggtccacaaaggagttcgtgcttctgaaagatggcacaggctggattgctaccagacccgcttctgaacaggtgcgggccgcattcccgctcggcgcacttactcagagccataccggatcctaccattgtcactcctgggaggagatggccgtatctgagccttccgaggcactggaattagtagggactgatatactgccaaagcccgttatttccgcgagcccgaccattcgcggccaggaactgcagttaaggtgtaagggctggctggcgggcatgggattcgcgctatataaagagggcgagcaggagccggtgcaacagttaggggcggtcggcagggaggcatttttcaccattcagaggatggaagacaaggatgagggtaactacagttgccggacacatacagaaaagagaccattcaagtggtctgaaccctccgagcctctcgagctggtcatcaaagaaatgtaccccaaaccattcttcaaaacttgggcttctcccgtggtgacacccggagcccgcgtgacattcaactgctcaacccctcaccaacacatgtctttcatcctgtacaaggacggtagcgagatcgccagctctgaccgcagctgggcttcacccggagcttcagccgctcacttcctgattatctccgtcggcatcggagatggtgggaactattcctgcaggtactacgacttttctatttggtctgaacctagtgaccccgtggagttagttgtgaccgaattttatcccaagcctacacttcttgcccaacccggccctgtagtgttcccagggaaatccgtcattctccgctgccagggtacttttcagggtatgcgtttcgccctgctccaggagggagcgcatgtcccgctccagttcaggagcgtatccggaaactccgccgacttcttgttgcacaccgtcggtgccgaggacagcggcaattatagctgtatatattacgagaccaccatgtctaaccgtggctcttacctgtccatgccgctgatgatttgggtaacagacacattccctaagccttggctgttcgctgaaccatctagtgtcgtgccgatgggacagaacgtcactctctggtgccggggcccagtgcatggcgtggggtacatcctccacaaagaaggggaggctacttcaatgcagctgtgggggtctacgagcaatgacggggcctttccgattactaatattagcggtactagtatggggcgctactcttgctgctaccatcctgactggacctcatccattaaaatccagccctctaacactttggaacttctcgtcactggccttctcccaaagcctagcctactggcgcagccaggcccaatggtcgccccaggtgagaacatgaccctgcaatgtcagggcgagctgccagattcaacgtttgtgctgctcaaagaaggtgctcaagagcccctggagcagcagaggcctagcgggtaccgggccgacttctggatgcccgccgtaagaggagaggatagcggaatctactcttgtgtgtactatctggacagcacgccatttgctgcatcaaaccactccgatagccttgaaatttgggtaacagacaagccccctaaacccagtctgtcggcctggccctctacaatgttcaagctgggcaaagatatcacccttcagtgccgcggaccacttcccggcgtagagtttgtgttggagcacgacggtgaggaggcccctcagcagtttagtgaggatggagattttgtgatcaacaatgtagaaggaaagggtattgggaattattcttgctcataccgtttacaagcataccccgatatctggtctgaaccatcggaccccctggagctggttggagccgctggccctgtcgcccaggaatgcaccgtgggcaacattgttaggtcctctctgatagtggtggtagtcgtggctctgggcgtcgttttagcaattgaatggaagaagtggcccagacttagaaccagagggtcagagacagatggcagagatcagacaatagcactcgaggagtgcaatcaagaaggcgagccaggcacccctgctaacagccccagtagcacttcacagcgcattagcgttgagctccccgtccctatctag

SEQ ID NO: 118762 - DNA, 4011 bp, Artificial Sequence
  derived and/or modified sequence
atgaccctggaccgccctggcgagggtgccaccatgctgaagaccttcactgtgttgctgttttgtatccggatgtcactgggcatgacatccattgtgatggatccccaacccgagctgtggatagaatcgaattaccctcaggccccttgggaaaatattaccttatggtgccgaagtcccagcaggatcagttccaagtttttgcttcttaaagataaaactcaaatgacctggatccggccatcccacaaaacatttcaagtttcatttctgattggagctttgaccgagagtaacgccggtctctaccggtgttgttactggaaggagactggctggagcaaaccttccaaggtcttggaattggaggcccctggacagcttccaaagcccatcttttggatccaggcggaaacaccagctttgcccggttgcaacgtcaacattctgtgtcatggctggctgcaggacctcgtttttatgttgtttaaggaagggtacgccgagcccgtagactatcaggtcccaaccggcactatggctatcttctctatcgataatctgacacccgaagatgagggtgtatacatatgtaggacccacatccagatgctgcctacactgtggtcagaacctagtaacccgttgaagctcgttgtggccggactgtacccaaaacctacactaacagcacaccctggtcctattatggctccaggcgaaagtcttaacttgcggtgccaggggcctatatacggaatgacattcgccttaatgcgggttgaagacctcgagaaatctttttaccacaaaaagactatcaaaaacgaggccaatttcttttttcagtctctgaagattcaggatacgggccattatctgtgcttctactacgacgcaagctataggggctcactgctcagcgatgtgctgaagatatgggtgaccgatacattcccaaagacctggttgcttgccagacctagcgcggtcgttcaaatggggcagaatgtctctttgcgttgcagaggaccagttgacggggtgggactggcgctgtataaaaaaggagaggacaaacccctccaatttctcgacgcaacgtccattgatgataacacaagtttcttcttgaacaacgtgacttattcagatactgggatttattcgtgtcactatcttctcacttggaaaacctcaataaggatgcctagtcataacacggtggagctgatggtcgtggacaagccacccaagccctcgctgagtgcctggccctccacagtgtttaagctcggtaaggcgatcaccctgcagtgcagggtgagccatcccgttctcgaattctccttagaatgggaggagagggaaacgttccaaaaattcagtgtgaacggcgatttcattatctcaaatgtcgatggaaaggggaccggaacctatagctgctcttatcgggtggagacccatcccaacatctggagccatcgctccgagccgttgaaattaatgggcccagctggctacctcacgtggaactacgtcctaaatgaagcgatcagactgtccctgattatgcagctggtggccctgctgctagttgtgctgtggatacgctggaagtgtcggagacttagaatcagggaggcttggctgttgggcacggcacagggagtgactatgctattcatcgttactgcactcctctgctgtggcctatgtaatggtgtccttattgaggagacagaaatcgtcatgccaacacctaaacccgaactgtgggccgaaacaaatttcccgttggcgccatggaagaacttaacattgtggtgtcggtcaccatctggctctaccaaagaattcgtcttgctgaaagatgggaccggttggattgccacccggccagcatccgaacaagtgagggctgcttttcctctgggcgctctgactcagtctcacaccgggtcctatcactgtcatagctgggaggaaatggccgtgtcggaaccatccgaagccctggaactcgtcggcacagatattctgcccaagccagtgatatctgcatccccaactattcggggtcaagagctccagctccggtgcaagggatggctggccggaatgggttttgcactgtataaggagggcgagcaggagccagtccagcaactgggggcagtgggacgggaggccttttttaccatccagaggatggaggacaaggacgaaggtaactacagctgtcgaacacacactgagaagcgaccattcaaatggtctgagccatccgaacccctggaattggtaatcaaggagatgtaccccaaaccgtttttcaagacctgggccagtcccgttgtcacccctggagccagggtcactttcaactgttctaccccgcaccagcatatgtcctttatactgtacaaggacggtagcgagatcgcatcttccgatcgaagctgggctagtcctggcgcatctgcggctcacttcctcattatttcggtgggcatcggagatggcggaaattactcttgtcggtattatgatttctcgatctggagcgaaccctctgatcccgttgagttggtggttaccgaattctaccccaagccgacattgctggcccaacctggtccagttgtcttccctggcaagagtgtcattctacgttgccaggggacgtttcagggcatgcgttttgcattactgcaggaaggagcgcacgtgcccctccagttccgctccgtgagtggcaactccgccgactttcttcttcatacggtgggggcagaagactctggaaattatagctgtatctattacgaaaccaccatgagtaaccgcggaagttacctgtccatgcctctcatgatctgggtgacagataccttccctaagccttggttgtttgcagagccaagcagcgtcgtgcccatgggccaaaacgtgaccctgtggtgtcggggtcctgtgcacggggtggggtacattctgcacaaggaaggtgaagctacatcaatgcagctttgggggtccacaagtaatgacggcgctttccccataaccaatatttctggcacctccatggggagatacagctgctgttatcaccccgactggacctcctcaatcaaaatccaacctagcaatactctggagttgctggtaacaggcctcttgcccaagccatccctgctggctcaacccggaccgatggtcgctcccggagagaacatgacactgcagtgccagggagagttacccgactctacattcgttctgttgaaagagggcgcacaagaaccactggaacagcagaggcccagtggataccgcgcagacttttggatgcccgctgtacgaggagaggacagcggtatttactcttgcgtttattacctcgactccacgccctttgcagcatcgaatcactccgactctctggaaatctgggtgaccgacaaaccacctaaaccatcattgagtgcttggccatctaccatgtttaaactggggaaggacatcacactacagtgcagggggcctctgcctggcgtggaattcgtgctggagcacgacggtgaggaggcgccacagcagttctcagaagatggggacttcgtgattaataacgttgaaggcaaggggatcggaaactacagctgcagctacagacttcaggcctaccccgacatctggtcagagccctcagacccactagagctcgtgggtgcggcaggacccgtcgcgcaggaatgtactgtgggcaatatcgtgaggagttcactcatcgtggtggttgtcgtggctctgggagttgtgctggctattgaatggaagaagtggcccaggctcagaaccagaggctcggaaactgacgggagagatcagaccattgcgctcgaggagtgcaaccaggaaggcgagccaggaacacccgctaacagtccttctagcacatcacagcgtatatcagtggagctgcccgtgccgatatag
